United States Patent Application Publication US 2008/0114160 A1 - sequence listing, part 50

SEQ ID NO: 15061 - DNA, 23987 bp, Oryza sativa
  unsure (1)..(23987): unsure at all n locations
gtatgccaaaaaggactacacctggcgaagcacccgcagatcgatgcgccgaacgtgcaggtgatcaagctcatgcagagcttcaagtccaaggagtacgtcaggaagcccttctcctggcagtactactactggtacctcaccaacgatggcattgagcacctgcgcaactaccttaacctgccatctgagattgtgcctgccacactcaagaagtctgccaggccacctggccgcccatttggttctggcccacctggcgaccgcccaaggtatacatattctcgtgatgctcccttcaagtgcatgcaatttggcatatactataatgtgcttagtgaacatggggcctgtgtcaccatttcaccatgatcatataacacttatatttctacaaatgattcaaatgggaaggagaaaattatggctataaatgtctgatattattcctgtattagatttatcgttaagaatctagcttgtagcttttgagatgggagtagtgagattctgtgggcagagcagtggagctttttagcatgtcagcacgtttgttgcataaaattgtccttcaagaaatatgttgctctcattttggtagaggtgttgatcgttttcatctgaccacagggcttctgctttagggtgaagcttgtaattttctgtgcattgttcataatgttcttgctttaggctgcagcttttgcttgtacagtgctttctaagcttgtgtataaataagataggattagaatgataaatgtattcaagatgtgttgatgtggtttggtttaagttaatctgttcatagtctttcctgatttaatggaggctgattctatactgttgattctctttgcgatgtatgtaggggcccgcctcgctttgaaggggacaggccaaggtttggtgacagagatgggtaccgtggtggtcctcgtggtgctcctggtgactttggtggtgagaagggtggagctcctgctgagttccagccatcctttagggtaatcaactactttccctacaagtgtttcattattgttctgttgtgtcatgtagcttatttgacttgttacgctgaatacaagacaagcaaaatccatttttgtactgcctatgatgaatttatatttggatttaccatcaacttaaaagttctagcagaattacttgtcttttttactcgtagttgtatgctacatccgagatgcctatatatttgatgttgttcgttcatgtcttcttggcctgaaaaaacgaactattgcagttccacataatgtttgggtgggatttagcgaggttcatatttttttttgtgtaaaagttttgaacaaccttgtgattttgcttgtcgaaggccctgtgcactatgcataccctgtttgttttaaacaagattttgtatttcctgttctgatatttagctaatatattgatagttcagttgatttgatgacatcaatgattttggcttatatttaccaccataaaattttgcagagctctggtggcagacctggctttggccgtggtggtggcggaggctttggcgctggcccgacctcttcctcgatggagtgaacttcccgtagtttggatatgatgttttccttcgcatgaggcgtttaattttgaaggacagttaaattatgtagcagtgatgtttgcaggatcgaccgctgttgacatatgctaaaaatatgctatcttgataccttccagtataatagtttttgcgaacgcttaagttcaatgttaatgcttttgacatattggcggaaattatcttttgcttctgaaaaaaagaattatgtgcatgtttgattgctggctgcgtgaaatagtgatatgatatctgtatgcaagtttttgatggaagtacgtgtttttgatgtgctcattcatcggagcttgcatgtcttgcgtacaatgagtacaaacaaattcttgatcgattacaatgtagacccaaccaatcaggtatccaaaactcttgcgaatgtttgatgtacaatgtaaagcgggatctaatctgtttctgggaggcagatgcaatctatgtacagcaaaatttgnggggaaaggatgcggtggtgatgcttggtgtttctgccatgttctctcaaaggctcaagagtagagcagccagcgtagatggcaccagtatgatgagctgctgccattgcaacgtcgccgtcggcggccgcagcaacgccgtggcgcccgatgtcgcgttaaagatgcctttgggcgtgccgccgtgccgagcggtcgtgcatgtaccattgccctgcacaagcaaacacgtttcaatcttttttttcaagtcagatttgaattatgatcattagtttagcaatgtgcagtgctggaattcaatcttgcattgcaacagaaatcttaacgaggtttctgcagcgaggcattacactgcaagcagagacgctcccacacccacagaccagtccgccgttggccctgtccgtggcttcagccgcaccacctcgatcacttctctgcattgttttcgcaaacaagtccagaattcaaagcctcttttaaaactagcacaagcagtttctaatccatattcatgatgcagtatcagaccttgtagaaatcgacggcgatgaaattggcccatctgtccgcggacaggtcatggcaggtggtgagcatgtcgagcagctccgccgagttgtccttgcaggccaccgggaaattcggtaggtccctgaagtagttcaccagcaccagcgacctcgagaggtcgttcatggcggccgactccgcgcggttcgggcacctccccttgatcatccccttcgtcccatctgcacccacacgcacacgcacacgcacaccatcgtcaaaggaaaacccaaaccgcaaaatcctccacgatcaaagtcacgtgactttatcagtgacacgtgggtcaatgagatcctgactccacgtgtcaatgacaaaatcattgtgacttcaaagtcaaaaaaaacatgatctcattggtgttacttaggatcagtttgacacagttacagctccacatctcctgaagctggagctcggtcaaatggtttcagcttcatctaaaataggagtggggctaagtagagtactctcataaaatagagaggtggagttgggtttacgaagcttcacaactctagtccatacctaacttctgaagctaaatttagaagtggaagatgtacgcccttacactggttttcgacgacgtagtgccactcgtaggggatgccctctgcggcctccttggcggacttggaggtgaagaggaggaggcggtggttgtcgcggaccatgtcgctgagccgcggccagtcgccgccgctcttgggcatccgccacgccgggaacacgtactttgtcaggccggaggcgttgaggacgcgggtgagccccatgggcgactccacgtagtcctccacgaacaccgtcaccacctccgacgggttccgtgccaagaaccgctcgatctcgcccagcacctccaccgccggcacctgctcgaattaaaacacattgatcagatcaaaagctctcgtgttcgtcagattcatcgggaattcagaggcgattgtacacgtaatcatgtgtgccttacgaatgcggtgaagttctggcaggcgccgccgaaggagtggcagagccagatgtcgttgcggaagtcgtacatgtccagcatcagtcctcgcacgccgttctgcacgcgtgacgtgttgatgaatagcgagaaaggcagaaagctttggcatgttaatctcatcgatttgatcgttgtttgacatgtgtaaattcagtgtaatcttgaatactctccctgatgtttgtgacggatcacggaatcaatgatgggttgattaaaatccgggtttaagtggctgtcagtgacagagggcgattgaaattgaaagtgggagagagacgggacgggcacgggacgggacggaacggcaagaatggaatggacgtgccacccgaccgtatccccctgcgccacaagggtacaaatcacgggggcacacgacgcgacgatgggaaattcggcaaggtggacagccatggaagaactgaccagcaatctgcgttggcgccacacacgcgggcgaacggcgaacctcccgtgtcgtcttccgtgcccccacgtacacgccccggtgcctttcacgcaagcggagacggcgccgcagcgtgcgcgcgcgcgcgaggccgtgcacgcgaacgcgccagggtgcgacatgggggttgtggcgcgccggactgacacctgttgcgtccgggggacacctgcccctgctgttgtggttgtggggtctaattattgggtttgtgtggggcccgcgcatccgacgtggcgcgcggcgtgtcaggaacgaacggccggaaacgaggacgacggcgaggaggattgggaagtgcgaacgaaaggaaaggacttacgttgagctggtcggtgatggtgtcctgctggttccaggccgtggcgatggccgtccccgtccgcgaccgcgtgccgagccgcgcgaacgagttgtgcgtcgtcaccacgcgtaccggttgaacggcaggtcccgcgcctgcacagcacacaaaccgccggaatttggatgcggtcagtcagcgccgccgcgcactcggagaggaagaaaccaaaccgcgacgtcaattacctaccttggtctgcgggtcgacgggggtgactgcgggtgcagncgcgggcggacgttgccgtcggccacgcacgtctcgcagtgcagcccggcgtcgcagttccggtccgccgcgcacgtctcccccacctgcaacgtacgcacacgtacaccctccattttaacccaccaattcccccctccaactaattaaacagcgcgcgtaccgcgtacgtaccttccgtgccgacacgaccagcagcagcgcggcggccgcgacggcgaacaggaggaccctcacacccggcgccggcgcctcctgccacttcgcagccatctcctcctcacccctctccctctgcgcgctctctgctcttgatgcgtatgatgcgcggttggtgctctcccagtgctgtagacgtcaagcaacggggcagcagccgcagcaagcagaatcaaggcaagtggcggaatatttgcccccctgtctctcaaggtattggatggccttgtcgttgtgttgtgtgtggctttgtatcgtaaatcgtaattcgtgggcggcgtcgccgtcacctgcttacgtacgcggcaatgcgggcgttcactcacgcacgcacacgcgccccccatccgcttcgtctttccgcctcgcgcaccttgtgacatggtgcgcgtttgaggaggaagagtgaggggggaccggtggtggtggtacggacgtcgaggcagagcagtgaccgtttcggtggtccggccggcctctgtcgtaggagctaacacggtttgaatttggcaaaaactgctggagaccacggcttgatttttttttgccattttctcgcgtgatgacacgttctttaaacaaaaataatttggctataattatgagccgtattaatataatgtggagagtttcatcggctaactaacgacgagttcagacagatcattcttggtggaataggtgatggagagagagaaatggtgccaatatacatgcacgcatctcgccgatgacaaaagacgacttctgtatgtactactggtagtatatgtatagtctttatctcgcagctgccaaaggcttgatctggtatatccgttatctgttgcaattcaaacgacatgtttccgacttaatttcagtagaccacttctgaatcccaacttttctgtgtccggaattgtccattcagaactgaacctgaacatgaagaaagacgtttgcgatacctgtctggttctagccttgtccacaaccgaaagaaaaagcctcgatcgtcagattctctctttcatgttcctgcaaaatatgcacaacaggtaccacactgaaattatgatgtgcctacacagggacaaaacacactcatactggcagagtcttgaaatatgtacacgaattgtctagtatttgaaacatgtggccatctcagccactcgagtggattatatttgtaggacgcagtgtacttaatctcccattcatcattcaaggagtcaattacggaattccttcagagacatagtcaattatcatacatatcaggaagttagttgctggctgatagctagaataatcattaatcatcaatctaatgaccaagtacatgcatcatgcatccacatcacaaacttctctttaaaaaaaaaagaagcatacatacaaacatgaaacatgcttgcggtggttagtccacttgggcgtagactaaaaacggtgttcatttttgcgtcagttatatgactatcttccaaatatacattgaccgtctgaatgtgcacacatgggtattagtgggtttggtactagttgttactcaagacaagctttaatactcaacacgttttagcaaaacacgcattttgtcaagtgaagactgaagatgatgaaggatgaagcaagcagaggttgaagaagccttaaaggcctaacaaaagcccagctttacatgatgaaagcccacataaaagagcatacaaaaatgtcaacttgtgggcttaccagctttacatagagacagcactggaggacctctggtgcaagttgcgtttggcaaaatgagagaaagctccagcctccagctagtagagaaatatactttggagtttggacaataccttgtggtgtggcgagagaaaagctggggagctcttcagagaggaaacagacatgtctctgcttgtgtggcacaacttttgaagttctctttctcggcatggcctttttgggggtatggtagcttatggcgaagctgcgtttgcccgtgagaaacttcccaggtagaaaacaacaatggcgccaggacaagtatagatgctagcaagtgatactgtctgcatgctgtttgctatacattattgtactaggattagacaagaagatgttagagtagagtggtcaaacaccaggcatactagtatcactgcgtgcattgacatgcatgtatgaatggatgtacctgtgctgccggtcctgtgaaacagaacaactgcagtcatctgtttgtgctacatgagccatgagtgttcacctaggattccccttaaactttgcagcagtaatgatgcaggagagctgatcagtgaccagttttcctgacatgtttttagtccgattaggttacgattgatgagtacttcctccccaagtccccatctcattttaaatctagccacgagtttctgtgtccaacaatagaacggagggagcacatggtaaatgtgtggtgttctttccctgtgtcagttcaacacccccctcctcccctccccccccccaaaaaaaaaccaaacaaaatttttcaaaaaaattatttttcttttgaactcgtctgaagattggtgcacaccctccgttccatttcatattacaagtcattttaattttttcttagtttattaaaaaatggtatatatctacaacaccaaattagttccattaaagttaacctataatatatttcaataatatgtttgttttatatgcttttctataaatttaatcaagcttaaaaaataactagaaaaatatgtctaaacgacttctaatatataatcagggtgtaacggttaccatgccatacgccgagcaggagccaggaggagcatatctgaccgaagcggagcagccaaagaaaaaccaacgcagagcaagagagctgcactgccgcgtacagtacgctgcagccagccagccaagccagccgcggcctgggcctcggagacggcgccgtgcgcgcgcgtcggcgtcgctccccgtattttgttcacttgttgtttggtcgcgcttgtccggtccacgccatctggcacattggcatgtgccaccctcaccctcacggcctcacccaccctatccgtggggcgtcgcgtcgcgcctccccttcgccctcgccctcgcggttctcgcgtacgcccgcgccacggccacgggagggaaaaccacccgtgagccggtgtgacgcagccgcgcgcgaggcgcgacgcgagtgtgcgtgaccccgacccggccgcgcgacgcgaggcgagggaaaagacaggagagaaaaggcgccgcgccgcgagagcccccgcgacccgcaaagcggaaaagcgcagcgcgcgcgcgcgcggcgagacatatcggcgtatcgcgttggcgtcgcggtgcagcgcagcggaggcgttggctttggcagtttggctaggctggcacccttcccgttcgtccaaattcctctcgccctccccgacaaaccaccctttttccaccaagcactccaagcatcccactccactctccgctccgccacctccttgcgctgctctcgctggtacggaggaggatgcggcgcaggctcctcgcgctgctgctggtggtggcggcgctcccgctgctcccggcggcgatcgcggcaggtgagctcttttgtactactttttaatggcggggctcctcctcttcttcccttcaccgtgtcacaggttcccttctctgggtcgccgccgccgccggaatcccgctgctggctcctctctctcatcgagcgatgatctccgcgactggagcggccttggctggtcgccgcggcggagctgttgcgacttgcgcaagtagcgccagcagccgcgcacgtcgctcgagaagcgatttttttttatatcttattttaattattattcaggcgtcgattccgcttctagtttcaaccattccccgcgatttttcgtcaccattctactccgattactgcattgtagaaccacatttttgtcatgcgagagttgattaattagagctttttttttttttggggggggggggaggggctgatttcaccggtggttattatccctcgccggagagcaatccctaaccacaaaatggcacgaacagcatgcatcgtcttcctgcttcctgcagcgttcgtcagccgatgccggtaaaggggactgtactactcgcaatgggggttgacgggttgtcacgccattgaattcccctcacctaatggggctcactcactcactgatgaacactgtacaatcagagtgtgggtggtggtggtggcttggctttgcatttcgttcgtgttccagggctcctccccacgctcgccgtaccatttggatttagctggccggtgaggaaggtcccgggtcctggcaatttggtagtgttattggatcacttattagatcggcttgatcgtgcagtcttacctgatgttcccttccgcatcacatgggttgttcttgacttcttgtgttgtgtgtgccgtgctaggctactggtgtacggtacggtgtagcagaatcggttgggttaatgaagtttttgatacactctccccccttgtatggaagtacaagtacgccacattctgctggtagttcttattaaatgtggggggtaaatggagatttgggaattgatggcaagtgatcaaatggaaggataatgtgctagtactggtcatgtgatctggtcctggcggtactgatttcatttcctgttaataagtaatgatcatgattgatggcgtagatagctagcattggctacctgcagagcattacatgttttgcacttcctgtgtaatattactggttttagtagatatgcagcagagtgatgaggctgaccttcagatgctattcaatttacgccaatagatgggtaatgtgctagtgctagtactggtcacgtggtccgttcgtggtggtaccgatttcattttttgctatacatatgatcgtgattgatggcattggtatagatttcgagcattggctatctgcattgcattacacattttgctgtttctgttaatgttcccgattttagtaaatatatatacagaatggtggggctgcatgttaactttgtggtatgtgttgtatactattgcatgatctttataatttctttgttgacatgcagagtgtccgttggatttgagttggccaaactatgaactgatggcttctgtatgctcggatgaaaatggacactcaaaatgttgccgttacatcaatgctattattgcggtctcgtctgccatgtatgcaaatacgacaggcattcttggggtcccagccgaaatttctgatgcttgcattggcaacatctctgacacattggtatcaaagggaattctgcctaccgccgcttcattttgtggccttgggatcaaaattcaagtttcctatcaatgtattgggatgactaccgtcctccagatgttacagtctccgaatttcagtgatgtcactaggagctgtgcaactctactttcagatgatgtcagttgcaagaggtgcttaaactctggtctgtcatacctccgccatcttgtgggagaacaagataatgtcacattgaatacctgccgtgatgctgcctttgttgcatttgcgagtcaagggaatatatctaccgttgatacggcgagttgcttttttagcgtccaggggcttagtgctcttcaaggtttgaattctgtacacaaattattttttatttgatgaccttgttaatacaaacaatatctttttctttaatagagagcttcacttcccatgttgactattcgtatctgttatagccttataggatataacctttttgacaatttgtagaggcaaaagcatttttcttctattatgtttctagtgcattccattgttccacgtgatctccagctcatgtgttctgttgacattgcttcggatcctgaggagcaatagtaataatgatatgccatttgacaacttgtagaagcatgggattttttttgtttcattagggctaatgaattacataagctccacatgatctccacaattgttctttgaaaagcttcatacatgcagcattgctgtgcatgtccatgctctcctaatatatgcaataataggtatattaatcagcacatgctactaaaattttcatttattagaatcaaccatcagcagaagctataatttcatatccttattgatgataatatgtgtggcgaaaatcttgtcatattaatgttaaatcttgtatttgttggtaagatgatacattccacctaaaatatgatatgttatcttctgttatcagttttttcatttacaatacaacataatatgtttgtgtagaaataagttaggtcattaggtctagtagaagtgaagtggaccatttgcttgttattcttcgattcatctttctcaaggtttgagtccacaatgttttaataagtgatgtatctatgatgcagtgaatatctccgtgccatccccagctggactaattgcaccgaatattgctcccagtccacttgcaatgcaaattcctggggagcatgttactggagtgctatccaagcatcatcgtagttacaagcttgcactattccctgcaattggggctttggttacaggattagcagttatactaatgatagtattgattttactcatccgtaaaaagagtagagaattagagaagattgaaggaactaaccctcttgatgcgtggagttcctgtttgaagaagggccaagaaggtaatcatttcatgagctatagctgtactgacattcatacatgaatatttattcatttattatatggctggatggtttctgtgtgttcatgatgctatattgcacaccaggtctgttattttagggctaacttcacatgaaatttcttaaagcgtaatggctttgcattcctattctcctgtggctgtggatatgtgcaatagcagtaaaactgatttattagtgtggggtttacaacttaggaattcatatggttaatttgaatttgatgaactaacatttgacaacttgcattacaactagaatcagttctaagacccatccaatttatctgcttaacatgatattttttcaggttcttccaccattttcgacagatttacttacagacaaatgaagaaggcaacaagaaactttggcactgtgttgggaggaggtgaaaagggcacaatattcaaagggaaactgagtgatggttctgtggttgctataagacgcatagaaagctcgccaaaacaaggtcagctggaattttgcaaagaaatggaacttcttgggcggctgcaccatcgtcatcttgttggacttaaaggcttttgtctaacaagatttgagaggtagagtatgttatacatatttttgggtatctagaaatccatggttctttacagtttcttattatccaggttccaggtgtatgaatacatggaaaatggaagccttaaggatcaccttcattgtaatattttattttcactcccaatcgttagtctcacactgcataatctggtgaattgtgtgcataaaagcaattttctctttgcagcgtcaggtaaacgtcttctaccatggaaaaacaggatccaaattgccattgatgttgcaaatgctttggtaagtcctggaatctggattctgtattagctcaagtagtacatatttcgtagactttttttttgtaccaaagcaacaattgaatacttggtgttaggcctattaacctgctaaaaacttgtttcgcaaaagaaaacctgcttaaaacacttacgttacttaagtacgttatttaaatgctgacgaataactgctacaaccaaatattttgctcgcaggagtaccttcatttttattgtgatcctccattgtgccatggggacataaagcctagcaatgtcctattggacagaaactatcttgccaaggtacttgacgtgaaactttcctacagtgagaacaattaatccctactctgctggcagcagatacttgtttttgaattaacagggctgatcaagatactaatggctggttcattttccatagcttgccgtttctggtcttgtacaatgctcaaatggtgatagtaccaccatcagttccaccctagtgaacgtgaagatcccggcaactcctggtaagtccaacatctgcctttttggtgtattcttcacctttgtcagcatcatttccaacaaatcaaacacacaatacatgtttgacatgacaatggttcaatttgaaaacacactttcatcaaaagtagtggagcatgaacttaaagttggataaaattttggatactcgtggcacgcttttcaaactgctaaacggtatgttttgtatgctctaaagtatcaaattaatatatttttcaagtttgttataattaaaacccaatcaataatatattaatatcatttcgtattacgtaaaacacttaatcttcgtcttcgaaaaaaaagaagaccaccttagaagcgatttgaaatttgatagcaatagttttgtgtggtgcaggctacgtggacccttgctacgtggtgaaccaggtggtgacgccgaagagcgacgtgtacagctacggcgtgctgctgctggagctggtgacggggaagcccgtggcgcagggcgacgacgatggcaacggcgacagcagcagcaggagcagcagcaagaacctcgtggaatggtcgcgcgagctgatcggcacggactaccggctgcacgagctggtcgacccggcggtggccgacgcgttcgacctggacgagctgcaggtgatggccgatgtgatccactggtgcacccaccgggacggcgccgcgcggccgtcgatgaagcaggtgctccgcatcctgtacgagcgcctggacccgctctccggcggcctcgcccgcgccgtcgccggcgaggaagggtactactacggcggctggcagagcgggcggaaggggaaggagggcgcggagatgctggccggcggcggcggcgacggtggtcggtgcctgccgtcgtcgtcgagcacgtccaggtcgtactgcagccgcagcgtgctgcttgagtgcaactcgccggaggaggcgccgccccagtcgtcgccgcgcggcttgccgtgacaccgtgacacgccatctttttgtcggttgcatcgacagattttgcaggacacaacgtacagtgaacagtcgaaacactgactgaactgaaagagagattttttttttcgtttttttttttttggtgagagtgagtgatgcagctgtggctgtccagcgagggaatgcacacagcacacacagggatccaccgatccagacattcagtgagatgatgaaactgatgaggcaggggggggcccaggtggcggagtgaaagaaggccgggcacgcgtgatgaagagggcgatgtttgttcagttccctagatggagttggtggttgttccaccttcattgttcagtcagcattgaagagcgtactacgtcgggaacatgggccattcaattcgtgcatggaggatggatcccttcacttgccttccctagctgcagcctgcagcagctagcagctcgagtggtacgcccatctcgcgcgcgggtggtccatccaccggtggcgcgcggcgccgacgccgacgccgacgccgtgggcgcgcgcgctgcgctgcgctcggagtggcattggcacagcacgcaggaggcagggcaggccagatcgatcccaccacggccgcgtgcgacagtagcagcagccgtgccatgggcagggtaacgtgacgcccagtgacaatcaccgtcaaaaacagggcagggggcagcaagccgacggccggcataggcagtttgctgaccgtgactgcagaggcgtacctggaggctggaggagccaactgatgatggtactaaggtggtgtttggttggagggactaaagtggggttaaactttagtccctctcaggacttatgtttttatgagagggactaaatttagtccctagtttccaaacaccccctaaagagactgggtttttatttttatttgttcgatcgcgtttgtgtgaatgtgtgatcagatcgaactttaaaaggaaaaaaaaaaggagctcccgtttgccggtgatgtgtcaatgtcgcgtgactcgattacaggagttgaaaaatagaagctttacgggaagcgaaaaatgtgtgtgtgtgtggggggggggggggggggttgaatcagtcatgaacttgtgtctttcatactagtcgtattttttggccaaagcggccctgccatttgtttagctgatgcggcctcgataaggaggagggtttgaacacggtcatttgttttagggatcggggcggtgttctcgcatcggtagccaccagccagggcttccaagtcaatgctgctgtcacggctcacgatggattcattccatgggtttcgatcaatttcttttcatgcgatttgcacgcatcaggcatcaacccaatcacctgctcctcctttaaaaaaaattatataatcaacttctactatgggcccgtttagctccctaaattttttttccaaaaacatcacatcgaatctttagatatatgcatgaagcattaaatatagataaaaagaaaaactaattacacagttatgggggaaatcgcgagacgaatcttttaaacataattagagcacccgcaatggtaaagtaagttgctctctataacacacgtacatctcaacaatagactagattaatagtaaacctccttaatagtatgtctacatgggtatctatagctctctaatccattgcctcgtttttctctatagactatctccaggttagtagatagttttgctctctctcttcatttaatatcttccaagtaggaaaatatgctgacatggatctcttgtagagagcatatagataaccattgcaggtgcccttagtccatgattagccataagtgctacagtaacccacatgtactaatgacggcttaattagtctcaaaagattcgtctcacggtttccaggcaagttctgaaattagttttttcattcgtgtccgaaaaccccttccgacatccggtcaaacgtctgatatgacaactaaaaattttcttttccccaattaaacacaccctatgtttcatgcaacctcatcagcccaagtatgttttgtctgtcaatttaaagagaatcatatttaaattcatagcaagaaattgtttttcctaaaaacgtagggtgtaaactacctgtatcgtttcgtttgtcttgagttgtaaaaggtgcaacagcagcaagcagcaggagggacactagtactacggctgctgctttgtagtaacaatagtacactattaaaccattacccgcagtatactgagtactgacacggttatttgcatcaatcaactgtgacctcggttctcattaagcaacgagcaagttggcgcaaggagacaagcagaggaatgggcacatcagataggataatcgagtagatagatcattaataaagaatcaatcaggagcgtttaagggttccaaatccgggagcattcttaattagagcaagttcagtagtatagcaaaatactagctccaatttatctataactaatctaatagctcattaatacaatagttatatactacactattaatacctggtctcatctgttatacacacattgtatcttgaagtccgtgctacagttggctacaaatctgcagtccgttgttcttctctctcctaagagcgagtttaatagtatagccaactactagatccaattcatctatagccaatctaacagctcatctatataatagttacatagtacactattgatacctggtcccacctgtcatacacacactgtgtcttgaagtccgtgctacagctggctacaaatatgtagcccgctgctcttctctctccttatttttctctttaaaatatgtttgcagctggcttatagcctgctattgtatatgctcttatttatctttttaaaatatgtttgcaactggtttatagcctgctattgtacctgctattgtggcaacagctgaaggcatggaccgtaaacaattgcagtaagcaacctgcacatgggcagggattaggcgttgcccattctccggtttcacgtctcacacgccactgttgccattttcacttgctagcagcctagcactactatacttgagtctgaactatcttcatttgcttcactgctagtactacggttctaccggagatgcatcaaataacattgatgtatcatgaccattgatatatgatcctactcttgagcaggacaacaaaactgagatccacagtttccctttgaactattctcttgtgaaattcttgcgctccaaaccgggcaacaaatttaattcttcttcgaaagtaatattaatgctaattatcatctacgatatcttactactccccctgtccaaaaatataaatatttttaatacagtgctaagtcaaactttttaaattttgactattaatagcaaaaaattaaaaaagattaatcgtgtaaatttggtgttactatatttatcattaaacgaactatcataatatacaactttttgtatttaatacattttccttttgtaaatattgttggtcaaaatagtatctcggagaccatgtccaagtccaaaaatgcttatattttgcgacggagggagtataatgatatttggatggaaagaaagcgcttcgtaggtagcaaattactctccccgattagaaatatttgatgtgtagtgcaagattcgttcgtacttgtaaaagtttaaaacttttaaaaggttcagacaatattcggttaaaaatattcaaaccctgcaaagtttaaaacatttaaaagattcggacaagacttaagattttaaaaaggtttaatcaaatcttgtcctaagcgtctcaagtaccaaattacgcgaacacatgcagagcttaagtaccaaattacgcgaacacatgcagagttggtttcggtacaacattgaccgaaaatcattggtttaaccagtctttgataaattggtgggagcggttttttttataagaaaatggaaaaaagctactttccttcctccgttccagaatgtaagagtttctagcattacctgaattcacaaaaatataaataaatctagactcatatagaaaatctatacattgattaatgcataaatctagtagaaaaggaacggagggagtattgcacgtaccggcaatttttctttcagaaaacctacaccacggcatcccgtggagacgggatcccctcctcctacctcactcctctcccccaaatcatctggatcccctcctcctacctcactctcctcccccaaatcagacggcactgtagcctgttggaattaatgaatgggccttagcccactcgaagattaattctttggaaaatcacaaaagcccacctcatgggatggcatgcatgtggagtttagtaccaccttgcttattctaggagagggggacctccttaaaagggaggatgccctcctagtcacttgaagcatgtgtggtggagagaagaggggaaacacgcgcgcgctcgctcgcctcgcctggctgggcaggcggcgcgcgtgcacgacgtacgcgtcgaatggtccgaaaaattggctcctcacccttgtgcagatgcagcctccttttgcagttttgttttgctgcaaattcggattcgtttttgttttggaaacgttccgaaaaatccggtgcgtgcaaacggcgtggagtccggataagttacgcgcgacttatccggttcggttacgcgcagtacagatcgtgcgggcgccctgatcaagcgacccttctctatataaaccgacctgccgtcttcacgcaacacacgtgaaatcaatctagggtttgcctcctactctgtactgcgccgtcgctcgtagactactccatcccgctcgccggcgtgcaccggcgatcgggagagcaggtctccggaacctctgccttcgacgtcctgcaccgggagaaggcggcaataaggtttttgggaagcgcttcgcgcgactgctccctgttcgttcgtgacggctcgccttcctcttcgctcgcgtgtttcgtgccttcgtagacacctgcgaaaagtttcgaccaagtagccggtctttccgtcacctcggtacgtgttcaatatgttgcgcatatttgatctgttcatgttatactgtgtagtttacatgtgtagatttaatgatgcgttcatgctagttttcatctgtaatgtcatgatttatttatggaatagattaaatcattatatgtctataatctcaacatagccctccctgtcgtcgtcacccaccgctcgccggagccagcgaccaccgccgcggggaggcggcgatggcaaggagctcggcggcgggcgcggtgagtgagaaggagagcggaaacggggagcggtggagccgaaacggggtgcggctgcggcgacatccctccatggccaacagcaagtggatctgctacaacgtcgatgatgaaggcttccatggccggcggcaggggtgcgccgagcacgtcgtcgtccacagctggctgaggaggcatggtacaaggtaggcaccagatctgttgcctcctcatcctccaccgctgtccccaggcgacgagctcgccccgctgctcgacctccctgactccgcgactgctcctccttcctcctctctcctagggtatcacgctggtacccaggtttgatatctaggtacaagctcgatacccagataccaggtaccaggtattagccggtactagggtaccagggtaacaggtattagcctggtaaccaaggtgccaggtattagccgatactagagtatcaggtaccaggtaccagccggtacctaaggtaccaggtaccaagtattagccgatactagggtatcaggtaccaggtaccagctggtatctaaggtaccaggtaacagccggtaaccaaggtactagcagggtttcctttacaggcttaccacggggtacggtaatataaataccgcggtaacctccttaaattcaaataaatttaaaaaataatttaaatttttgataaattttgtacggttttgtacggtttttcacggttcccgcggttaccgcgcggtaaccgtgcttaccaccgcggtaaccgtgcttaccgccggggcgcggtaaccccggccccggtggtttgagaaaccgtgggtactagttattaaaattcttccgttgcaacggaatcccgttgtgtaggagttccctttttctttttccaaacggaaccgtttgccctgaaaattttccgcgtttcggcaagggaggacactgcccccagctgcaggggctccgcgtcgcgtcggtagtcagccacagacagccaagcctaccaaacccccacacgcaggtcgtcgtcgtctccacgcccgcacgcctcccctccaaaaacccacaggatccgagctaaagctaagcttagctaccacacagtggtggccgcgcactcctcctcctcctcgcactgcacacgccaacgggttacaagaacgagttggcacgcgagagccctgcagggaggaggaaggatgcacctgcacgcgaagacggactcggaggtgacgtcgagcatggcggcgtcgtcgccgccgcgggcggcctactacgtgcagtcgccgagccacgacgacggggagaacaagacggcggcgtcgtccttccactcctcccccgcggcgtcgccgccgcgctccctcggcaaccactcccgcgagtcctcctcctcccgcttctccgccgccaagtccggctcctcccgccgcaccgccgccgccgggggagacggcggcaaaggcggtgtcgcggctggccgcggcggcggaggtggtggtggtggtgggcggcgtagcccgtggatgaaggaggcggccatcgaggaggaaggcctgctgatggaggacgacgacgccgacggcggcggcggcggcggcggcgggttctcctccctcccgaggcggtggcgctatgcgctgggcttcgtcggcgccttcttcgcgctcttcttcttcttcgcgctcatcctctggggcgccagccacaaccagaagcccgtcgtctccatcaacgtaatgatatgcaaagctcgatcgatcgccattgaaatgcttgcaagaatcaaaccgatttttctctaacttgagagggtgatttgtttcgcatgcagagcatcacgttccacaacttcgtgatccaggcggggacggacgcgtcgctggtgccgacggagctgtcgacggtgaacgcgacggtgaggatgacgttccggaacacggggagcttcttcggcgtgcacgtcacggcggagcccctcacgctctactactaccagctcctcatggcctccggcaacgtaagccgcctctcaaaaccccatcttttagcttgcacccatcgattttgatctcttctgttcaatacagtagactagtttcttcttcacactgcatccgtagtcctagtaaaaagacactttttttaaacaatataaatcttaattagctgatgttttaagctgcaaagcagagctgtggcaaatattatggttatggccgagtttagttccaaactttttctaaaactttcaacttttccatcacatcaaaattttcctatacataaacttccaattttttcgtcacatcgttttaatttcaaccaaacttctaatttttgcatgaactaaacacaccctacgaatcttagctgctaagtttcagaagatgtgtgaaaatattcatgctaagtagatgccgggaggggataaaacctcagcattttgcagtaaaccatcctggtaggctgatactcttgttaaaagcgctatataatttatcacatgaaaaagaaaaatctcgatctcttgttcgtatttgtgaacaatggactacagctgcacattgaccaaaccaaactgtagcagttgtgataatgcctacacggcagcaccatggatgtagactagtactacttcacactgttgaaactagttcaacacattcagagaatctctgaaactctcaacatcatcttcaaacactagctgtcatccattcagtcaagttgcagcatcacacactccaaatttttcactaccttcattaattccaattaagaaaagagagagacaaaaaaaattgtcattgtggtccatccatccaaaactgatctgaaagtctgaaactttcttggcaaaaaacaccgagtgactgacaaaactgaaacattctcactcaggtgaagtacttctaccagtcgaggaagagctcgcggcacgtggcggtggcggtggtcggcgacaaggtgccgctgtacggcggcgggtcggggctgagcagcacgccggtgaagggcgcgccgccggcgccggtgccgctgcagctggcggtgcggttcaggtcgcgggcgttcgtgctgggcaagctggtgaagcccaagttcctgaccaacgtgcagtgcagcgtcaggctcgacgtcgccaagctcggcaagcccgtctccctcaacaaggcttgcagcctcgtctaatctaagctgcaatgccggcgagctagctgctcatcactgcgtcatcttcgaaatatcgtcttcttttttttcttcttcttgtttctttcttgtctgatatttacagtatattgtcactgcatactttgcgagttggttagtttggaaggagggtgaggagatcgatcaggttgtgtgtacagggaaattttgtcgcgaacattttgagatatcgaattttgggtggataataataattaatcacgccgttgccgttctttctttgttgctgagtttctccgaaatgttgtagcgtcaggtttttgtgaattgtgtgatgtgatgtgatgttcagacattcagttgtcacctgaaaatcttcttggaagtggtgggtgccgtgtagcccggcgttgcttccatttctgacgctctttgcctgttctgatcttctgttccagcacgacagcggccagatccagtacttaggccctgtttagatgggactaaaacttttgagtccctatcacatcggatgtttgaaaattaattataaatattaaacgtagactattaataaaacccatccataatcttggactaatttgcgagacgaatctaatgagcctaattaatccatgattagcctatgtgatgctacagtaaacattctctaattatagattaattaggcttaaaaaatttgtctcgtgaattagcttttatttatgtaattagttttgtaagtagtctatatttaatactctaaattagtgtctaaagacagggactaaagttaagtccctggatgtaaacaccaccttacttcctcccaaaataagtgcctcccaaaataagtgcagctatagttttccgtaccaaactttaatcattcgtcttatttgaaaattttttgaaaaaaaataaaaacataagtcacaaataaagtactattcatgttttatcatctcgtaacaataaaaatgctaattataaaaaaatttcaaataagtcgaacgattaaaattgagcgcggaaactaatggccgcacttattttgggacggaggtagtagaaaacttcccggatgatgaacgtttccatgttcagatttctgacgagatgaacgtttttgcaggctgctgctgatctgtgagctggcaatgctcgattgttgattcagattagatcatcagcttcaggtgctttgcaactgattactgctactgctactgtactttttactgccagatcttaataatcttatcgcggtgatcaacaagacagaatcttgttgacatcgagtagagccgttccactgtttccgtgcagatcgacgatcgagaatgggggta

SEQ ID NO: 15062 - DNA, 731 bp, Oryza sativa
ggataagtttgaggcacgctctactgatggattgtttcttggttaccccgcacatactagtggctatcgtgtacttattttggggactaacaaaatcgtggagacttgtgaagtttcttttaatgaggctagttcaggtactagacccgaaattgcaggtacactgtcacaggttcagggggaggatggtcgtatttttgaagacgagagcgactacgacgacgacgacgaggtcggctcggccggtcagaccgggcgccaggccggtcagaccgccggcacacctccggtcagaccggcccatgaggagcggtcagaccggccagggtcgtcgggttcgggtactgttgatgctgatcgtgatggtcctccggaaattactacttcgaccagtactgatacagaacgtggatcaacttcagaagtcgctgctcctttgcacattcaacgacgacatccgccggaacaaattatttgtaatataggtgagcggactacaaggtctaggtaacaactcatgatgtttgtgcaaattctgcatttgttgctttttttgaactcaaagatgtgtcacatgcattaactgatgaatcgtggattaacgccatgcatgaagaacttgagaattttgagagaaacaaagtttgaactttaattgaaccaccttctggacataatattattggaaccaagtgggttctcaaaaataaacaaaatgagtatggtttgat

SEQ ID NO: 15063 - DNA, 2180 bp, Oryza sativa
aaagagcttcgtcgagatctttttaaaaaggagtacattaaatttgagatgaaacctgaagaagctttggatgactatctttctaggtttaataaaattttaagtgatcttagatctgttgattcttcttatgatgctaattatccacaatttgagatttctcgtcactttttgaatggtctcgacatgtctatttgggagatgaaagttacatctattcaggagtctgttaacatgtctactttgactttggattcactttatactaaattgaaaacacatgagatgaatgttctttctcgcaaagttgattctaaatcaagtgctttggtttcttcttcttcttctttggatgttgatgcttcttcatctaagtcgtcttttcttgctgtttttaatgccacatccgatgatcaactcgaacaaatcgaggaggaggatttggctttggttgctaaccgtattgctcgagctatgaataatgccaggaacaggaaaagaggtggttcaaatcgttgctttgaatatggttcaattgatcatcttcgttcgcattgtcctaagcttgggagaggcaaaagagaagacaaagatggtgagaagaccaacaaacaacaagcccaacaacaacaagtcgaagggttctatccaagggaggaagacggagaatcttaggaaggcttttcaacaagtttgcgccgccttcgagccactaagtgatgtagatggtgaaagtggagatgatgacaagggaaagaacgtctccgatatttgcttcatggcgcgtggtgaatctgacacagagtatgaagataatgaggtgagtgcttttgaggaagctattaatattctgagtgcaaaaaataaaaagtgtgagaagatgtataaaaaacaagaatttatcattgaatctcttaaatctgaaattgataggttaaaatcttttattcctaatgatgatgattgtgaaaattgtgaggttttaatgaatgagatttcaaaaattagagatgttaatgttgcacatgatttgaaaaataaatcttctcttgcttgtagttttgctttgcacacacgcactttggatgagttgtttttaaccaaaaagttgttgcaaaaatatcaaattgcttttcatgctagtttgatgtttagcatgatttctgctaaaaagttaaaacaacctcatgatgttttggattgctcaacgtgtaatttgaataagatgaaactaaaagatgctttaggtcgtgttgagtacatggaagatgttgtgaaaaacaatgaagtgctttcttgccctaaatgtcgtaaaagcaaaggtgtcatggtagattgtgaaaattgtgctaatttggaaaaaaatggtttcttatttgaaaaattctttgctaagattttctgatggtaaaaagaacctcaacatgattttggatcaatcaaaggttagcacacataaccatggtttaggttttaatccttatgctcataattctagacatcctcctgttgtgttatgtgttggtgctagaagtggtgagattttaattaaacatgataataataaaattgtgtttaaatctgctggtatcatgtctactatgaatgcatcttcttcaaaatataatgttgtgcatgcaaaacctcatgtttctaattgtgttgctaaatcttctaattctaacaatgtgtctaaacaacgtgaaaaatatatttgttctttttgtggaaaagatggacatattggtttttgtttcagattagctcatgaacagaaaaaggagagagagattgcttttgcaaaatcaaagtggcaaaaatcgggatttccctcgaggaaaccggtcagaccgcagtgggtcccgcagtcagaccggcgaccggtcagaccggctgaacagcctcggtcagaccggcagtacaggagcggtcagaccggcccccagtcagaccggccactgtacctcggtcagaccggcctcggaggaatttttctaaaaattcaaaattgattttgcacgtggatatatgcctattggatcttctggtcgtgtgtctcagtactggattcctaaatttttattatcatctaacctcagtactgaggcttcgacttctgcttgtgtgtaggctttggtggcaaggaaggagaacgtgtggatcgtggattccggttgttc

SEQ ID NO: 15064 - DNA, 1206 bp, Oryza sativa
ttaagttttttcaggggtctatttgtaaaataagttttcaaaaaggaccaaaatgtaaaaattgcaggcgtagcgcggcaggcgtggtggggatgggccggtttggcaggcccggtacgatgctctggcactttctcgctggcccagcgaaggagctcctccgggccgagaacggatagcaattggacctgctagtttcggcgaactacggcctgtcaccgactcaccgtgcggtgcggacgcgactcgatgagctactaaatgcaactggatatgtcccccagttccaaattaagtttacgcacgtaaaacaatctgttcagattgtagctaaaataaacccaatttagcaatattgtcaagttttggcaggatttcttattagtttggtaagaaactaaatggatgcatatatttagcaacttttttaaaaaatggtatggtttgaaataacgtcaatcttacaaaatagcataattcgtatagacgaaaaagtaccattatagcctactaaatcgatggctcatatagtttttacaagtagtataatattatctatgtagagagtacagtagtactaatagcactctttgcggttacccttcgttagatcttcaatgaatcgacaactctaccaccacgagagaaatgttcatagtgtccaatcaacaagtccttgcccttgattcccctgtaccgtgctgattgttgcttcagccccagcagctcagccaccggctctatctccttctcgccatccacagcgtagaacatggccaccgacattctctccctctctgcatttgtcaccaccctatgcaatggagccctgaaggtcccattggtcattatctgcaacaaaaacaatgggcaaacacaaattaaccatgaacatatttgaccacatcacacatctttttttcatcaaaaatgcaaagtgagaattttgcttaggtgttcatgtatgtaatatgggtaattttatcatccttaaaaaaattccgggatgtattataccttctagtataaaatttggtatctctaggtaaaaaaaaaatctcgaggtacttttccgaggatcataaaatttctcatgtaatatagttacctccagtgtaacaccaatgttaatcagaagagagtaatctcgcacagctggaacactgtaccatgttccatctctaagaacttgcaggccaccgactt

SEQ ID NO: 15065 - DNA, 2841 bp, Oryza sativa
ccaccgtacgatggtgaagaatttgttgctgacccaaatttgaagattaaaacaagagggaagaggagatcgaaatggactcgggtctgggtggttctggaaggaaaccaccttcatgcgttcaacttgatgctgcgccggtacaaaatagatgctcgttgtgtcaccaggagggtcacaagaaaactaatgtcctaagcgtccaaaaaagaagaagtccaaaaaaaatataagtgttagggaggtaaatattttgttttcctactcatgttctcgcattcattttctgttaatatgtcacattggtaactaacggtgaatttattactttttcatgtaggatggccgaggagagacaaccgccgacttacccagccttggaggcgtactacgaggcccgtcatcgcggggctgcgatcgaggcggggagggtatgaatcggcattgattcacttgtgcataagtatctgtagcgtgtatttgacattatattaactaattgatttacaattgctaatgcaggtacttcaaccgctccgagtcagagctcatgcccccccagtgttcgacgataggtacatcccatacctaagggcagccgggttgctcggggtggccttggtcgtgagcagaggaatgccagtgttcaacgctcctgcgttgacagcaattgtggacagatggaggccggagacacacagcttccacctccctagtggtgagatgaccatcactctacaggatgtggctatgatcttggccctcccattacgggggcatgccgtgacgggcaggacagagactcctggatggcgtgcacaagtggagcagctgtttggcattccactgaacattgagcaggggcaaggggggaagaagaagcagaatggaatacccctgtcttggctgagtcagaacttctcacatcttgacgacgacgctgagccatggcgtgttgagtgttatgcccgtgcatacatcttgcacttgttaggaggggttctgtttcctgatgctgggggtgacattgcttcggcgatatggattcctttggtcaccaaccttggtgatctaggccgtttcagttggtgctcagcagtgttggcgtggacatgtagacagctctgtgaggcctgttgtcgtcaggcaccatcatccaacatgagtggttgtgtgctattgattcagctgtggatatggttaagactaccggttggaaggcctaagtggaggcaaagcttcattccttggccctacaatgagccagacatggagaagacagtggcctacctttttgagagtactgccactgcacatgctcaccgggatgtggcatacaagcattatgtcaatgagatggactgcttacagcctcaacatgtaagtacttccaatatcacttctagttagacatttacttctttaattgagatactaaccaacgacatctcttcaacttttgcagattgaatggttacccataccacacaaatgaggcttcaagcctgaccctgaactcgatgtgcaatcgagactctgactatttcatgtaccagtgcccattgatttgtttctgggcagttgagtaccaccttccgcaccgtgtcatgcgatagttcgggaagaaacaagactggccggttgaggacatctcaactggagttgaattacacaagtaaatatttcttatctttgtttgctttcattgtcaatgttcaattttgtaccatttaacccttgtcgatgctcactattgtttcatcaccttctacttgtctaggtatgacagggtgagaacaaagaaggtgaaagactgggggctagagcataatagatacattgatgaatggaggacagccggaaggaacgacaggtacatagagactatacaccaaaatcatcttttctcagagtaccttcgttggctgcataggacatatagactgttcctccaccctacttggacggaagccgacatagatgatgaccgcgactccgatgagggacggaatccctatgatgtccggactagagttggatatcaaatggagcacgccccacttagagacagagtcgtaagttttcttgcatttgtcaaagttatttccatttgcaccctagaccctaacatatatcttctcacgctttcagtcgagagagctcctcaggagtgtgaatgaaatggggcatgccctccaagctccgaggggtggtgaggacacggagaacacactccgcaatgttttagaggtaaaatttatttagcactttgcattacttgagttatgcctaacaaacttcttttttttttgaaatgcagaaagttcgtcaaaggtgccggaaacttgcagcaagattaggttgcaagtcggttggattggacgacgtgtaccaaccgcggagactaccaccactactacctcactccgcacgtccaagtaccgctcgacactgatagaagagcgtgaagaaattggtggctcgttgtcgtcacgcattccgcaagggaggggaaaggggaaggcgccggctccacctagcgacgacgatgacgacgacgacgaggaggatgaggactacgtcgcaccagacgctgaggagatagacatgtcgcagcttcccgacgcgcctcaggggacgcaacccacgcaatacaacttgcgatccactcgggcagcgaaaaagaggtaaaatgagcttaccattctcaaatgttatttgatttccctcattttgtttttaaaatgttttaaacattggattttcaaatgtaggtacactccgggctcgcaagctattcgacgccaacggaagaagtgatttgtatgaagttaatctatt

SEQ ID NO: 15066 - DNA, 559 bp, Oryza sativa
gatgaagtatggcaaggcttggagggcacgagaggaggctatgaagctcatttacggttaatggggtgaagcgtatgtccgtttgcccactttgctgcaagccattaagcagaggaattccagtatggtctaccacatcgatactcatcctgatagggttgtcaacgttgatggagtgaccaagaaaatttttatgcgtgcattctagtgctttcgtccttccattgaggcttttaagcattgtaggccagtactagctatagatgcaaccttcctaactgggaaatacggtggtgccttgatgactgcattatcagctgatgcggaggaccaacttgtacctttagcttttgccttggtggagaaagagaattcacgagactggtgctggtttatcaatcttgtccgacgggttgtggttgggccgcatagggaggtttgtattatctcagatcgacatgctagtataatgaatgccatgacgactcctgttccaggattgccaccggttcaccaccgatggtgcatgaggcacttcagtgctaattttcacaaggcc

SEQ ID NO: 15067 - DNA, 8870 bp, Oryza sativa
gccgccctccccctccatcctcgccggcatcctcgccgacctcgccgagatcggcggctccttcaccggtggcttcgcccgccgcgccgccctccccgaacctgccttctcctccgcctccgcctccgcttccgccaccaccgcggagtccccgcgcgccgcttcctccacggcctcctctccttccccttcccctgctgccgctgccgctgctgatgtcgctgatgacgtcgtcggggcggcgcaggcccttacggcgcggcccgaggcgtggattgacttccccgtgctcgcgctcgatgagagtaatgctcgattatctatatacttatggttgttgctaattatgcatccatcacgcactgattgcacccctggtttcgtggtagatgtgttggaagtcgagatgagtgtaaaaagttgctgattcgggatatatattggatttcatgcttgtgattctagtgaaattatgaggcaaaagtacttctcttaggaattcatctaggattatctgaggttagtataaagttatggtgtggggaattattgggccaaattgaaagaaatcaattgctctactcatcgaagagcattcattgccattattagaaagtacagagtgtggcaaggcaaaagaaattatttgagttgctcaaattcatagctaggcaaagaataaactagatgcttcattatggatttgatgaatggtttaatgataatagctataacagggacaatccaaatataggcagcaggtattacttaataaatgtttgtgtggaaatactgagaggtaaacatatcttgtttgtgccgtgctttttgctggttcagtttctagccattgttgcattcacttcttaggatcactgaagttttacagaaccatactgtaacttttgaagatttcaattatgcttttggaatcaggatgtctttgagttgttttactgagctcatcttaggagaatcatttgtggctgttatttagctctgcgatataagtctgtctaaatgccatacttatttactgattttgcaattcacagattctataatctccgatatccaaagggatcatatggaagccattgaaaaacttgtacctgacttagcatctctgagagctaggctctgcccttcttacatggatattgatgtattctggaagatctactttacgctgcttgagtcgaaccttactgaacatacttcagaggtaagtctagtaatttatgcttttttagaagtatacgctacctcttatattgttttatgtacctgtggtgtgacttattttttgttgtatgcattccgagtttccgatattatataatcttgtgtgaatcacaatggttgcaccattgcaccacatcgtgaattagaaagtgaacattttctagcaggatagtcttgtctgaatcgcaatggttacacacaccattgcaccaatggtcttgtctcaatcatactaggagtctaggacttaaacttgggaaccatggtattattgagaaaccatacaatgctagcaggatagttgatgcatgctgagagcctgagacaatttcttccgtaaacaggcaacagctcagagatgtggaccagacattagtgtcatttcaatttagttctggatttctaatcttggtagtcaattcagatacaatgggaacagatagaaacttggatataatcagggaatgcatttttttcttcgtgttactgctttcttcacatggtcttaacataaatgagcatcatctccaattgacaagcagcacataattgagctggattctataaaattcttgggtgttattgttgaaacatgatcattgaaattaggtggaatactagagtatgaattcgctttagaatctacatatctcagacttgcgaatatgttagtgttaagctgcacaaatcaataaatcatgcacactttcaccggttggttgtaggcatcaggacacatctgtatctcactatcttgtatgaaatatagcttgtgtaattgtgttagttttaagcatcccctggaggctttctactcatcttacagtgaggtgctccatttggatatagtaactatgatttgggtgttaagcgcaaaagcaatatgctgagctttgttttgcagatatggtactattttgcttatttatcgtgaccacctgtacttgcaggtagatgagaatgtaccaggttctgttcatcacgtcaatgagatagagtctgattctgcgcctaatgtttgtgaaattgaaagtgtgaaaagcactcaagagggttatcaatcgccagatgatcgtgtgttgataaaaacaagatccaatcaaagcattgaccaatgggtgtttgcaaagtcaaaatctgagcaaagcatggatcagtggtccgaaataccttcggatgtggaatcttctagagatggtagaagatacattagcggtgaggagcttagcgacgctgacagtgcccatattgttgtcatggacaaatacatggattcacttctgtcagatcggaggagcctccactatgctagctcctcagtccggcgggattcagtaagaagaaaacctgcatcttctactgactatagccaccggcctccacaaccaactccacctgcttcactatccaagaaggaatcatgggatgtcattgaggattcagagtttgagatacttgacagttaataacagagatctctgggatctctctggctatttatcctttttattatttttctctctattcccttacccttcacctgcttgtaaatgacgaccttcaggtggtgtcagtgttcgtgggaaaatttctctaccattatattattacagtgtgcatatcactatgtaagttgggtatatcccctcattccatatggtgtaacataaagaaaactgtgatggatcacctgccaagggtgagactatgggtaagtctcccactgtacaaaattctgtgtcacatgtggcttctatgctgggtttccggaagttctgtgcagaatgcagggaatgctaggccttcttctgactgcatgaattttgtataacttttttttcatcaggatcgattcgatttaatttctacaaaccttgaaaaaggaattcatgtccactgaaggaggccttaaaactttgcacctaatgccagaatccactgaaaaggttactgtgcatggtagcctcataataaccgttcggttttgtaaaccctaggctagattggacgcggttagaatgccctgcggcagctgcctcgccgttgctggcttcttgttcttcgtcgtccggcagctgcatttgggcgtgaaacgctgtgttcttcgctgtctggattcagtggtggagctagaaaaatttttgagcccgaactaagcttcactataactattatttactatggaaatttcatcatcaatttatttatgtaaaatttgctacaggacacttaaaaaacgtataattagttatatgacatcacaaagatgtgaattgtctataggacattgcaaaagagtgataattagctattaaacaccgaagatattattttattatttccgaacaacatgaagagagaaacaatcaaaaaagactaaattgccctatgtgggccaaggatatcagtctctcatctattttcatgacctcttcctcccaacgagacgcatcgcgcacagtgcggcgccgacgccatccttctccgccgctccggcgggctcgtacgtgaacgaggcctgggcgtcgatggccctgacgacgccgaccgcgcacagcagcacaagcagcgcaatgtcgtagcaggcgcacgccttgccatcacgcagcgccgctccagctcctgccgcgccgcgctctccgcccgcgtcgtcgccgctctcgccgccatcaccgcggacacccgcatcgtgcccgctctgccgcgccgcgccctcgccgccgttgcggcagcccgatgtcgactgtcgaggactagaatgtggagccgcaggaggaggcggcggtgtccaataaggccgcgaccagcggcttggctggttcaagagcacgcagcgcagcggcgccgcagcaaccggcgaggatgacgacgccaacgcgaggtggcagctgctgcatcaacgtgcggtggtgctacttcatgggctcgtatcagtacgtgctcgccgacgacaacctgcagtggagcctgggcgatggcattcactggtctccgtcccctctctgcctctctgcctggcccaggagaagatttgaggaagcaagcgagcagtgcgtgcatgcgtgaggagagagcggccaggctcagcagggcttctcgccgtggccgccggagccgacacccgaggcggcaactgctgctgcgaggcctgctgctccgggcggaatctaatgcgcttgcgccgccgccgcaccagacggcggcttcttgatggcgtgcgactccagcacaagaaaaacgacgcgggggcattcggtactttcaacgctttttctctcttcatttccatcgaaaataataaaataatatctccggtatctagtagctaattaccactcttttgtggtgtcctatagccaattcacatttttgaggtgttccacagctaattacacattttttaagtgtcatatagcaaattttgccatttatttaagaatattaaaatttaatggagttttcacatgcgagcccaaacggttgcctgcagagatggcaacgggtatggacccgacgggtttccagtccccgtaccctcacccattgaaactaaatctgcccactacaaaacccacacccgctcgcgggtgagaaatttccccatacccgcacccgcacgggtgataggtacccacactcgttgcaacaattttaattgtgcacaacaataactcaataaggttagctgcagtgatatgtacacactagaattgaaaatctaaggctcaaacaaaccatacaggatacatacagcctgccaggctgccacattgcaaaatcaacagcaagccatgcaaccacattgcaaaatcaacaattataataagatgataattcaaataatgcataacctattaaccaagctccaggcatgcaacatcattccaagctcaaagcatgcagcaatatcatcattccagcaagtttaatgacaacaaatcaacacatcaacctactggtccacatcagtctaaagctctagagttcaactcttcaagtgttcacatacagtgacacatacaaaatcattacaacgaaaatggcataagtagttcaattcttgcagcctcctaggatttcctccaacaacattcaagtgttcacacacagtgaacatacgaaatcattacaaccaaaatgacataagtagttcaattcttgcagcctctctaggatttcctccatcaacatcaattcaattcttgaaagcaaaatacatccatcctcttctagtctcaattctcaaatagtaagttcctacataagtagttcagtacacaaaatataagtcaaattagggagcaatttatttttggctgttacataagagtgacacaagtgaaatgacagagaaagttttagagaggagtaagcaataacctgaagaccctcttgtatgtcttgaagacaagaccaaaaggaagcttgctctttgtccttctcatcaactgcaaaacacagaattataaaagtaaataatttgtttgtagttagaaggaaattaactaattgcataacagcaagtgcaaattaacctttgtacttgtttcgaagccaatcctgttggcacattagagcttctaacaacttagaagtgagccgactacgatgctcactaagaactctcccattagtgctaaaagctgattctgaagcaactgtgctaacatgaattgtaaatatatcccttgctatcctcctcaaaacagggaaccgagttccagccaccttccaccaatctaaaacattgaaattctttgtgcgactgtccaccaaatcctcatccaagtaacggtctagctcacttcctataggtcttttggttgcagcacgggcactaaggctggagaaatacccgcctttgccttgggaaccttgtggactggatcggggacgactacaccggaaaggggttccgttacttcggtgataggaggcagcggcggaagtgtcgcaggagacgccggcttaactcctttaccagtgttgtcttgtgtacccaccggatctgacggtggatggtcagtggaggtggcgtcccttcggacatcgtgggggttagttgatgcgaggcaagggaattagatatatagctgcaatgcaacagttaagaacaaaggggaagaggatcaccagccgtcgtcgttgccggagcctgctgccatgctatgctggtgtggggatgggaacaggaacgaccgattggaatttggaggggacgaatggaacagacgatgcgggaaaaaaatgtggcgcctcacggtcacggccccagccggatccagcgacctactacctcactgcacctgcggcggcgctcctgccgagagctgaccgagcgttcgtgccccaggcggcgaccgacgcggtggctgtcccgcccccaggaggcggcgtccctccccaggcggctactgcccgcacagcggcgcccctactagtccgccctcagcgccccccctcccacgctggcggctgcccgcacggtggcgcccctgctccaccggcgcgaccgagaccggctggtgggcggcggcaggtgctgcggtcgtgcgcgcctatggggtgtcgacgtgtcgtgccgtcgtgtgcgtgctcccgtgcgcggtggcgcgccgtgtgcatccgtgcggtgcggcagtggcttcgccgcttgggtgatgggggccggcggctaaacggcagcaggagggagaggagaggaggagaaggggaatagggtttagaggagtgaggaaaagagtatttatacctagggttttgatggttgtgggccttgggccatttgcttattgggctaggcctacgggtattttcaacccacgggttaatgggttcaggtgacaggagaacgtacccacacccgtatccgatgggtgaaggttttgcccgttgatgtacccacgggtatgatgtttggaacgtatatacaccctaatagagtagaaacccaacgggtttcgggtcgtggggccccgttgccatctctagttgcctgggctagccgggtggtggctccacccctggaagttgcgccgccagtctcgaagctccagtcacgagtctcgagacgcaacgaacgttgagagagagactgagttgggccgggccaggagcgggagaggggaccacaacttaattacacattcccacgtcatcggtttttactgaaaacacctcacggcccgtttggttggagggagtttttaggagggattgggagtttagagggatgaagctattaagtgttttgtttgattgggagacatgtgaattttggtgggatggggcaggtaattgggagggaattccttctttactttgactaagcaaatctcagccatctgtttttattaatgacctaatctccaactaaactccctgtcaattaccatcacctctaccaaacaagatactgggattaaaaatcaaattcccatcttaatctcatcatcaatttcttcgtgtaaactcctaatccctttccctcaagttaccaaacaagccgtcaaaactacctatgcgttaaaaacatattactttatcaaaagttaattggaaaaaaacatatttttgttgaaattcgatgtaaatggatgatgctaatccatatgcctcacagcttgacgatggattcacttatttgaatttcaagtgtaatagtggacaatatggaccacataaataggtaggtggtggtgacacctttgagatatttgaaagaagtgtttgtaaataaattggtaaaaacacacacaaacactaaaaacggcgtgtactaggtaattaaatgtgaagatgtgaatgttatattacattcaaaatcgatatgtgctccatccatcccataatataagggattttgttgggatgtgatccaggtaattaaatgtgaagatgtgaatgttagattatattcaaaatcgatatgtactctctctatctcataatataagagattttgttggaatgtgatcctagtactacgaatcacaacaaaatccttatattatgggacggaggaaatatatataaaaatatactccctccatttaaaaaaagccaacttagaaagaaatatgacccctcctaatacaatgaatctaaacattatgtctagattcattttattagaagaggcgggataagccatcttaggttgttttttttggatggagtgaatattttataaaatttaatcataaagggagagatgagctgaagcattgaccgaaacaactcttccaatatttgatcaaagcctgaatcgtgctcggatgaacgggtagagtgaccaagtatatgcaagagctataatagatttacacttaaaagagaagaaaaaaacagtaattttgtcacatattttgttccaatcttgtgaagtctcagtcatgagcatagacgaaactgttgggcatcagaggtcgcaaactccatcgcgtcccgagccaaaatatgcaactccgacctgccaggcaaaggccggtacagggccacctcgtcggcggcgagcttgaacgcctccgagcctccgagggctcggggcctaaaaaaaaaaattcatgcaactgaaggaggccctaaaactttttgcaaataatgccagaattaatcaagggctt

SEQ ID NO: 15068 - DNA, 10237 bp, Oryza sativa
  unsure (1)..(10237): unsure at all n locations
gtcggtcaaaccgatctcatcgaaattgagggtaacttttatttccgctaaaagttttcggtttttaggtataccaaccattcacccccctttgattggcttggttcttgtgattcgatcctacacagatatccacgcgtgatgcctcgaaggattttaggagcctgccctagctgccatgcagctgcagttctggcgatttaacaagaacagtttaggtcgggttaaattatcctaaagcttcaggtttgcagtaaagcaccatcgaaatactccaagttacaagttaattacaagagtcttcaggttagtaaaggcttcaggagcaactaaccaatttaccaacagagacaagtgttcagaactgaagaccattttcttttctgaaggaaagttcagaactgaagaatgtgcaggacagctcgcagacagtgtttcgtttcagggctgtacacttgattgccaattgctttattgcttagaaataacgaccattgcctaaacattccattctagattctgaacaagtcatcggaatccaatggcattcgtcaggcttctccagaaccagccaagcagtcataatcagggtgttcttcacttcttctagaccaattgaccagagatggatgactgggataggctacatgcatatcctgaaaatgggacaaggatgtggaaatcaaatgaatggtgctgcattaatttgactgggattaatgtagattcaacaatctgactcttcagagtggatagatgatgactgcatccacagtattccatccttcttgtgctacattagcatgatctagcattgatcaccatcattatattcagaggtaaaaagcttcagactttttactaggctcgacaaaagattaaaacttgctatctgaataaagtgacggggcattctatctactactagtctactactactgtaactacaatctttatgcttcagacatggttgatgatgataacacatgcagatcagatcatcacctttactcactcacaggtggaatagtactagtacttacagactattaagaatgattaggggagatgagaaagttggaacaagaatcattgtgcaaaagtgtaaattcagagctagcatagcaatactagcatgcaagcagggacaagttcatcagagaatgtcggtaaacagcactgcaccctgctgctcaatggccctgtgctggtgcttgtctattgcatgcacagaagatgctttacccaattctgacttttgtgtcactttcatttgttgttgtttttctttctctgcagcttcctcccccacattgtactcaatcaaccatacactgatcccatctcgttttcttgacattggtttgtttattcagttaatcatcttgccaactcacatgcaaattatgggcaggagagagaggagacaattggagttaggtaaagatggggatttttgcattctagaccctgaattttctgtttcattttcaggatgagagcatggttgtttcagtaggttcaaccgttggatttagcccttccaaatcgtctgttttcttattaaaatgtgtacatggagtgcggatacgtgcaatcactccatgtttcaatgggaatgtgatctgagaataggaactagttaaatggtgtaacaggaagatgaaaatgtgcggacaaaaaaaacaagaactaggaaaatgatttcgatagaaaagtagtgtgagaatgaagttgatgtggaatgattgaagtattaattcttttaaagtgttaactgggtggtggagagaaatgtcattgtcactactttaaaagcaccagatgcatgatgaagtgcaaaagagagttagcaaaaaatgtatcccttccttcctagccaagttaaaaagtccctcttaacaagaaccaccaaccatcaacgattatacaatgtctacttcgtcgcataactcctctacaagatatgtcttttctttctacgcaaatttcaataattttgttggtgttcacacatcaagcaaatgatcgcggaatgtagggtctattttaatgcatgcgcttcatcgattcaatagatactaagctcattgttaaaaaaaagaatatacacatttgagatattttgtgagtcgaatactatttatgccaaaaggaaatccataactcttacacaaatattacaaccattttttcatccatccactttgtatatcctaaattaaaaggacttatctgcaaattttgacaaggaaagaagtccaaacacttgcattctcccaaatggtgaaacgtggagcactcgtctgcaaaaaaggcatggaattgggaactgggaaggaaaagaagagagagaagaaaaaaaaaagaaagtagagacaagccaatcctactcagcaaccacaatcattattccactctctccaactgacggctacggtggtctactaataaagaagcagtatataagtgtttgagcaacccatggccatggccggattaaaccaataaattaagcagctaatctccgggtaaccatgggtaattaacaactaacccacctgctaatctaatctaatctaatctaatctcctcttcctcctgccgcttccgtattcgttgtctctctcgtgcgtcacggcttcctctttccatgggtgtcagttaattaatcagataatgacctatccgttttggtaaacacctggttaccagcttgacagaatggcagtgtttcagacacacgataaacttcctttttctgttggatgatgttgatttcttttaggtgtccgtgatcttggctacttttatttttttttggtagattcgtatcacaatagttgtgtaaattgtgatgacgtggtaatatttccggcaacattttcttcggagtttacggtgtttgaagcatacggagcacttccctgaaaatcaatacatctctcttcagagttcagacttcagagtgtttgattaacattcagagtttcccatcacaataatttgtgtaaattgttggcaagattttcttcagagtttacagtgtttgactaatcatttccgaggaacattttctttgaaaaaaaaacttattcagagtttcaagtgttttattgactatacattcagagtttggagaaaaacaattaagcaaatgaaaaaaaaaattagcagcacattctttatttcgttctttgataagtatctaaaaaattcaattcatttaagcgaatatttatctccaccgacgatagcagcaggacgagccaataaaataagagggcggtgcaaagaggtggaggagcaaaattaatcagggcaattagacaactgaaaagcgaagctaaggcgcgctaataattgaccccggactctctgatagtactacttaattaactaatcggagcaaggaaaatagcaaactatagtttagctacaaccacatgcgaagaagataggagaaaggagagagaaaatcgtactatagatttatattcagctatagtataagtataataaattaaaatgacactagatgatgtgtcaatttttagaagctacaagttaggtatagtattaagggtccgtttggtagagctctaactcgtaaatttaactctagaagttggatttagaatgcagttatgaagcagccaaaaattcaacttcacctctctaatttattttacgagaacactctacttagcttcagatcgctgaaactgtttggccaaacttgaagccgtaacaaaaagaccctaagtttaaactaatcctgcgctaatcttgtacgctaatccgtctctgggctgtgcatccagccagcgccgtgctttgctgtgctgtgcgagcagtgaagtgtggcggctttgtttaattgggtatcgcgtccctgtccggccaccgggtggtggttcgcgtccgggttggccgagctgcgagagcgacctctcctcctcctcttctcctcctcttcctcttcttcctcgtctcgtctagttctacatcgccttcctatcgcctccgctgcggaaaggctctccctttccgagctcttcccgagctctcctgcttgttcttggggccggggaagattcttgctgctctgaatcagaggtgggtgctgatacctgcttgctcttcttgttcttgttcgtcttaatccgagctcgtttggattgggagagagggctagcgttgtaggcggattgatttttgtttgggttgttgggtagtggcaagaacgtttgcttttggtgattttggcggctcgagctctgttgaaagttacttttttttttgggtacatggggtgtcgtgaaagtgaatgttaatatattgtttgtttgtctgtttgttcgtttgttcgtttgttagtttgttttcccgagttgaatttgaaattttggatgttattaatagtggtgttcttgccgttctgacggttgctgctgggcttgtagtctctgatttgtggctgcgaaattggatccaatcttttttttgggggaaaattggtgagttttgggatcaaattaggatcttgtgagaatataagcaggtgaactcttgcattcttgcccgcttcaatccccaaaactcgtgtttgctgctgtcctggtatttttgacaaagttctattctgacgtttgaattgtccattgcttggatttaaagcttggaatttttcttctttttttttctcgaataatattcagcttttaggtgctttgccggagaattcggacgcgattcttcccttggccaatcccattgagagatgccattcatgtttctgtcgatccatttctttttttgtttgttttctccagtaacctttctgcaatcacaacagctctactttttttctctatgtggatgtccttgtgaatttgctctgtaggtgagtagtgtctgccttgctggacattgatgtgattgatggagcatctgttgcctaatcattttagctcaatttgatctgagctggcgttcagtacattttgaaagtttatccgtacagagatttcggcgctgtacgttgcctgtttaatcacttctgtatacagctcatttggatccaattcctttagctgatgccatctggatccattgttatatcctaaacagtttgtgatccaactgtttcgttgctgtttgttatttctggttgatgaatttgaagtgtagatttatttggatggatcaagatttatttagagcagataatctcatttgtagtatgtttggttctntgctgcatatcagggtcaagtagtatatcatctgtgagttaagnagaatgcaaggagttggcactcagccgacgagctcagngaagtatcttggagccctcaaggacaccacaactgtgagcttggcaaaagtgaacagtgattataaggtcgaaaattctatcaatcctctgaagaatgtttggaaattctcatgctcaattgcttactgttatatgctttactccgccgcgggcttagcattgtcttttttcaaaacaggaattggatattgcaattgtgaaggctacaaaccatgttgagcgtccatcaaaggagaagtacataagaggtggcatatcctgtctcttagctgaaagcttgaaacactagtgccagttcatagctgcatcttttcacttgtgttaatcttttttaattttcattgttatatataattgaatatatagtgtagaaaaccaatgaattgtcctgctcctgcttaaaattcagtgattttttgttatgtagtttttgttgaatgaaatggagtattatattgattgtgcactaatttaccttcagactgtcaaaacttgcctcatattcatttgtttattggtttgcagaaattttttattccatttctgcttcaaggccacgagcagatgtagcttactgcatccatgcccttgcaagacgtctttccaagacacgcaattgggcggtatgtaccttttctataagactttagtgttctaactagaatgtagtagtgcttctttctgtccaaggaaccattttacaccaagtatcttctcgttctgtctaaggagcctttttgtaacattttaaaattttgcatttctctgtagtttatggagctatgttaaaatggactttgggaaactatgaaaatatttgttggcattagcttcctttgttactgtctccattttctttgtaaaacagatgggtctacgagtttagtcctttttctttagagtagttacaaaatggttttttgtttaaatgcatggtggaattgatggtttttgaactttttgaaggattgccaaactgctatgtgattagaaggattagtttgcatttaacattatttgttttgttttattgatagtgcttttcctgggtgatgcactgtaaaaaaagttataaacttatgaatattctttgcttcaatatttatacctcaggttgcattgaagacattaattgtcatacatcgcgcccttcgagaggtcgatcccacttttcgtgaagagcttatcaattatggcagatctaggtcccatatgctaaacttggcctactttaaggatgattctagtgcaggaggtactaattgacattttattactagtgttgtcacttttatagctgtattagacattctaactctgaactataatgactatttactcttatcttgttcagcttgggatttttctgcttggatacgcacttatgctttatatttagaagagagacttgaatgtttccgagtgctgaagtatgatgtggagacagatcctccggtatgtaatccaattactactcttgcttatgcgaggttttatcaaatttttatttctttaaaacttaaatgtaattttgctggaaggaaactgtgtttaaacttcataactaccttgtaagttccaattttaaggtttcctccttttctcctggaagactctgaggaagtagattgtggaagtagatctatcaccttagaaaactctaaaggagagaaagtgaatttcaaaaccatagttaatcccccttggaaaggagccctagtgcaccacatggaagtttccgaactacagaaggttacctattgctagagaatatccagatatcttccagaagagttgacaggcatgccaccgcatagggacatggaacattgatttatgtaattgaaactttatcatgagagatgagattacaagtgccatgttgccaacggtattctttctaactttctgaaaattctggtctctgcagaaaactcgggatcttgaaactggtgatttgcttgatcatctgccagcattacagcaacttctttttcggctccttgcttgccaggtaattagtttttgcctacatatgatttgaaatttcaccacattccatcttcatgttccactgtcaggttaaatttgaattactgaatattatttttgtagccacaaggggcatcatcttacaatgtcataatccagcacgcactttcaatggtaagtagcatgagttagcatgcttgtttcattttaagtgcacaacatgatggtcttggcatgaatgctgactttgcttgtgcattactggaaggttgctctggaaagtgttaagatctacactgctattagtgatggtacaattaatctggttgacaaggtgagttttcttattagttattctagtcattccagataagtttgtaaaatctgctattcgctagcgatatttctttacttttctcatctaacctacggattattctctattacagttctttgagatgcaaagaagtgatgctgttagggcacttgatatatacaaaagagcaactaaccaggtgaagttctgtccctctactgttgatccattaatgaatttgttcagtggattattttcacttgcatgtagcaataaaaatcaaggttctttcttaagtttaattaattaaggacttgggtatgtgttagggcttcagaaacttagaagctgatcgattgaagaatgtatgagataattcacttaattgctgtgaatagatcaaatctatttacactattatgttgttttattatccctgaccagtttttccccccttcaatgtttgattcatgacaaagtgataaaaaacagtaggacagaggcagataacaatccatctgagcatcttgctttcctccatggtctctcctttgatcgaggattagctatgtgcacttttaagcaaccttgtctctaattaaaatttaggtatcatatctgtgatggaatatgaaattaaacttagagcacaaggtttttttttcacttcagcatcatcagctctgttgatgttgatctgtctaaaacagaagttctgaaccactgatattaatcgttgaattatgttgaaataagaacatttagggcactgttgctgcttcaccttttaatttcttaaatttgttgcacaggctgaaagactatcagagttttatgaagtgtgtaaaacgatacacattgggcgtggtgagaagttcttaaaaatcgaacaggtctgacagatattcgatttgcatgtatttgttgtttgttttccattttagcaagctactgattatactgaaacttctgcagcctccagcttcattcttagtaaccatggaggaatatgtgacagaagctcccactgtagctcaaaaagataaggttcgagaaatgttgaaacttgctgatgtttagagctcaaattaatgtgttgattgattgtatcagtacattataaatcgagaagacaatgaatctagttagaaccatcttatgcatgattttctgctcttcaggctccttattgagtttgcttatcacacatcttatctgtgtttaggtactggcaatcgaatacaagaaagaggcagaggaggaagaaaagccggcatcgcctcctcccgctccagagccagaaccagaacaagaaccagagccagagcctgaaccagtaaaagaggaagcacctaaagaggagccaacagatttgctggtaacattctgtactactcacaagaggccactaatcctgcattgtcatgctaataactcaatttctctgccagggtctgaacgaaccgaaccctgccgcagccgagatagaggagaagaatgctttagcccttgccattgttccgataggtaaaattccccacgaacgaaaaccgttcaattcttttgtctccactagaagttgatcggttgtaagacatgcttctttactgttcttgcttttctgtggcagatgatgtacctaaagttgcacctgctcaaaatggagtcactggctgggagctggcccttgtcaccacacccagttcaaacgaaactgctattacttcaagcaagaagctggtactgaacctgaacattttaccttgacatgtagcgaaattccagatagacgcggcaacactagcatcatccttagcttgaaatgccagcgaattttcagataaatgcagcaacagtagcatcattcttaccttgaaatgcagcaaattttcagacagatgaagcaacagtagcatcattcttaccttgaaatgcagcaaaatttcagataaatgcagcaacagtagcatcatttttaacttgaaatgcaacaaaattttcagacagatgaagcagcactagcatcattcttaatttgaaatgcagcaaaattttcagacagatgcagcaacaacaaaagctaaccatctctgaaactctgaaatcttttcttcaggctggtggactggacttgctcacgctcgacagcctgtacgacgacgcgaaccggagagcgagccagccgacgagctacaacccatgggatgtcaaccccggcgtcgccggcgccggcgccgccccgatgatgcagcagccgatgatgcacgacccgttctacgcctccagcggctacgcggcgccgcacaacgtgcagatgaccgccatggcgcagcagcagcaggccttcatgctccagcagcagatgatgatggccgccgccgccgccgccgccgaggcgcccccgcctcaggtgttccaccaccaccagcagcagcagcagcatctccaggccaacccggcgaacccgttcggcaacccgttcgccgccgccgcagccgcccaccacccttacggcgccgccgccgccgccggcaacggctacacggggctcatatgatgatcatcatccagctccggcgatgtcggtc

SEQ ID NO: 15069 - DNA, 719 bp, Oryza sativa
gctgtgtgtttatgtgcgcgctttcaagcttctcctcgtgcttcacatcctcaagcggtcaagcgaataatgaggtatttgaatcatacacttgagtttggaatttggtattctacttcatcttctatttgcttaagtggatattcagatgctgattttggaggttatagaattgataggaaaagtactagtggaacatgtcattttcttggtacatcattgattgcatggtcttctaggaaacaatctagtgttgctcaatcaactgctgaatctgaatatgttgctgctgctagttgttgttcacagattctttggcttttatctactttgaaagattatagtcttactttgagaaagtacctctcttttgtgataatactagtgctattaatattgctaagaatcctgttcaacactcacgcacaaagcagattgatattcgttttcactttttgagggatcatgttgagaagggagatgttgagttgcagtttttggacacgaaattgcaaattgctgatattttcactaaacctttggattctaatcgctttgcttttcttcgtggtgaattgggcataattcatccttttggcatggtttgagggggagtttgtacctcatggttttatcaagcaataatatgacaatgaaaaacttgagaaaagagagctttgtttatgcatatggtattttcttctgcatgctagcaatac

SEQ ID NO: 15070 - DNA, 2497 bp, Oryza sativa
  unsure (1)..(2497): unsure at all n locations
agtaccaagccccgggcgggcacccgatcgccgtgaagaagtgccggaacacggtcagcgccggcggcggcggcggcgccacgccggcgcggcgccagagcgcggcgaagccggcgaggaggcgccacgcgttgggcgtgagctggctcggcgcgagcccgaagtggaaaagcaccgcggcgaagaacggttgcagcggtaaccgcatcagcctttcttcctccatcgccgcgacgtacacgaacgccgcacccggcggcggcggcgcgcacgccgggaggtcgccggcgaggagcgcggtaancccgcgcgggatggagcacctcccggtgatgtctctcagcgcgtccgccgtgcgcagccacgacgttgtcttctcagccacggtcaaagcgcgcgcgcgaccgccgccgccgccggtgctgggcgagcgggcgcggccgaggcgcgcggcggccggcggcgaccacgacgacgaggagcgtggagaggatggcatggcgagctgtggttgggcttcgcgaggaaataccaaccaacagcgcgtactacgtgctgtggttgagtgtcgcgctttgcacttaatttatgggattgaaatcctttgcctatattgaatccacacgtgtcaatgataaagtcacatgattttaaagacagaggatacttatcctaatttatggggaacattcctacatctctcgtaatatatcatttcattcatttaaacccattcgtttgtatataaaaaatcttattgaatttagtaaaaattatacaatacatataccacttcataaaatctcaagtcttaattcaaacccatattgaaaaataataattaaaaaaggacaaatcaattgtttggtattactcaaacctaaatttcctccaattctttttaaaaaatatgtaggtcaattttgaaattgattttggtggagtgattagtattattatgttgtacattatcaatttttaaaagtaattttacagccagttgcaccaaatttaaaagaaaaatgcgtgcgatgaaacattcgccttaagggattacaatcaatccatttcccaatttatacacgggagattgttttttcaatctcttgaagagatatttccttgtgtacattaacatattaaataaatataaataatgataaaaaatgggaaaaaaactctctctagtttcgcaacataggccacaaccatagataatataagagaatanctatataaaaccattccaatataactctaatataattgaagtgtaattatattgtaaatataattacaatgttactcttatgtaacaacaagcggcgctcggtttcaaactcacagtgagagtatgattccctagcnccacatgcgaagaaaatgtctttctcccctcgaagcacatctaatggctaaaaaattaaaagcttcccctacccgttttctttcattagcagcttaatcattcgaggagaaaagaatgaaggtggtgtgtccaagggccatggtggtgcgacaatcaactccatcgccacatcttgtagcttggagagatgaaccgcgagggatgccgccatcactgcttcgttgacccgagtttatcccaaatcttcgcctcatagacttggctaagaccagtgggttgaaccgtggttcataattgctctcactctcacatttccacatctgtctcttaatttttttttgttaggcttgcttgagctgtggttcgtaaatgctcttactttcacactttcatatttgtttcatatttccacatttgtcgactctccatttctttaatttacctctccagtttccttccccatcatgaacccaacacaacatttgcaccaaaatgtgactgccccctgcagctactctgttaccgtgcaacaaaactactggagacgtgttagttgtcacgttcatcctttccctaccatccacgacaaaaaaaaaaaaaaacagctaaagagcaacgaaagataacatggttagtattttcagtttgtaaacagagtttacagaactcattcccccccttccaattccttttcaccaattgctcagcacaggggagtctacctctcccaactagatacaaaaaatgttttatctttagaggaattctatctttccaaactgccctcatttcaatatccctaatacccttaaaagttaaaattatgtacattgattttgtggtgaacacctcttttttagtatgaggccaataaaccttgtctttatcagtccccaactgagattccccaattatctctacaagctccccaacctctctacccctttgttcattaaatttcttctaaactccaagctccattctccttctaccaccatatccttgacagtagcattttgatcatgactaatttcaaatagataactttcaaaggtacattatcacaccaaacatccttccaaaaactcacatctctcccactgtgcacttcttttgtgaccagcctag

SEQ ID NO: 15071 - DNA, 2530 bp, Oryza sativa
atctcatcctgtatcttatcccatattatttccttccaatcggattcgagaacggatatctatttgtatatctaattcatagatattaaatataataaagtaattgaagtattaaaagagatacatcaagaaaaatttatccaatattacatgtgagtatgtaaaatagttattaaccaatcttttatcatattttttatcatatttttaggtgaatcaataataatttttcatacatattttataatacggaacatatgggcggatacatgttttcccgtatcctaacccatatttatggcatgccacatcttaggtactaaaggtttggcaacctgaaaaagcatcaaaacaacccctactagttaaaatttgaagcacccaaccaaaatatattcgtgaatcattttaagcatagtactataaagtcttgttcaacatagttcattcatttcagcccatctcattcacaaaaagagtgaagaaaaattcgagcaaagcaaaaacatctcaaaaccacaaataacaagaaggaatcctgacacaaatcatctatcattctcaacatctcccacaatcataaacaaattaactaaattaaccaaacttgcctgatgttgaggcaatcaagaaagcggggattagataagccaacacacatggagtgacttctatcaaacattctcccgcgaacagtgctggtaaactcgagtagacgggcagcaccaacatccacagttcttaacctcggttgtttttttcttgtgatgcttctccaccttcgcacacagtttcttcgctgtcttgagcatagaacgaagcgaactatgcaaaccccttttttggggcgccacggacgaactcgctaccaaacccgccgcctcactacgagggatgaagagagagtaggggtaatgtatttagatttgaaatgggttggtttctacaacagattttaaagagcagatactatctaattggccttatagggtgcagatggggttttggattattctgctcacttgtttgaggagatggctgagggttatagagtgcagagcgggttttagattattggcatgttttgctcacttgtttgaggagatgactgaggggatggagtgctaatctaaacagtgctaagaaggaattgaaaaatgctttggtagagctggataacaagacatatgacagtggactttttgacagtgaatggaaaatcagatatgagatggaaaaggagatggaaaatatttacattcaggaggagatctggtggcagagaagagtggcagagaagaggaggggaaacttgattttacaaggagatgctaatacaacctttttctataagccctgcaaatggaaggtaaaggaaaagccatatcttctcttaaggggatgttaatatcacaaagctctcacaaattaaacaacacatgcatattataaggggttgcttggaaaagaagaaagcagggaagttcatctaagtcctgaaatctggcaagataagttgagactgactgagaaggaaaaagtttagatggttagacccttctcttcaaatgaagtggacaaagtgatgaagactatgaaaaacaatacagcttctagccctgatgggttgcctgtgggtttttataaacaaatgtggcctcatataagggttttagttaaagagatgttagatgacttacacatgggtgagctgcatatagatatgatcaattatggggtgatttctcctttgccaaaaatcagcgatgcaaacacaatcaaacagtatagacccatctatccacaaaatgtgacttttaggatgattgaagtggcaaacaaagtgattagttggtctcaaactgcctttatacatagaaggaatattttagaaggttgttttattttacatgaggtgatgtatgagttgaaaataaaaagggatactgggattatcctcaaaattgactttgagaaggcttatgacagggtaaaatgggattttttgtatgaggtcatggagaaaacgaattttgactccataatggtgggatggataaaaaatataactgaagatgggagagtgagtattaacattaatagtaaacagggacattttttcaaaacttacaggggtttgaggcaaggagaccacttgtctcctatccttttcaatcttgtgggtgatgccttggctgccattttggataaagccaaagaatggggagtccttgaaggtctggttccaaacttagtggatgggggtttgactcaccttcaatacgctgatgatacaatcctattcattaagaattctgatgagaacatccttgcccttaagttcttattattctgctatgaagagatgtcagggatgaagattaattatcagaaaagtgatgtatatgtcataggggtggaggatagtgagggattaagaattgctaatatgctgaattgtaagattggtaagatgcctttcacatacttgggtttgcctatgacggtcgacagaattgggatgagagac

SEQ ID NO: 15072 - DNA, 7777 bp, Oryza sativa
ctctaatagaaggaacaggactctgcttttgttgtagttttaccaaaaatcacagtatttgtaaaaataagcaatgtaaatatgatgacgcttcaagtactgtgtgtacttcaaaaaaaatattgtgtgtgaatccatgatcgttgcacttctatcttacaatgtttgaaaacgcagtgcatacttattataatttttcagataaaatgttttacaggatagcactgcagaatataaatgcaaataaattatgatggatttaagtcatgttcacacatgaacaacttaacagaagcaatacctgactgatttcacccctcatacgatttattctgtctgcgtttgggtcattcgaatagtaatccatttgctgactcaagaccctcgagaactcatcattcatgccataagcaagggatgtcaatgcagcacggccatatgtcttcacgaaccttccatggatatcctcaaggaacgcaaaggggattcgccctacaacagaacgaagttaataagtcgctattaagccattcacatagtaataccgcacaaaaagagtctgcagcaagccatgctcagacaaatctgtggttatcaaaccatttagttttaggtgacgcttaatgtgaaaggcgtcgattgcgcaatacagaaagtcagaaatctgactcttaacacgcataaaccgcaacctttagaggcactaaaatttattgttggtttaggaaggttgctctagcccagctctcctcttgcttcctagctcaaaaagagccttttgaagcattgaatttcgtttgatcaggcaattgcaagacccagctgaaaagctcaactcgtcaagtaccatctattgtcagatgccaattggctagctctgactcgcacaatcccaaccctgtttgtccctactcccgatctaatctaccaatgaccaatccccgaagagaaccacctgcaactgcaaagccagcagctatcggagacgcgcatacagacaaaccccgcaatcaactccaccggacggatccccgcgattccgcccgaaacccacccaaacgaaactcaaaaattcccccaccatacatggcgcggcgagaggtgggatggggaggcttacgtccggcggcctcgtcggccatgcagagcgcggtgatgccgtcggtgcgcttggcgtggaagacgtagcggtcctgcgtgtaggagacgtggctgtcggctcccccgccggggaggcgcttgaggacctgccgcgccacggcgcccgcgttggtcgccgccgcgctgtgctccgccagcaccaccgtcccgcgcgccaccaccgcgtacaggatcgccatctccgccgcgcgcctcgcctcgcctcgcctcccgcctccggctgccgtgcggacgcggaggaggaggaggaggacggcggcgagggggaggttgaattagtactaataataattagaagaaaagaaggaaaaattacaggaagaagaaggttggggggaggagtagtatttggcggagacaggttggatggggtgggctggatggggcccaccgggggggggggcgtgttttgagctgggggtagagccccacctttataatgtagaattgcggtgttggaatgtgtttgggctggaacgctgacgacgtacgccggtcggtcgtttattctattactactaccacttgggtatgagtatgactctatgagccgccgtcccgcggttgggttgcaagttggcaccacctgcacattgctgcgttcgctccgctctctccgttaatttatttatgggattttttcttacacgagatatcgctttattatgattcgtacaatatcatacttttgatgcaagttgactccgccgccgccacgactcgatcgagcaggcactcgatcccctaactccggcgccagcgagaccccctcagtctcccatcccctactttccttcttctcaagcctacaacggcgaggtgcttacaccctaaaaccgtgttttgtgactccccgccgttgccttctaacccatgtcgtcatttgtccttgccacaaacactgacccaccgtcagttgccaacctaatggttctagcgccttgccattcacctgtgtctactgtccactgttggtccttcgtcgctcttggccatccatcttagccctcggaaaaccctatcttcccccacccttatccccctccgaccttaaccctgacctaaaaccctaatctgcatctcgacagtttcataaaatatagttgcatttgaatagcataggtaaaaatgatcataaatttttagctagccatcaaagtaggaaactaaactcggttctacaactcttagctgtatcactaaataaaaggtgatgagaaatagatagtttttaagggtgtgtttagttcacgtcaaaattgaaagtttgattgaaattggaatgatatgacggaaaagttagaagtttgtctgtgtagaaaagttttgatgtgatggaaaagttgaaagtttgaagaaaaagtttgaaactaaactcagcgcaagtcatactccctccgtcccaaaaaaaaaaagctcaacctaaacaatgatgtgacatcccctagtacaatgaatctagataattctttgtccagattcgttgtactagaaaatatcacatccccttttaggtatcattttttttttggacggagggagtactgtacacagcaaaattatgaacaggggtcagaggatcagatcaataggattataggtgtgtcacttgtcaaccactttttgcaagatgttttcgagtcgacgaaaacgtttgtaagaatttggagataaattttgatgtaaacatctgaagttttgtatatttagatatggatgacgaaaaatatgtaggttcagtttagtggaacctcaaccaaaccctctgctgtttggaatcagactcctttgtttattgatgaaatcaaatggtgggtgaagctttgatcgatggtgtgcatccggatcgcagatgatttcacataggaaagaaatctgtagcgaatcatcttgtgtctgaattttgtactacgttacatggttgagtaaatgaagcgataaaaattgtgagattttcagagttcagacaaccatgtggtggagtcttgaattcttgacgttgtgcaacattcgcgacatgtataataatgagagcaagtttaatacttatagtatagctcactactagctccaattcatttatagacaattcatataataactgcttactatactattaatatatggtcccacctatcatacacacactgtgtcttggagtccacgctgtagctggctacagatctatagcccacctgctcttctctcttatcttttgtcttattaaaatatatttacagccggctaatagatgctattgtacctgctctgatgagaaatttcttaggccatccacaatgggtacccctaagcgtgtccctgctcacggccgtcgccgctccgtccgtttgccgtcccccagcagaggggcgcgtctccctccactcctcggtcgcttttcgttgagccatggagctaggggacgcgttgggcgacgtcgtggcttgaggacacggctcccgcacctgatttttcccctttcacccttggcctcttcgctgggactgggaggcccatggcggtggggaggagacggagttggcgacgacaacgaccggcgacgaccccgcgatggagactgctcggcgacgaccccgcgccgctcgccatcggccaccgcgcccggccccgcgccgctcgccgtccgccaccgcgctcggcgagagagaaggagaggtgacgacgggtggctcaagatagagagagaggagagaggcgacggcgacgaccagatccggccaccgcgcgtcgcggcagccgtcggccaccagccggcgacgggcggagggcttcctcgcgcggcggcggcgaccagatctggcgcaagctgtcggcggcgcgccggtggctggggagggcgcaagctgtcggcgcggcgacagctggggagggcgaggagggaggcaatggcggtggctggggagggcgaggatggaggggacggcgacgcgcgcgagagaggggagtgattggcgatgcgcacatgagagagagagaagagaagcatcggtgcggtgggggaaaaatgtcgtcggtgggctggaggatagaggaagggtagtataggaaaataccaaatatgggctttttggttgggacactcattgtgggtttgagtgtcttcatccagttgccttatattttgaggagcccatctagggataccctccattgcaagttgagttcccctagagtgtcctcagttagtgaggacactctaggagtgtctcacattgtggatgcccttaggcctttcacagtgcaatgatgtggcgctttgcttcgttgacatggaggagaaaaggaggtgggtcccgtgccctcgcgaggtttacgcctcctagctagggtgcgagttgctcatgcccaaaaaagcaaaaagcaaacggtcccctctctctgctactcccaaatcttccccattctactcttcttccccgccaactctcaccaccatgccaacaatcgagcgggcttggagtcaccggcgatgctgccgagtgccgacgaggaaggggagaaaccgaaggatgggaaaaagcggcagggcaggttggttcgcggcgatggcgagggaggagcgggcggaaaggaatgagcagcttgccagatccgcggtgccaagctcgccgccgaactcgtcgccgtcccccgctccggttcgccgagctcgtcgccgtcacccgcttccgcgccgtcgacattgtcgccatctcccgctcctgtgccgccgacctcgtcgctgtctcccgccccgcgtcgccgacctcgtcgtcgtccccgcgctctgctccgtgtcgccgagttcgtcgccgtcctccgctcccgcgccgtggagatgagatcaaggacatcgtcgccgtccctgcgctccgctccgcgccgaatccgtcgtcgagccactgccgggggtggaggggctggtgagccctcgcgccgctgcagccctccgcgccctcgtcgccagccagaagtggaggggctggcgagatctcgcgccaccgccgccgaactcgtcgccgtctcccgccccgcgctcccacccgcgtcgccgagttcgtcgccgtccttcgccgaaggagaggagagccggcgccggcggagggaggaggggagccggcgccggcggagggagaagggttgagagagccggcgtgactgtgaggaagtagttgggggatttgggtatagtagtatgggtggagatttatatttttctctcgattttagggtggttactgtaaaatttggactcctttgcaaatttataaacatatgagagctgacatggaaagttacaggggctgaaacaaaaaagtaagtcactcatgaggctatttgcactatgggaatacagaaacttggatccggctcttcatcctacgtggaatgagataggggaacgctgtactgtgagaggcctctttgtgcaggtccatctagtgtgtgctggagggagggaacggggaacgtggcaactgacacgtctcgaccttttttgttgcaggggggcgatggtcttttgccattttggtccaaatgtgagtgcgttgccgttcgagagggaggaggagaaacagtaggagaggttaatgtgaaaagcgagttctacaggtggagtagcggagatggtccgcataatgttcgtttccaggggttgcggctgtgtttagagcagggtgaaaaattttgtcgcgttgtattggttatacggacatatatttaaaatattaaatatggttataataaaataaattatagattttgcctataaactgtgagatgaatttattaaacctaattaatctgttattagtaaatgtttactatagcattatattattaaatcatagagtaattaggtttaaaagattcgtcttacaatttacacgcaatctatgtaatcagttattttttcgtttatatttaatactccatgaatgtctaaatatttatacttcatgaatgtctaaatattttgatatgatgtgaaaatttttgacagggatacaggagtgaatgccccgttgctggatggactgagaaaactcgcacaaaacacgatgcattcctcctcttcctccccgtcgtcctccgttgagatcatcgacgccgacgccttccgctctcgctccaccgaccccgaccaccgtcgcgcagacgccgtcgccgccgactccccgttcccgaggtccgtcgccgaccacatcgcctcgtctctgcgcacgcaggaagcggtcgacgccgtctgcaagaagtacggtgtcctggcggagttcgccgcgcgccccgccggcgacctgcgcgcgtgctcggcgccgccgccgggcgccgcgtgcgtgtacgcacgggcgctggaggccgggatgcgcctcccgctgcacccctttgcctgcgagcttctccggcatctcggcgtcgcgccgagccagatcactcccaacgggtggcgcgtcgtggcggggttcctcctgctctcccaccacgccgccgcgccggcgtcgctcgccgtgttccggcgcttcttcaggctgttcttgtccaagctgaacggctggtaccacttccggggcaagcgcggcgccggcgccgacggggtgctcttcacggggttgcccaagctcaaagggtggaagggaggcttcttcttcgtgtcgtcgccgtcgccatggccgtgccaagtgcgatggggcgggcccccgccgtccaagagctctaccgccgagccggtgctcagcggcgaggagatggaattggcgggaaagcttctgcacttgcatggcggcgccgcggttgatctgaggacgtatctctgcgagagcaacctcgccgcggtgttctcctccaacctcgccggcgccgcaccaccgcagccgccgcctcctcgtcctgctcgtgctaaaggtaagtttcctttctccggcgagttcaacgcacagaaggtgaagaccgagccggagagcgacatgccgtggtggtcgccgttgtccgggaagaagagggggtttgaagcagaggagaataacccgccgccgtcgccgacgccgacgccgcctgctccgcatggcggctcgtggtcgtggtcggcttccggcatgtgttccccgccgccgggcttcgcggcgcacgtgcccgacaagcacgacggcgactcggccgactggaaggccgcgcggcagctgctccaggccatcgtcacgccgtcacgggagcgccggttcccggcggcgaagccctccgacgtcgtcgcgtcgagctacctgacactgcttcaggtacgcctccgccgcggccgccattgacgcgaaccgctcaagaatcgtcgcgtgcacttgccttcattcatgtcgtcgttgtttggcgcaggcggcgaactacgcgtcgttctcgttcggctacgcgctggagctggaggagaagctgcgtgcgcgggagcgcgaccccgccgcggaggcggacgccgtgcggaaggagctcgaggagaaggcgctgcgcgagctcgcggcggcgaaggcggcgccggtgcaggagtacctgcgctccgacgagcacaggcgggagctcgcggcgcacgcgctggaggggtacgagcgcggcatggagcgtcgcgctccgg

SEQ ID NO: 15073 - DNA, 577 bp, Oryza sativa
tgtttcaatgctgactagtgatttgtttcaatatttgttgctgtttactcaggttgaaatacaccatgccagtgaggtagatgagattttcgatgccattagctatgacaagggtgcttctgttattcgtatgctacaaagttacctaggtgcagagcgttttcaggtttcatactggctctccttgaaattcttcagaatcgtgttattcttatctgtagtgagcaccttttgctcaactgtattgcttaaaagcgtatgaaaattaccccaaaccattttcttttttgcttctcggaggaagcattgaccttttagtctgtccactattcatttagttgaaaaacgtcaagtggacctttggatattccaagtttccaatattttaaatgcgtgaatgatccttaggcgatacaattggtgttaatgttcttttgttagtgattttgtaagtgaaattctttttttaaaagcttcctatattttttagggcaaatattaccatttcccccctaatcatcttgcttttgtttaacgagtacctgttatcgatgacgagtcaaccattaatacttca

SEQ ID NO: 15074 - DNA, 600 bp, Oryza sativa
ttgttgcaatgtaaacaacacttattttttttaatctccaaaacaagaagttcaattctgaaatctgattcctagaaaatctaaccataaaacaatgacttataaatcagataagtattatttcttagaatatactattatatgcatatgcatattcacctgtaattaatgaattggtctaagttgtgtttgcaatgttgcaaaatgtgagttttgatagtttagactttagaatctgttttcctttttgaagtctgcagatctaagcagcagctttttcctgatgtttgtgatactgctttagacctattttatgcacaaaaagcttctcatgatgcaagtaagattgatgacatacctcagcggacatgattccatggtggcaatggatgctttctggtgactggccaaaaccactactggcctcaatgaacacaccagcttcagttattccaacagtctcaatcagggactggcgaggggggcttttcgtcggtatgaatatggagttcatggggttatcagccatccctttacccacatacttgttatggagaactacaggaattttatggctcctaaggtcattcttgggtccaa

SEQ ID NO: 15075 - DNA, 575 bp, Oryza sativa
gcactcccgcgcgcgcgcaggcgccggcggcgacgtgctcctcgccggggtgcacctcgtcagcgcggcgcgcgggtggggcgtgcgcgacctgctcgaccacgttcgccagctcgctgggtcgcgtggcaatgtgtgggcagtgggtgcgaggaatgttggcaagtctacactgctcaatgccattgcccggtgctccgggattgaaggcggaccgaccttgacggaggcgccggtgccaggaacgacccttgatgtgatccaggttgatggcgttcttggatcgcaggcgaagctgttcgacacaccgggcttgcttcatggtcaccagctgacatcgaggctgactcgcgaggagcagaagctggttcgagtgagcaaggagatgcggcccaggacatacagattaaaggtgatatatatttgcacatcacccactcaaccccagtcgtgtttgtgataatgcgcaattgacatagttgctgctcattttctaaatttcagcacaaatttcttgttaacgagtctagattttctgtagttctctgcaacagaattgaagatactttgcttaa

SEQ ID NO: 15076 - DNA, 503 bp, Oryza sativa
ttttgactgactggatttatgattgctgtaggcaatgtctgcatatgggtatgagattgtgcaaactctgatcattgatattgagcctgatgtccatgtcaagagagcaatgaatgagatcaacgcaggcaagtaaccattgccctttccctgcataattgttgcttgctttcgatcttctcgccaaagattgagttggcaatagctttttgggaatactgagttggcaatagttccttccatcaatcacataatcatttacacattgattgttttgattgattctgtaacatgtactcagaattatttccatctaacatcttgatttatggtattgttgagcagctgcaagattgagggtggcagccaatgagaaagccgaagccgagaagatactacagatcaagaaagctgaaggagaggcagagtccaagtacctggctggtgtcggtatcgcgaggcagcgtcaggccatagtggatgggctgagagacagcgtgctc

SEQ ID NO: 15077 - DNA, 709 bp, Oryza sativa
tcaccacccagcaaatcatcaaccgaagaagtaaacatgctattccccattatcctctcgctaccttcctgagctgaattttgagctcctgggtcatcttgatcccctgtatcaatcaaatcaggcatctgtgcagcaggtactgttgtctttgtttctgaaaaattattgcttccagtaggttgttccccaaccagcagatttaagacctaagaaaatggcacggtttattatatagtaataattggaggtggaaatagctatagcctagagagagatagaatcaaagagatgcaaagcatgtattctacatagcaatttgcagaaaataaatggtgcattatacaaatttatttattaatggcttgcaactttactgaccttcgaagccttttctctgagagaaacgtgcggaagctcacagcatctaacaacagatgcactgttctcacagaaatatgaagtaatgattgaataaggatcagtatcctgtttccttacaattgcttccaatacacaaattgccttcatgcgaacctgaagtagaacaaatgcattgaatatttatgaatatataaagtgaaaacaatggtggaagtgcttggtcaagataaaatggtattataaatatgatctaatcatgtatataaataatgtgagataatattgtatcaaaaatataagaaaaggtcagagaacatcatagata

SEQ ID NO: 15078 - DNA, 583 bp, Oryza sativa
atataaatatggaaaaagacacgggaggtccttaatctagtaaataaattaaaaaatcatccttgaacccaaaatccagatataaaacattttttaacttaaaaaaaagagtcactttaggtctttagggtgattttgaaccgggttttatcttaagtggaacctgagtcagcgtgggacccacatgggtcccacatgtcaatgactactttctttcccctctctaaacctctttcctctctctcttattctctacctctcttcctctctctcttcttggcaaccggccatgcgggaggactgaggagcgcggctgacgacgggcggggagaggagcggaggtggagacggatgcggcggggcgccaccggcgatggcctcgccgtcgcctcgctctccgctctgcttgacgagaagcaactccagcgctcgcccaaacccaccctcgccgagtacgctgtccggcttgaagttcctcgtcgccgccctgagctctgcgaacatgaagattcagaggttggggacctccaggatcctcccctccggctccgggtagagcggggtaccgagctcgaattcgcgc

SEQ ID NO: 15079 - DNA, 574 bp, Oryza sativa
tctgtaagtatttacgcttatttacgtttggaactgtatattacttgtcattttgtgaccctgcctggtcatggacagggatttaatacacaaaatagtctagaaatttgggctaaatttatgggcgtgacaagtactcaatattcctgaccatcgaagctccgaggcaaggctggaaggaggaggactcgtcgcatccgcaacgatatggacgagtcggaggctggcagggtgaagcgttgcagcaaatgcgatgaacatgggcacacctacaagcattgtcctaaagacaaggagaaaccaagtgcggcggaggcaggactatcaggatcagcagcagatggagctcgccctacgggtgaaggcactacctccactcgaccacgtcctaggcgtcgtcgtgccacgtctagctatgtggtgtagttcttatgttctatgttggcatgtggctttgcttgtaattcgtttcgaacttatcgatgtgtttatgtttcgtcgtgtaatgtcagacttcggcatgtcatgtctttaggtctcgtgatgtaacatcagactaaggcgcctaacatct

SEQ ID NO: 15080 - DNA, 536 bp, Oryza sativa
cattggagaaggttactactgtgcacttgcaaaagggccacttgttccaaaccatgttctagttataccagttgagcactgctctagtacactaaagatgcccgtggaagctgaggcagagcttgggagatataaggatgctctggccaagtattttgagaaacaaggaaagatagctatatacttcgagtgggtttctcagcagtcccgccatgcaaaccttcaggtgaggacatttttttcctgatatgttgctccatgcttccatttaaatgatgctgtcatttggaatttggatgcttgtatgcgatctcatttgttttttgttcatactggatggtaatccactaaatttctgcgcaggctgttccagtaccattgtctaaagcatcaagtgttaaaaagatattccatttagcagcacagagactgggatttgaattttctgtagtgaatccaggtgaagttgtacctaactttatctctcttagtcagctgaatagaaaggggatagacaaaaacaatcttaggctgcg

SEQ ID NO: 15081 - DNA, 667 bp, Oryza sativa
gacaccagtcggcggcggataagccggccggtcggtgaagacgcaaacgcccatcaacggtggcataataggccagccgtgcaggcggaagcaccagtcggcggcggacgaggcggccggtcggtgaagacgtagacgcccaacaacggcggcataaaggccagccgtgcaggcggaaacaccagtcggcagcggcgaaggcaagccggtcggtgaagacgtagacgcccaacaacggcggcataaaggccagccgtgcaggcggaaacaccagtcggcggcggcgaaggcaagccggtcggtgaagacgtagacgcccaacaacggcggcataaaggccagccgtgcaggcggaagcaccagtcggcggcggacgaggcggccggtcggtgaagacgtagatgcccaacaacagcggcataaaggccagccgtgcaggcgaaaacaccagtcggcggcggacgaggcggccggtcggtgaagacgtagacgcccaacaacggcggcataaaggccagccgtgcaggcggaaacaccagtcggcggcggcgaaggcaagccggtcggtgaagacgtagacgcccaacaacagcggcataaaggccagccgtgcaggcggaaacaccagtcggcggcggcgaaggcaagccggtcggtgaagacgtag

SEQ ID NO: 15082 - DNA, 622 bp, Oryza sativa
aattctgatccgtgaaactttgttccattaatgacgaactcatgtcactcatatgcatgtttgggaagtgcctaggccgactcccgatgcttggtggttatgactagtcgggcagagtgtttaaacgtacagagtcatctgctcggggaaatcaaaattgacaagaggagaaatacatatttataaatattttaaaatacttgattttttctcgagtattatatttatatcagatactactcatcctatatgtttgttctgcaggatccagatccagatatgcataaaagggattcatggctttaagcttatctcttacgctccaggaatggatcagtcagaacatcaccgaccggcttgcctcatccgccgccgactggtgttttcgcctgcacggctggcctttatgccgctgttgttgggcatctacgtctttaccgaccggccgccttgtccgccaccgactggtgcttccgcctgcacggttggcctttatgccgccgttattgggcgtttacgtcttcaccgaccggtttgccttccccgccgccgactggtgtttccgcctgcacggttggcctttatgcccctgttgttggccgtttacgttttaaccgaccgg

SEQ ID NO: 15083 - DNA, 541 bp, Oryza sativa
  unsure (1)..(541): unsure at all n locations
tatttcaaacagaaggcaattctgaatcactgatcattgtagagacaaaacaaattgtaccgaacagatggaatgagctagaattttgaaagttaaatgatgtgcatgggaggaatcaggattcaggaatgtacctggcaaaagaatcaccaattcttcctttgctagctggcagcagaagtccatgtcatctttgatgccttgcaggcaggacagatccagtttcacctgcaccaagccaaccaaaacatcatacaccatcagaaattccctttgattctcttcattgtgaagcagaatatttgactgaccatgacaaacatggaaccctcaggtttgcttgggcaagtgatgcaactgatgcccttcagcttctcccaacaaatatctgcggtctgccttaggacatcgacggtcttttcgaagaattcttcctttgtgttctctatgagttgtggaattgctccctgaaaaaaaaattaatcaaggtagaatgtaaatcattatgttttgatattatgtatctncactgatcttttta

SEQ ID NO: 15084 - DNA, 654 bp, Oryza sativa
ggttgttcaggcatgatataaaccactggtggcctcacactgtgtgaccactaactgacaacagaatcactatggagtaagcataacaaacctgacagattactgtggagtaagtgcatatggtccaccctaaatttcaactatgggttatataagacttaaaagtgatcatgtggtccactctgaaatttcagagtggctgaatttgtactcttaagtcttaacacacaatcctcaatcatgacatctgtgtctaggcagcaaatttaaagagtctgacaaaatttaggctcacatagtgttgatttcacaaagatcaatgtacctgttttactgttcacaatcctggcacatatcttcctcaccatagctagacataaaaatcctaaaactgaagttgaattccaggtctatcgcgcggtacttatcgcgagacttgccatatgagctatcagctgatgatgtgtacctgacaagtggctgtgctcaagcgattgagatcatctgctctgtcctagctcgccctggtgccaacatcttgtgcccaaggccagggtacctgttccacgaggcacgcgcagtgttcaatggcatggaggtcaggtactttgatcttctccaagagagtggctgggaggttgatcttgatggagt

SEQ ID NO: 15085 - DNA, 651 bp, Oryza sativa
ggttccctcgcgcgctgattttttcggcctttagagcgagatttatacaatagaatttggcatgagattggattgcttttagtcagcctcttatagcctaaagtctttgagtgactagatgacatatcatgtaagttgctgataggtttccagttttccgctcctaggtctgcatattgaacttttcctcttactcgacttaaccagtaccaacccagcttctgaacggatttataccatggcactttaaagccagcatcactgacaatgagcggtgtggtgttactcggtagaatgctcgcaaggtcggctagaaattggtcatgagctttctttgaacattgctctgaaagcgggaacgctttctcataaagagtaacagaacgaccgtgtagtgcgactgaagctcgcaataccataagtcgtttttgctcacgaatatcagaccagtcaacaagtacaatgggcatcgtattgcccgaacagataaagctagcatgccaacggtatacagcgagtcgctctttgtggaggtgacgattacctaacaatcggtcgattcgttgatgttatgttttgctctcgctatggttggcaggttacgggccaagtttggtaagagtgagagttttacagtcaagtaatgcgttg

SEQ ID NO: 15086 - DNA, 8361 bp, Oryza sativa
gcagatgtgctctcaaataaattgaaatgtaaatgcaggaaagaagagtcaccatacaacagtagaatgaaagaaaatctcaagcatgaattgtgtggcaaactggcaatacgtcattgatccattttcataaaacgtacacagcaattgccatcatcattgtcaacgcattcattaccaataccaccagccagcaagacaacatagttttgcaaaatagcaaatctcatatcggcaggccagttcaatctattttctacttatgcttagatcccaaagaacataaataacgtatgttaatacaggatcacgggaacaagcacagtttgcgaaacaagatacttggtcaaccaaaatttaatggattgcagggcagctgagctcgcattgatcaccgcatcttgtagtgttgtgttcttgacacttggcatctatgcccacttagggcgtagcagagcttaatgtcaatatctcggggattctttttattcggtgtaacagtcatactgcctgtgatggtttccccctcacagatggtcagtacatcctccaggtacagaacagtttgcttccagtgagtggcttttgatcttgggcctgcatcaattaaattatacaagaattacaacacagcatgaagaaaagaaaatagatgggcgtaatttggatggttagttgagaagagaatgaacctgttgagaagcccatcatcttatggcatttggtgaaggacacattgaaataggcaacaagagcatggatatagtcattacgctctgctactaactaaatggtactggaaaggacgcatctccaggtgtcattttggaaatatccattgtctgaaataaatatattggaagaagatttagtctaaaatatcacctgaacaaataattgctaagcaaatttaacttgtttcaaagcgttggtaccttcagtaactggcagttagtgacaatctgatttgcatccaccgtatctacaagtggctccatcattgcctgtttcttgatacagcgcatatcaaagccatacacattattccaaactgcaagatatagaacaatgccatcagaaagaattctaataacccagaaagaaacaaataacacacagaacttctgaagcaaaatggattcatggctaatagtcatttgccgttttcctcatgcactacatacattcaattttgtcttctttgtattctgcatcttcgattgcagtaagatgcaaagaagctttgtcaggtaggacaacaccaccatcagcctgcatgacattaacataatatacaagttatatatccccaaaattttaaatattgtccatagaacaaacaaaccaagtttagttttcatagcctacaaaactggcaaacaccatgaacattaatggtaaataagcacttacaagccatttatcacgtgcatatagaacagtgttcagcatattctcgaacaggaggaaatagcccatccattcggagattattacatctacttttgggacaggaagctcaatttcttccactttcccttttattaccgttataactgtgaagatagaaatgatattaacaacttctcaaagtcaaacaagcatgatactgaatggtcatcatagatgatagtaagatagaaaggaaatcaccattagaatatccatttgttttcacaatttcctttgccatatctgccatttgagaacactcaatctgtaaatggaagaacaggtatatcaagtttgaggaaaaaacaatatttgataagaacaggtaatgcgaaataatcctaacaaactactatatatgtaacttgaaatcctaaacaccatgggaactatacaggacaccaacagtttggataatcagcatccaaaaagaacactcattttaagttgttagcgaagagcacaataacagtccaacagataagcttgtatcagcttgcaaagagtcgttaaagtctgatacatgtgaataaaatagtagccttcctgctcttcccaaattctattatattccatgtaatagatagatgggaggaaactacaacatgccgaactagattctaaagttgtggcctcatcaaatagtgaagcagcaaatggctaacagtcttagattaaagaacaagaatgggatcatcaaaatagcttatttagtacaacaaaactatcacagcattaaaatgaaaacataaaagtatgttagaaaactaaccgcatagacatgcttagcccctgcttttgcacagaaaagtgagaggatcccagtcccagcaccaacatcaaggactattttgtccttgaaaagaaagctgttctgggtgataacattttgatatgattttgtccgaaccacatcttttagcatttcctgcaatcagcacgataaagtaattggcatctcgacaacacttggtttgcacatttagatgcataaatcatctgcctaaagttaatgtgcacaaaaaaatcggatgaaaactggtttcttgtgaactgtggtgcaacaaaggaggctgatttcttccagattcacttacttcatgaatacctgcaagacaagtacacctcataaagttactgcgcaaaacagagcaggagcattataaactgcgcaaggtaataaattacacaataactttaggcaaaaccggagcacacagtatcaatgaaaatctcaagacctgtacagatcaaaagctaaaattattcagcagtgcaaagtgaaaatcccaaaagaccaactgaatctcaaaaaacctatgttcaattgcagtcctgataaatcaacaacagaagtacaaaaccaactaaataccaatctgtcatacaaccaccattgccaaaaaacaaaaatgaattgttaccacccaacctgctactaaatgaatgatgcgggtgcacttaacggctaacacgcaaaaaaccttcaatctttcacagcattactgtcaagaacaaccaaaatataatatctcaatccaagtaacaacactacatatgaatatacgttatattttaggccgcacaaattcgcaccagatatcgaaccttccccctaacaactaaaacagcacaaaaatctaaaaacttcattgctctattaattagcattatcatcacccaaaaaagaaaatctgcggaacagtacagcatctccaagaaaccggatcgagcgcgagcgccgcttaccgaagtgggagtaggagtcgaagtagtagtcggcgctggtcttgtcgctgccgatcacctcctcccctcctcctccctctcccccttcctcctccgccccgacggtggcggcggcggcggcggggttctcctccatgacctcgtcggggtcctcgaacctcagcctcgacgccgtcgcctccgccaggccgccgttggcgtcgctgccgctgcccttgcgctgatccatcgctgggactgggaggggtttggggtgattggctggcgcgccgcaaagcaggggaaggagaaagctagggttttggagagggagacgagggagggagagaggttttatagcatccgtggcataaatatcaagtccctcaatccactcctactaggacacaacaattaccttgatgttcatgactttaggtttgggggattattttagggttatttaattaagttttaagttgaggtttttttaccggaaatattttaatttatatttttattgcaaaattttccatttaaattcactactactaggacacaacaaaaatagcctgatgttcatgactttaggttgggggattatttcagggttatttaattaagtttcaatttgaagttttttttaccggaaatatttcaatttatgtttttattgcaaaagttttttcatttaaatattttgtttgaaaacaagaaatagtttccatttaagtatttttattgaaatatttcaatttatatttggactagaaaaatgcctgtgcgttacgacgggtgagctattttaatcttattctattgttataaggtttaattaaggtgaaatttaccgtgggaatttgtttgaaatcatgagctgtaattagattccatttaagtatttttattgaaatatttcaatttatatttggattggttttctactaaattgatgtccttaaagcttcgttttatgagattgtcgatttaatgccaatgttatcaagtaaaggtaaataaaaattcttgcattgagaacataaaatttcaagtttacaatttgtaaaatatggatttagactcctatgcatttttttaataatgttgttcctcgcaaattttataatataataataacagtgaacacaaaaataaattgtatcgcactctaataaataaataaatcatcaacaatacatgaatatcttaaaaaggaaatttgaaccctaaatatttcatttgtaaattaatttctattctattcaaaaggcccaggttttcaaaaaagcaaatatagagctttccccttcgcctccgcgccgccgccgcctctgtccgttccgccgtggtttgcgccgcccgtccgccgccgccggcggccgtactccgtgtagcctactcgtcgctgctcgagctgaaagcccagggtcagggagggtggtgcccacagctacgcacaaacaatggagggcaaagagaccaagaacaccgtcgctgccgctgcctcctcctcccctctcttctccttctccaactccaacgcttccttcggcttcggcttcggcttcagcgcgtcatccggacctcctccgccgccgccgccgccagccgtcgaggtgctcctctccgaggtatatctcgcccgctttcctttttttttcttcttcttcttcttcttcttttgtgggcttatcctactacgtatttaccgggttactttgatgcgagattcggtcgtttcttggttgaattgcaggaatcgcccgtcgcggccggcgaattggagcctgtggtgattgatgactccctgtcgatttacaaggtgcgtctgcagaaatgcttacattgtgtttgtggaaatgcctctgtggccgcggcaagactctgcagtgctactgattctattaggctgctaatagttatctagtatcttagaatgataaatgcaattattactttactaaccatacaactcatgctgtcgagaatgttctgtttatcattgaacatcgcgcgttgggactgctgctgagtgagaaaattatgagattattatagctgtccatcatgttcagtatatgcttcaccaatggaaacaataacagaggaaaccggatgtaatcatgtaaacattgaggaatattcttatcctccctcccctctgcctaaaaccaaacaaaaatgaagaacatttgttagcactgaaatggttctctcagctatttgttgaatcctcccttggtaagtcatatgctcagagcgcatggtgacattccacacacccacgtttggtgcaaacataatgttcactcggtcatcgctgttccaataacttctagggaacttacaataaatttctctagttgttctgctgcatgctacaggtcattgttacatcctcccacaaattcaacttaatctatcttttttgccttactgttttaggggagagcaagtacttctgatgtttttggagtcaaaaactctgatttagtcccagggaaatatgaaggtcaggactgaatacattttgatccttgtaacgtatttcttactgtttgtctttgtaagcttggaaatatatgtgtgcactaggtgggttgaagctctgggaaggttcactagacttggtgaagactttaaactcagacatcaaagaagaccgattgcttttagaaggcaaacgtgtattggaggtgagatacttcacgcctaaaaatattttgagtagaactgtgttgtgttttgatagttaaagtaataacaaaagaaataagactttacaagagtcataacagaataaggtatatccagaatgagttttttctttttggaaagcgaggtatgtccacaaccacattgactctttaagaaaaagctttatcacattctattttccacttgctttttcaactgtttatgttgaagtcactaataccaggttttcgaggttcaatctctctcgatagttagtaacagcctgtagtggaatatctaaataattaagtccttcagtttgatacaagtagctgtaatctcagaagatgtacccaacttgctgcttacagttatccatctctgtgattctgtagctaggatgtggacatggcctccctggtatctatgctattcttaaggtatttatctatattcccctgtgaaattttgtaaatgactccttaactctattgatttctcaaaagctaaaactatcagggtgctgttctagtccacttccaagatttcaatgctgaggtccttagatgccttaccataccaaatgtaaaggctaatctattgaaggaatcatctgaagaaaagtttacatctggtagtgttggtttctttgctggtgactggagcgaaattgacagtctgcttcttcgtggagatgctgacctggataaatcaaccaacagtcatgaaaacgatacagcgtataatggctatgatatcatccttatggctgagactgtctatgcagtatcttccctccctaatctctacaggctcatcaagaaggtcagcatccacaacattcattttgctgatatttttcttttcacttgaatttttcatgtttattatagtttacttaccaaaaatactttgcagtgcctgcgctaccctggaggtatagtttacatggcgggtaaaaagcattacttcggagtaggtggtggcacaaggcactttgttcgcttggttacagaagatggtaaatttatttctagttttttagtcattgagttatttatccatgtacctccataatattactcctgatgacatgcttgtttgcaaactttgaattagcaagattggagcaatacctactttttatgttgcatgaatgttaaacattttcctctgtgaaacactaaatgttatttcttttaagcttatataccaagatagcgtccattgtatgagttatgtttttgtttctttaaaggcagacatcagttgcagatgttttaaatgaatgaatttagcactctttttgaggatatgtgcattgaactatgcatatgcatatgcttaacatatcacatgccaaagctatagactagttattaacgcattgtgctaaaattcaaaatttttttggatactttatgtgtgtattacagttgcatgtcatttggtatttatgcagattttcactgttattttgttgtcatttaggggccatgcagtccgacctacttgctgaagttgctgatggatcatcgaatgttcgggaggtttggaaattatcgttcaaatagactagtattctgcttgtgatcgttgaagaaaccacaaacatgtactggctccatattggtcgagtggaagccttagtttaggtgtttcttgttctattaatgtactgggtcagttctgagataattgctacctcttttcagaggtcttatattgaatacaggaacatccttttactctttgaaaaactcatctaagtaagttttactgagatcttgatagttaccactggattgcatctcttccacttatccccttctctctgtcattatgaggtttacatcgtcttctcttgtactctcatatttgctctgacaaagctaacacttttttaattactctttgcaaagattctgtgtaattccaatggcagacagaactgattcactgacaactgacacagtgacaagtcagcagattaaggaacaagaaacaaaactgtacccccgaaaacatcaccttccttatttccagatgaaatcattcatgccatgctgtcatgcaatgcagccaggaaatttctccagtaattacaagatggggatgttctccgacaaatgataagggagcagctgtgaatgcatgaggaagggacatggatgtgaaaggtcaggggtagtcccatgtggcataaggaatcaaacattagagcaatccttgtccttttcttcatgtttcattgttgctaatgtttgtaccacattggggtcattccatgtgcaccatactgttcatccctccatatgatctgcattcatcttgcagtgttatatatatctttgtctgtcagctaaactcaccttgagcttacaatgatgggcttgcaggaatccagcatcggtggtcggacggccagcttcttccactaccagaggctggaatgccgggatgacggtggcccgccgcggccat

SEQ ID NO: 15087 - DNA, 578 bp, Oryza sativa
gttgatatcgccttaaatcatctggagataggttcattatatgtttatgaatcgaagaagggaaaggtaccttagtagcaaatcttgaccaatttgaaagtcatcagcccttgttttcccccttgctcgtgtaccagctaaagcctcgctggaaatgtttaagtatttccgatgaaataattgctctggctattcagaatatttgcataaaatgaacattagttagaacttaggtcattgttatttaacatgagaaggccaaaataagaaaaaacatccaagttcatgtaaatatagtaagagatattctaataaatcatttggagtaaaatcgatacaagagatcacacagaagatgtgatgaaggaatttgtttttcagaatagaattgacatacactatttccaacaaatgcaggagcatcaggtggctgtatacagaactgataagcattttggccctcaacctgtatattcagtgtcagaaagatctaattgttttaacagcaatacaagagatgcaatatacctttaaacatgccaacagttcaacaaggtcaatgcaggtttcagtaatat

SEQ ID NO: 15088 - DNA, 521 bp, Oryza sativa
actatagggcgaattcgagctcggtacccctgccagcgagttgcagcggcggcgtcggcagcgtcgcgcgcagtggggagggaggcggaggccggcgcgcagcgcggggagaaaggggagccgggcctggcggtggaggtggtggcggcggcgtctgcatcggcgcgcaaggagggaggcggaggccggcatcgacgaagggagggaggggagccgggcctggcgacggagacggcggcggcggcatctgcatcggtgcataaggagggaggtggaggccggcgccggcgaaaggagggagggaagccgggcctggcggcggtggcggcggcgtctgtatcagcacgcaaagagggaggcggaggctggcgccggcgaaaggagggaggggagccgggcctggcggcggcggcgtctgcatctgcgtgcggggagggaggcggagaccggtgccggcgaaaggagggaggggagccgggcctggcggcggcggctctcggtggcatcggcgtctgccgagg

SEQ ID NO: 15089 - DNA, 522 bp, Oryza sativa
ccgttgccgtcgccgtgggccttcgccaccgcctccgagcccctttaaaaggatccccgtgctcttctcttctcgccgccaccctcgccttcgcttctcgtcgccggagtcgtcctagcgccgtgcgccctagcttcgctgtcgccgccgccgctccagccgtgcgccgtcgccgtcactcgggaaggccgccgtcgtcatcgccaagtcgccgccgtcctcgtccgccccttcgctgccgtcggagaccgccggagcatcgtcgccgtcgtcaagccgaaggtagccgccgcttcctcctcgtcgccgtcgccgtctgttggtcgtccgccgtcgccttggtcgtcggtgagttcgccgtgccgtccgctacccgttggtgtcctccgtttgcgtcctagtgccgccgttcgccggcgagtgtccgccgcccgagccgtcttctttgccgagccgccgccgccgtcggtgacgtcatcgctggcgtcatcaagcccctctcccgtgagccgccgtggactc

SEQ ID NO: 15090 - DNA, 2644 bp, Oryza sativa
cgtcttttaatatttcttttttttaattccgaattttctataaattgtatttctatatagactctatgctcttcttctaatattatttatttttatttctgaattttcatattatattttatatacgtgttagttattaattatttttaatatcaaatgtttagttatttgtaaattatatatattcctatatgaactctagactcatcttttaatatttttttaatttcgaatgttctgtaaattgtatttctatataaactctatgctcttcttctaatattatttatttttatttctgaaattttattatttctaattgtatttctatgtggactctaaactcatctttcaatattctttaatttttaatttcgaatttcagctacttctaaattgtattcctatattgaccttaaactcttcttcccatgtttttttttatttcgaattttagttatttgtaaattatatttttatacagactctaaactctacttttaattttattatgtttattccaaattttagttagttttaaattcctatatggactctgtcggtgacatgggaccgggagtatcatgactagaggcttgggcagccgcggtcacccacgtggcctgaccccctcgggggggtcgggcccgggggagacgtgccaccccctcctctgtctccccgaggggtcgggccgctcctggtttcggcccgagggctggggcgccccgaccccctgtggtattggcgccacgtgtgtgggttaggtgggcacagcggcttctcaccaaacccaatttattgcggaatggacaagcgcgcccacgcccatttaatgcagcacggcgcacgcatatccggtccgtgaccggtcgcagtgtgtgaccggtcacagaccggtcagatcgcggagtaagtggcaggcggcggcctgtcacacgcctggccccgtcccgtcggaatgatgagagcctcttggcactcgtccctagctggagccggcgtggtacctcctggagttagcacgtcagtcccggctcgattcatgccaggcttcatcgcaaccattgcaaggaagtcactgtatgaagaagggcagatgtgcggcatgctaaactgacgcgtggtggagaagaatgaccggtctgtgactggactgacgccggtcacgtcatcggcagacaaccgtgctcccacgttgcatctgtttccggcggagtggaggtaggtatgacccatcccatcggagggtcattcagacagcggccattgcagatctccgcccattaatgaagagatgacagggtgatcccctgtgtccgacgagtgacggcgctgggcatcactcaaggacaagcggtgatttagcttccaggcgaaggcgcgagtcaagatttggtcaagatagggtgggtccccacccaaaagaagagtaggtagaagtggtgcatgtggtatccccttgagatataaaaggaggaccttgcccacaaaggaagggggacgactctgagaagactggagcttggaggggagatcgagagaaaaaagaaccagaagagaaggaaaaagaggggttctagagcttgaactctcttgctctccggctctctgtaactctttctcacacatatccaccagaacacaggagtagggtattacgcttctcagcggcccgaacctgtctacatcgcccgtgtctcgtgcgtttgctctctcgcgtacattccacagatcgagggtgaagaacctcactcagcgcccccggccgaaccggcaaaggggggcctgcgcggtctcccggtgaggagccccacgctccgtcagactctatactctacttctaatattccttatttttttaatttcgaatttctattttttttcttaattgtatttctatatggactctatactctacttctattttcaattccaaattttagttatttcctaattgtatttctatatggactctatactctacttctaatattccttatttttaattccgaatttcaattattttctaattatatttctatatggactctatactctacttctaatatttcttatttttaattctgaatttcagttatttcctaattgtatttctatatggactctagtctcctcttctaatattccttattttttaattccgaattttagctatttctaaattgtatttctatatagactctgttttttctttttcagttatttcctaattgtatttctatatagactctagtctcctcttctaatattccttatttttaattccgaatttcagttatttcctaaatgtatttctatatggactctagtctcctattctaatattctttattttttagttccgaattttagctatttctaaattgtatttctatatggactctgttttttctttttctccgattaatgtgagaatttctaggccatgagagcgaacgtggaggctcctttttctatggactctattctcctcttctaatattcctttttttttaattccgaatttcagttatttcctaattgtatttctatatggactctagtctcctcttctaatattccttatttttaattccgaatttcagttatttcctaattgtatttctatatggactctagt

SEQ ID NO: 15091 - DNA, 4627 bp, Oryza sativa
ctagcatgacgtaccccttcgctagttcgctgtatccaatttctggactttatctcgcagcagtagattttacttctaccagcttattgagccgatcagtcttgcaatccatcttaattaccactcgtttttggacaaaaggcaagcgacttcccagcataaaccaagcttagttgctgttcaagccggattagcagatactctgcgtctcctcccgaagtgttgttggggatggaaccttgccacctaccgctgcactgcgggtttggtgtgctacctgcagtacggtcaccatttcgtcacatctgcatagaccggatgctagcttggagtagctaggaactactacgctgcatcttcccgtcagtagaatttgctttcgttggataatggcgtaacgctctttgacggtgtatatccatttgcgaatagagaccaaactaaaaaaaaaaatattggcataatgctctgctcgggctggtgggtggtatggcagccactttcctatgcacagtgtgcatgtagccgtgagagtatacctaatgatgattgcttttatgctttggtgaatataaccaacttaattacctacttggaaatgacagaccgaaagaaacgtgcgaaagctaaagagaggaacatatacgtttatgtctaattcgccacacacaaggaaaaacggaagaaaaaaacaaatgctaacaaggagtaggattgatgggaggtggtagctagactgaattagtttaagacgtacgcaaccatctctatgatcgatcagcgttgaacatttgactactcgtatatataaagctaccgggcgtatgatttcctcgtgtagtagttagttattctcgcattcgttttttcctcgtgctatatgcacaatctttggatgcattcaaaacattctgattgtgactttctccatataccaatgggctcatgcttatggcgtaacattaaacttttcgccggtttttattcttgttctggtggtcagccggtttcttggaaagaggaaattgatcgtagtttcaaagtctcctatacgactcgtccagttggggatgaaacaatctacaaatcaaacactagcagagacgtacgcagaatttttttttccactggcagcaccatttttctttgacccgaggtagaaatcttcaggtctaccacatcatgattagatttcaaccaaccagtgctccaattcggatacccattttaacattgcgccactaattagtcagctttgtgttgcttagttgagccatactttacgcgttctgatccttcacatcagctaacaaatccaatccttcccctgaaccaaaatctttcagtactgctcccttcaattccctagcaagaaagcagagaacctttcgacaaacaaatagtgttgatactaattataagtgggtgctggacttctgatagcttcgtttcaacagtctacacccaagggccattaggaaaatttatctgatgatagcttagctccaatcttaatctggaacaacatgtctggtccattaggcctccactggaatagaggaatatcacgggagttgaactaattcttgtgaaaatcctgtagaagtcatgcctttatctttatgctatcactaccattctctaagtcatcgcggataagaaaccatgggcaagaaaattttcagaatatcaaaaagataaaatcctctctccggtttcccagccagctacgaatagttggaaacacacctgctgcttggctatgcttataatagtggaacatgattcatatttctggttttcaaatggagtcaggtgagaaggatggaacgagattattgataaagtaccgttccaaaaacgttcttatccttatcggacaattatcaatgatagataacagaaagtaaaatcacacggcatcatcgctattattttattaaagcaacatggcttctttttttttgtgagtattcatgcaaccatcgtaatcttgacgtgtaataatttggcttattgctatttgctacatcgcagaggacctggacaagctgagggagatggagatgttcggcgaggacggccgggacggcgtgtggacggtgatggcgaacgtgacggaccccgagagcctgcaccgggcgttcgacggatgcgccggcgtgtttcacacctcggcgttcgtggatccggggggcatgtccggctacacggtgagtgcaccaaactcggtccctaaccttaagatcctcgcaactactacacctacctatgttatgtgttccctaatgctgtcacagaagtcactaagtaagttagttatgtgttccctaatgctgtcatatagaagtcactaaataagttaggttagtaaaatatagaaaaaatcatgcaaacaaaacagagtgaacttgaagagaatggcggaaaacagagtatatatgctccatctaacattctaactcaaggcgcaactgaacatcaaagattgatgttgaatgtttggtgtactataaaaagagcaatattatttatggtcgttaagaaggtatcaagaagtactacaattttactagaagacactaaattttacaattaaaaaaagatacctcctgatacaccataaaataactcgtaaaaggaacattgcgattttctttgtggtgatgtggtggggacccagtaacagtctgaacttctggaaatcaagcaattaattgacacataacggcgttcgggaatttttgaagccaatggacatagatcattttcgtaattaatggcatgcacatcacagagcctcagacatctggcccagagaaatttgtacagttgagctgtagagtttgcatctacatgtacatggcctttggtactgcacgtggaggcactcatgcctcaaaattcagaaagattttgtaagaccgagtgacgagactctgtagttcgtgtaccacacggggaagattctgctcattcttggcttctcctcccaagagacaccaaatagtttatggtacccgttatctagaaacgttgggcgctgcggtgtccatcacagatgttaacggttataccttccatggttacttaaaaactgagaccttgctgattgtcgattccattggtcgtacagtagtatcaagatttcaaaaatgacaaaccagtactattgactgatgtgaagagcggcagatgccataaaactagccttatttcgagcagacttaataaaaaaagggtttatagaaaaaggctcaatcaccaactcgtaccttcaaggattattttgtttacgagccaatgtcttgtttgttgccaaaggcagggtgggagaggatcttgaggctggacagtcctccttgtcgccctttcgttgacattttgccaaacctgaagtcctcctgatgggagcaggttgtaactggtagtcctgcctatgcagatggtcttgcacctatctgatccatgaagtagagcttccggagcacagcattggtgggcgcacgcctgtcaactccgtcacctaattcattgacagaaaatcgcttgtccatagcaggggaccgggtttattatctgataagaacgggtaatcaggtaggattagtatctgagtgtgatgagagtccgcattgcagcaagagttggacaatacaaccaccgaatccacttcggttgggtacttccaagcagccgtcagaatcatgacgaccttagtgtaaccaaggcgattaaagaacagagatgccatccagttgcgtcctactctgcaacaatatatactccctctcttttagatttattaacatatatataaatataggcaatattataaaatcttatattgtgaaatgcacaatagagggagtatgctagtaataggctttattttactgttcttgaatacctttattttttttaccattcttgttccacacaatataacctctttttaatggaagaaatttgctgcaatttggaggaaatgaactggttcaatgaaaatcctgtaaaatttatgcgtttcaaagtagccctacgttcgattttgctatatatttgtcgacaaattttcccctaaaaatttaacagatgtaattacagtacaatcgtagtgtaattacactataacttgcatgtaattacactgtaactatagtgtaacttgtatgtaactttcaaaaatctctccgtaatatgttatttcgataaaatggaggtcgtgggaacaaattctttcacatatgtgtgtactatgatttgttttcttcctcaccaaaacaaatcttgtaatagatctaacaattcaaaattatgtgaaacttacatataagttacactgtagttacatgcaagttacagtgtaattacatatatgttacagtgtaattacattatgattgtattataattacatctgtcaaatttttaggagaaaatttgtcaacaaatgtataggtagtcccccctacgtttggtatctcaatcacactagtgtttatcatttatctgcagtaagagcctattgtagctaaaataaaccttaccaaattttggtattgccaaaattttggcaagatgacaatattgcgaaaattttggcaggatatcttatgtatttact

SEQ ID NO: 15092 - DNA, 646 bp, Oryza sativa
cttgatcatagtccaagaaggatgtagtacagcaatgtgattggaagagctattagcatgccaaaaattaccctgtaaaaagtgacaatttgcccagaataaatataaacaccatccaaacaaaaatatcagcaagcaaaacaagcaaaggaaattgcttacgctgtgctcaggatggccgggtggacattgtattcttttgcaaaaacaaaaggcacaatcccttgtggtagagccgcctatcaaatcgaattcccagatatatatatcaatgagcattagcttcacatatactagtagtatataatgcacagggaaataaattgctcgaatgattgatactactccagtaagtactacctccgtcccatattacttgtctttttgagtttttttatcaatgtttgatcattcgtcttattcaaaaaattttgaaattattatttattttgtttgtcatttgctttattatcaaaagtactttacatatgacttatcttttttttatatttgcactgatttttcaaataaaatgaatggtcaaacgttgcaaataaaaagtcaaaaacgtcacctattatgggacggagggagtacatatgttccagtaaagaagctgatggaatcatatatacggagggcctgt

SEQ ID NO: 15093 - DNA, 588 bp, Oryza sativa
cgcgggcgggcgggaggtagattacaacgccggccggaacggacgccggacgacagcgccgagcggcgaagcgaaccacggtgatacgggcacagcgagcacaccgggcagttgcacgtgacaagggaagccgagccaacggcttggattcgccggaggttgctcgacggcggcggattgcggcgccggcaaccggcggcgggagaagagggaaacggcgacgaggtcacgagaggtcgattcccgccggtgagagcatctacgcggcttcgggaactcgacgctagcgtcggattgggcggaactacgccgagcgagaccggcgacgagcgggtgctacggagctcgggcggcgacggcggcgagcacacggcaagtgacggcaacggtcggggcggcgccggctaactacggggaggctactcaagctactaccgaaagctagggggaggagatggagcgaggaggaagaacggagagaggcactaccgaggtgaggaggggcgctgtgacgagaggccgacggcgcgggagtgatctctccggcctcgggccgaggaaaaggaagaagagggcgcggccgaagtc

SEQ ID NO: 15094 - DNA, 538 bp, Oryza sativa
aaagaaattcgagtagcgcgttgaaaagtaggacctgcattctttaacccaaaaggcattgaagtataacaataggttcctacaggggtaatgaacgcagttttttcctcatcctccctagccatgcgaatctgatggtaaccagagtatgcatctagaaaacacaaaaggtcgcaccccgcggtggagtcgacaatctgatctatgcgaggcagggggtaaggatccttaggacatgccttgttaaggtcggtgtagtcgatgcacatccgaagcttgccgttcgccttgggaacgaccaccgggttcgccagccactccggatggatgacctcacggatgaatccggcctccagaagtctcgccacctcctcgcggatgaaggcttgacgttccggggcctggcgccgcactttctgccggaccggccttgcgctcggccgtacggcgagacggtgctcaatcacctccctggggaccccgggcatatccgccggtctccatgcgaagacgtcagcgtttgcccgcaggaaggaga

SEQ ID NO: 15095 - DNA, 626 bp, Oryza sativa
tactaatcaaacctgaccaattcaacattgatgatgcaaacagagaccaggtttttttttcgagtgtgcattgagtaatggttttagcttcttctcttttgcaggcgcatttgtcgcagaatagcaagttcgacttccacaaatacatcaagaggtctttggaggacgacttcaaagttgtcgttggcatcaggtccgtcctcgctttattaattataggactcttatattcaacattttttttataaagaaacatatttagtctccagttgtgtatgtgtatgtggatcttgacacatttggctggttttgcagcctccctctgtggttcgtcggaatccttgtactcttcctcgatatccacggtaatccttgtcctatttcattctgttttttactctcaaaaccttgttctgaattggtcttataatcaccatcgattttttttcaactttttccccgcgtgtaggtcttggcacacttatttggatctcttttgttcctctcatcggaagagcgaaatttccctgttcaaagaaacagttaacataattaattatgctttaatttatcatgaaaattaatatgatcatttaactaatgaacaaacattcatgtgaatgcca

SEQ ID NO: 15096 - DNA, 541 bp, Oryza sativa
ttcgcctggaagctaaatcacagcttgtccttgagtgaggcccagcgccgtcactcgcctccactccgccggaagcagatgcaacgtgagagcacggttgtctgccgatgacgtgaccggtgtcagaccagtcacaaaccggtcattcttgtccaccacgcgtcagtttagcataccacacgtctgcccttcttcatacaatgacttccttgccatggttgcgatgaagcctggaatggatctgaccgggactgacgtgccaactccaggagttaccacgccggctccggctagggacgagagccaggaagctctcatcattccgacgggacggggcgaggcgtgtgacaggccgcctgttgccacctaacccgcgatctgaccggtcggtgaccggtcacacaccgtgactggtcacggaccggataagcgtgcgctgcgccgcattaaatgcggcgtggcgcgctcgtccaacctgctataaatgcgggtaggtgagccccgctgtgctcacctaacccacacacgtggcgcccaaacc

SEQ ID NO: 15097 - DNA, 550 bp, Oryza sativa
tcggccaatagaatccttgacgaaaagccttgccaaccaaggtgcgcgaggcggaatgggctccgcactcgccttcatggatatcggcaagaagctcaacgccttgttcctgaggaatgcacttcaggaggattccgttagccgcgcgccgatagagggtcccttctaccagcacgtagcgtttggaaatgcgttggacgcgttcactcccttcgcggtcctcaggtagagtcttatctgtgaggtatgcttggatctcggagatgcaagcaatcaatctaagggagcttggagcgctcccttcgggtcccgaggcctggactccgacgggcctcgggggccggtcaggcacacccgtctcccctaaggggtcaggtcgcgccgacggctgggtaagcctttcttcaaaggcgcccggtggggtctgggctcgcgaagacgcgagccgtgagagttcgtcggcaatcatgttatcccgtctgggcacatgccgaagctctatcccgtcaaaatggcgttccatacgccgcacttggcgtacgtaagcgtc

SEQ ID NO: 15098 - DNA, 7176 bp, Oryza sativa
atgccatccttccacgaactctgcttcttgaagcacacttgtgatcatatttgtttatttggacctgcaaaagcaaacaatattagcaactatgcaaaagttactccaatctgaattcagcaagcaaggtgtcaaattgcaaaggtaatttaaatggttagtataataccctgacactcttattaggttgggtctttgctctaattatccatgggcaaccaattgcatggcatttccctctaaacctttctttgtcagacttttcagtctctagttcaaactcatgaacaatggcatattgcttcactgccattctgaactcatccatagaagggtaaaatgtccccactgacatatctgggtcatccctgtcccaatccaacacatcaatgggtacttcatcgtccactacaatggctgcatctaacatgtcttgctgaatctcggttggaataataggaattgcagtttcttccatagctgctgcagcagctgctgctctctgatctgctgctttgaagcccatggcctcaaaaacttgatcctcatccaacaataaattaacatcacaatcttgctcaggttcaacaagtatagccaacttactccaatctacaacagcattagcctcttctgcattttgtggatggctagaggtatcacccgtcccttcttcatgaccaggagaagaaacttcagcactaatcatagcagagagaacttgagcacttgactgatcaattggatctgcagttaccacaccagagacaccttgaatagctgaatcaactggatttgcaatgccttcaataggttcatatccctttttataaataacttcaacaccaaactctaccagcttatcatccaacatagaattcatccactggccaaattcttcattggttgtcaacttacattcagtgccaatttcagtgtccaaaccccaaactctaatttcttggcttggcccccagattatcttgctagccatttcatcatgaaatttatccaaattatacccactgctaatatcaacccaccaatcatagtcttgctctgacattggtagcattccatactctagattcgcaacatacttagcaaccctaacaagaaatctaagcgcattgccaggatcaatcctgacataaacagattcataaaaaaaatggagttagaacacatctaactccatgcatgcaacacaatacaagcagggagggcaagagagaaaatgaacttaccaagaaggacaaactgagggcttcatcgccgccggaggacgatggcgacgatgccctaccaggtcacgatgtgctgttggggaagaacaaatgccgggatgatgccggagctgcggatctgacaaatgcgtcgacggcggactgcgggtggagaacgtcaggaccggcgtggggcggtgagccggcgggccgggcggcgcgtcgacggcccggggccgacgctgggcgagcaggggccgatggcgcgggacgggcgtcgatgtcgcgcgccgggccggcgtcgacggcgcggggccgacgcggggcgggcaggggtcaacggcgcgtcgcccgtcgatggtggctggcggtcgaacggaatcgggagagagaggatcccctgatttagggtttcagatgcaggggtatactagtcatttcatgtgcccattccacgctagcaagcccatgtggcggtgtacaatgcgaaaagtggcaaaaaattagaaaagcttctctctccaatggcatatagttaactgcaaacctaaaaggggtatttgaacaattggcaaacgtaaaagtggcaaatagttaaattccccatttgattctggaattgaagtttcttctttgccgggatcacatacagactgtttttgtccttagaggcagatgcagcagttattggttggcccagatttggggagtgaacccttgccagttgagccagctgaaccctggaaggctgaatattggcattttctgctaaaggcaatccatccaggtgctgaggtatattttgctgctgtactactgcactcttgcccttggcttgttctacatccttctgcatagtattgggttggatgcttttttgactaaaaaggctcgggcccacaagagcaaatctgccatcttgcaaagcactattcacctgtcctatcatattgactttggagcctccttcttgtgaagaacaagttctagcaccaggacttgcaaaatgctgccgaaatttagcaaccagagaatttttgttttccttctctatatccaccattgctgctggaggcaaataggaaagctgtgtaatccattttccatatctatcatctaactgcacttggtcatcagctttctattgtattataattctttgcttaatgggacaagtctgagaattgtgaaacatgagaccacagaaggtgcaaatgcgatgaattctctcataatgaacaaaaaccttgagaggttctctgatgtcaatatcaagattcactatagcttgaactggcttagagacatccatcttaactctaacactcatgaacctaggatctttcttgagattctcttccacaatggggttagcagcagagggttcaccaatttccttaaccactttcctagcagtatcttctgtcctaagagccattgggattccataaaatctaactgtgaccatgatggatttaaaggtgtaagcagaaagaggtttgagtttttcattagctgtagcccattccatcaagaaagtgtcactcccaaaagaccaaggttgtttattccaaacccaagaaagatcttcccaagtacgaaaatgagccataaacaaattggaatccacttgagagatgtccaaaaaacaacttccccataccttttgcagtgcttttttgagaggctgcagaggtatatccctgatctgtccaccagagtatccaaccttcagcagcatgttgtgatttgcctccatttgagcaacttcaggagaatacttgagccgaacagtggcttccttcggcggagtgagacacaattcttgtaaggacgcagcaatatggggaaggggatgatgaggacataactagctcggatataaccatgactaccttatgtattaatcaaataaaggtgcatatattctacattagatttacttgttatatatttgaacaaacgttgctacacaatgagtttcgtgtgtttttgttcgcagaggtacttgcttgggcgaaagaaaagagtccgagcgtaaggaaagcatagatgattgaagaagttgattgaggaccaaaccaagaccttctccaagttttctttcatctcaccacgtcacttttggtccatagaagacaagagataaagatctacacatttggattcggattcgggcctcctgacagcatcatcttcaaacggacctagccggtgatctagaaggaactttggggcccataagttcttgttggaaagcttatggagtctactttcagatggttttggtcccatattaaaattcctaccgatctgccgggaatctgcaaaacaagccaagtttctcaaccagtccaaatctgatttgggttttgggccttgtaattgtgtcgtgggcttagcccaagggggtgtgcgccctagggcaaccctaggatgtccctaatcacatttattcagtagccgtcatcgtttagagttgggttttgcttagattattctgtcaagaacaatttcgccactagatcggtttgtggaaccccaaattcgagtgattaatcattcatatgcaatttggttgcaatctatcttgttcttgcttgtgttctttgattcgcatgcagggattagccttctcggcgaggtcaaccgggttttggcacggttgataaccagaggagatgtggtgctgcgattgcggggctcagtagcgtgttcgttcagaagccggatcgagttgtgtcgcgactccgcccaaatcgattgtttatcaatacctatcggaagatcgagacctacatccctcatcagttggtatcagagcgccgttgcccattaggtaatttatcttcctataaccagaaaattgccacacaaaaatatttattctttacctagacaatttgagccgtttcattgttctattagattttgctttgttgaattcgagtgctggtttagttttaaatttaatttttagttttgagtattgcatctgttcatcacttaggtctagggttcatcactcaagagtgtgagttgtacgtcagttttaggtccagtttttcatctcgtcggttgttgccgggaccttgaaaaattgaattgtctcgtcgtcgggtttccctttttgtgatttggtgaaatttttatcaaacggttttggagtggttatactgagcgcgcgttactgtgtgcatgaggggagtactgtgcgcgtgaggagagactccgggtcagatcagatctatccatgactgtccgtattttcctctttatagaattgttaagtagtggatttgagatatttttataaaaatggaaccaacatgatatgagcaatccatttttgagatgatccaattttagttttgcactttgcgtttgagtccctgtaatattcatatttacatttgagtccctattcgaggtcagtggtcagtttctgttgaaaaaaaaacataagaaaaaaaagaaaagggcagaaagctgcaaagaaaaagaaagaaaaaaggcgcaccaaaaaaaagaaaaaaaaggtagaaaggtgcttagaaaaaagccgcaccaagaaaaaagaaagagaaaaaaagaaaaatcattcatcctttgagtatgttttgagagtgcagagttgtgcattgattcgtatcaagtccttagtgtggtcgggtgcttgcttgagctagagttgagtctaggctaggccagcacattgactagtactttgaactattattcaactttgcattttctgattagcacaattgcattcctttgctactatatattgtgcctcccaagttccacatatatacttctggtcagcaccgctttgatccttgtaatcgccacatcacgtctttcaaggtgtcacgaaccagccaccggttgtaccgtccttagcattgctggtaagacacttgtaagagcttggtaaggtgctccatttggccgagttgttgaggggcaccactacaccgcgtagcagattattagggataaccttcattgtttgctgttgtctttgtgtttgcaatgacaggtatgagtggcgctcaaaatcagcgataccaacaaggtgcacgtgctaacagtacttgggtgcaacaagtgctaagttctcaaatggagaaagcagagcaatggcagtatcacgaattatttgaaacaaagtttgtggttaaggatagagcatgtcgtactataatcgatagtgagagttgtaataacttggtgagttcatatttagttgagaaacttgagttgcttacacaaccgcatcctcatccatattacatcaaatggttcaactcttgtggtaagttcaagataaatagaattgtgagaataaacttttcgattggaaattaccatgatactaccaattttgatcttgtccctatgcaagcatgttctttgttgttaggtcaaccatgggtatatgataataatggatcgcataattttgttgctaatacatacacatttagacataatggtcggaaaatgaaattggtacccatgagttttactaaaattttagaagataatcttgaaaggatgaagaatggaatcgaggaaattttcaaagatagtattgaaaggacgaaaaatagaatcgatgatattttcagagataccaggaaagatactaatattgcgatgccttcaactaagtctgagttattacaaaatgaacgtattgttgtgcctattgctttggatactaatattttgcaggcatctgagaacaaccaaggtaatgaggaagagaaaaaagacgaagaggaagatgagaaacaaggtaatgataatagtgctacagctattcaaggtatgcatagttatgatgtgccaactatgtccactacttatgctacgttagagcaacccatagtggaaacaattgctgaaatacctttgtcacaaaacaatttgtttgatgtttcttgtgataaagaagagttgtgcgatgcttcacttatatccatgccacaactagtgaatgaacatgttagttctatagtagagccactatgtgttgaatttaaacatgttattcacattgctagcgagaatgaagagcttaaattgctatcttctttaaatacttggagatatattcaatttgatgatctttgtccactcaactgtttagagaagaaattatttgctagatttgaattgccatgcccttctgatgtgatttttcatattattggcaattatgatagtaaaggagaatataatgtgcatcgagtatatatttgttcgaatttgactatacctccttttcatgatgaaatgtgttgtctagaggaccgcatgcatataagttattttctatctagttcctctagttgtataaatgagttacaggttggtttgcaagaaggggagtgttgtggttttttgactacaaagattttaggatccaatcatatggccatcaagaaatgttccgcacaggatgctgtgatagacaaagataagtgcaatacgctccatgacaaggtgaaactgaggacggattccaatcaagaaggggaggatgatgaggacataactagctcggatataaccatgactaccttatgtattaatcaaataaaggtacatatattctatattagatttacttgttatatatttgaataaacgttgctacacaatgagtttcatgtgtttttgttcgcagaggtgcttgcttgggcgaaagaaaagagaccgagcgtaaggaaagcatagatgattgaagaagttgattggggaccaaaccaagaccttctccaagttttctttcatctcaccacgtcacttttggtccatagaagacaagagataaaggatctacacatttggattcggaattcagcctcctgacagcatcatctttaaacggacctagccgctgatctaaaaggaactttggggcccataagttctt

SEQ ID NO: 15099 - DNA, 5723 bp, Oryza sativa
tgtcatcatgggttcgcacggtaagtgtgcgaactcatgatgtgttcacggtgtttgcagggagaaaagcgaactcgcacaataatgaagtagcgagaacgatccgtagcactgtgaactcgtggagcggggatgctccctagtccccgttgagcagactcacatgtgtgtccacgatttcgcatccctaatttgcgaactcgagcgtctgccatgagttcgtatctttgctctgcaatgatggtatattttaatcaattctttcaaatgtgtgtattcctataaaaccggtgaaaaaaacatatcttcaatttgttttcataacttccatacacatttcatgttgctaaaattattaaaagaatatgtaaaattagacaaacactagtttaggggttatatgaatggtactgtaaattttagagggcacaactctttatcctcctgattttgttactataaagctatcgagtggttatgaaaggacgtgacctatatatgtacatgctctgcgattaatccaatctatcacgttgagtcattccttctcacaaccttaattaaaaacaggaacctacatagcaaatgacctttaaagctaggacaatgttttggcaaaaggtatgccactgtttttcaaccaaaggtgattgtgcccaacttctgaaaagtgaaaacattagcagagcagccgtaaacattgaaagtaagtaagtgccattagagtacatttgtgctgccctacaattgtacatgtgtgacaatctgttcctctttttgactcctgccccattcccaccaaacaacagaatgttcttccaaagcttgatccacacgcgagagcatgctggtttgtcaaggattaaacgcatcgactttcaatttgctggcgtattaattagcgaattactatttggcaaaaccccagcttgagatttagaaatgccactgttagtgttagctgttagggtagtacgtataggctggcaaatttaaatcatacgtcctctaggcaagaagcttaaattgcctctaaaactaggaaccctgttgctgcgttcaagacaaggttttaaaataccagtctcctaggccagactggttaccgaaatgtatagcacttttttaaaatgcaactgcaaaaatctaaatatgaatttgaagtgatttatctgacgatcacctggtatttttggtgatccatagttgaagcaactgcaagttctgaggctaaacacatgcccagcacgtgatgtgcaggagaatccaatgtcctgttcatctctcttgttaatgaggcagcagatcttgtcccaaccaaaacacagtggggggtggtgcactggtggccttcagtcctacatccccttcttcatttctcttgttaatggcctggcagatcttgtcttcccctacctgaaaaaactcacatttattatgcaaccaatagtagcattggccatggtgtctgttcaatctcatcgttttgcccacatctgattataaaccgtaacatttattaacgataacaatataatttatgaggtaaacttttatatacgagcatgattaggtaataggtttttgtcattttaaaccatatttttttctgggtaaaattgataaacatatagatgcatttagtttgttaccaaacattggtaatgcctaagtaatttttgcaacatcatatttagcatattttatcaaaacttggtgatgctatcaatttaccaaaattttgatattgcttaatattggaaatgttctttttgacattaatatgaatatatcttatatcttcttaggcaacaacaatatatatagcaaaagtagtccatatagatgggacccacatatatggactataattattgctttcttcacaatgtatatagatagcaactagtattaggaggagacaggaaataaagataaataacatatttattctatatgggtagcccatatgcttatgggtggcttttgctattttcttgctatggactagttccacaatgtggttaggtggctgaatgaaatattttattgcttatggactagttttagactacattgtggatgcccttagtgacttaaaagccaacgctaaataataaattataataaaaaaattcaaagtcaactactcaactctaaagttaagatttacttcatccgttttacaatgtaagttattctagcattttccacatttatattgatgttaataaatctagatgaatctagacatataacatcattgtgagaaatagtagaatgacttatattatgaaacggagagagtaaaatttaggatttggttgtgcttgataagctgaaagagcaaacgatgaagatgtgctgacagtaataaaaatgggttcacaaattttgggatggagtaaaggttacaaaaatggcttccaaatttgatcttgagcttatctgtgcagtcagtgagctgtactgaactactgatgaacagttgctgaagaacatggaatttattagtaagatggaagagaggttgctttgcttcagctcgagtgtactgcattttcctatgctggattcctttgagtacgtgtaaatttaacacgccgccatcaataggaatctggtacaaagaatgatggagcaggggcatttgaatactgtatattttattatcaacccaattcatcaagcaatttgcagcaaatttgatgcaagtctgaagaacaaaacctgaatttcatctgaaccgaacccctgcgaactcctacattcgagattccagttagaaaatttgcattctgctgtcacaaattttactaggacaagcacgaattgctcctaaaagttaattttttttatatatatcgcacgaattgttcctaaaagttagtaagaaaaagagagcaaaaagcctttccaaccatggtgtttggtgggctcagaaaggaaaaaaaccagaatacctaacattcagttaaatttcggtcaagtacagtgcaaggcagatgcacgtaacaatgtaacatcacggcaatgagctggttaatctaatcccttaactaacaaattcccaatctcacagggccccagatctctgttgccaattcaaaaaaaaaaaacagcttaaaaattcgtaatagagagtagcctctctcaccttcttcaatggcaaagcttaaatagagtgaatgggaagctagagccatggccatcatcatcatcaacgatgcatccatggctatagcctaagaggaagaggaagaggagatgatgaacccatcacacccagcccagcactaactaaccctcccttcaatccaactccacctcaatccaattccattctctcgctcgcaccaaacagctgcaccgattttgttcttttcccacttaaaaaatttggatctttttcgggtgctaaaaaccctttctttcttttttttttcttttctgtccacttcgttcgtggtggagtggatttggaccacgcgcaccaccgcaaccaatcccccttcccacgacaaatcccaatcggaagcaagaatacaagggagaaatcgatagaaatcgaccctgaattggagccatttgccaccaagaactcccccaccaggagaggaatccatcatttcttggcccactccaccaatccgaagaaagaaatcgcgagaaatccccaccagattatagcgcatcattagcggaggattagagccaagagaagagaaaaaaaggtggaagaaaagcaatggcggaggtggcgctcttccggggcccgaccaacctcgcttcacccgcaagccgctcctcctcctcctcctcctcctcctcactgcgttatttagccacctccgatggcgacgtgctcccaagaagaagcagcagcggtagcggcagcagcctgggatctacaggaagcttgggaatccaagaacggcgcgaggaagagggaggagaatcggaggaggaggaggaggagtggtcgttcttggcgctgctgctcgcgctgctgcggaagtcgctgctcgggtgcagcgcggaggacggcggcggcggcgaagggatggagatagggtggccgacggacgtgcagcacgtggcgcacgtcaccttcgataggttccatggattcctcgggctccccgtggagttcgagcccgaggtgccccgccgcgctcccagtgcgaggtctgttcatcactaggagctgaattcttcagagtttcaggccattcagtttgtagttcaggtttaattttctgtgttcaaaaagtggtaaaccttttttgtttgaattcttcagagtttcaggtcattcagtttgtagttcaggtttaattttctgtgttcaaaagtggtaaacctttttttgtgtgaattcttcagagtttcaggtcattcagtttgtagttcaggtttaattttctgtgttcaaaaaagtggtaaacctttttttgggtgtcattgtttgcatttctgctggagttttgatatgcattgttgcagaaatgttaagagtcctctaatttaaatagtgttggcttcaaacaagttgttcttaaagaagaaatttgagcctgtttcctaaatttaggttgcattggtgtttgcaaagtatggtttttgtttcggttgtggtaaaaagaaaagttatttgtttattaaaaactctgtgcgactgtgccgctttcatctgaattggtagaaagacattttttatgttttctaggtggagttttaaattctgtttgaattaagtttgtgtattatactccgtttggttttggtctttgtgttggtagactttataacctttgctgcatttgaaccgtggtagacaaaatgtgcatgtcttgatgattggggttaggcttcggaccaccactctagaaatgtagaagaagtgtgtgtgccacatttttctccatcactcattaataatggtccaatcatgtcttcagatgtactgttttttgatggcatcgcatgatttttctgtagctgcttactaccttgtaaaacttgggtggaaaaaataccttcaattataaatggtactgtaatcaaactgttgttttttctactaacaaataaggctggttggaccgttgtagtggtagtttgttgtaaatcaattagatcatgtgttagagaaaaaatttactgttatatttaccttattaaaggtatttacttagtaatagtagcatgtggtttgcctgctccttcatcctggcgtttacagcggtagtatttctttcctgttcctttaacccatcaataattgtggtcctgtttgactcataagcaagcacaccaatttaacccatcaatattcatgggctagagcttaaaaggtatgcatatgattatctttcatcaaccgaatctagtaagaaggaaaacgacacctttaattaaacaccataccagaagaaattgtcctaggagttctgttgattgacattggaatatatatataaaaaaggatcatggcatcacctgttattagaaagctatgagaaagtgtcatgtttgactaatgatacacgccatattaattggatgatccattcacatttgtactttcattttcatttgtctacatgtgtttgttttgcgttttgaacttgagttgcttgaaatattgattttttttctttgctgtcctttctgacttactcctatacatctatactaggaaaacagcagatacaataagg

SEQ ID NO: 15100 - DNA, 5242 bp, Oryza sativa
acaatgtttttatgtaccatataaattgttaaatatgtttcttaaaaatatgccttgaccttattgacaaatgctcttcagctcttgttttcatacattacgttgattctacgacaagttttgcaaacttaacctatttgcactgataatatggaattttgagcaatatcgattatgcttaatttttgtttgatttagcatccgagattgtggctgattaaaactttacttgcagtgcaagtgtctttggagtttcaacagaatcgatgcagtgctcctatgattccagaggaaacagtgtcccaacaattctcttgatgatgcaaagacgtctttatgaacaaggcggtcttcgggtatggcttgttagattttaattgattttaaaactatttaaattggttactgtttttgttttaatcagtgtctttgtttgtactttgcaggcagaaggtatttttcgcataaatgcagagaatagccaagaagagcttgtgagagaccaattaaatggtgggatcgtgccagagggtattgatgtccactgtttggcaggtctaatcaaagtaagcttctttctattattttgaattatgtgattccattgacatcaccagtatcctgatcacatgtacaatacttagatagctgttgattattgtctgtactgaactagtggaatttcacaaaaagaaaaacacctggcagagaatccagacttcctatggaacctgatcatgtcctttccatttagaaagatttttttcacaatttattatttgtcaacacatacaaaattgaggctgtgctgtcagcaatattctgttgcagaatctaatatttgcttttggaagcagttataggtgcggtcacacaaatttgataacaaaggtgtattcccaccccatatatattttcgcatgttttccaggcctggtttagggaactcccgagtggggtgctggactcaatcccacctgaacaggtgatgcaatgccagtctgaagaggactgtgctcgtgttgccaaatgccttccaccaactgaagcagccttactagactgggctgttaatttgatggctgatgttgtccaagaagagcaaataaacaagatgaatgcgcgcaatattgccatggtttttgcaccaaatatgactcaggtagtgtgttatcctattgcgatcatggtactgatatttcattaggtggattctaactgttgtcacacatgtaatgcagatggcagatcccttgactgcattgatgtatgcagtacaagtgatgaattttcttaagatgctaatacaaaaaaccctcaaggatagagaagagtctgatctggatgatttgtctcttcctcagaaggacccgtctgatgaaaatggacaccagaccaccggcctctcgcttgattctcaccctgacgaaggatccaggcgtccctctttcgtcagcgaggagccccttctgaacagtcccgtgcacagcactgaagagaaacctaataagaccaatcttgctgaaggaaaatttgcggattccagttgcccggaaaatgtagccctaacgagcatggagacagagggctctactagttgctcccaacctgctctggcagcagctgccgctgctccccgtgctacagctatgaacttacttcaaggcaaagggagccgtagcctgaatagtaggaggactagaaagggcaaggtgcagtttggaacacgtgctgctccagcatctgagaaatcaaaaggtgcgagcattgtgagcaggataaactcaaaggttgaacggatcgaagcgtggcgatgaaatcagaagttgccgcaaattgttgttgtgaagtagatgactgacccaatgtttcctgtttcctgaaaataggaccaagagctgtgtgctttgtgcattttgcattttttgatgtgcttatcatttcttgttggaccatgatcacggtgtttttagatcattttctgttgctgctaacttatgtatcttgtttatgagtactactgttgtctgagtgaatcaaacagactgttgctttccccttgtacataaatgtctccaatgcctaaaatcttagctatctgagaattgttcatggataattatgttggtacttgtgtttattctcatttcattgtgtacctctttttatctctcattcttctggaatctggttggatcaaccaactgttccagcattttcatcttgtttgcaagtactctgttctcatatgtttgaaaatttaagttctaagttttgaacattggatcctcgattccaattcacattgcgttaattcatccacttcatgtttctgaaagtatcgtaatttccctatactgaactatctgaaatgtaactctcaccatcttatccatgtccatccattgcatcatgtagctttgtcctactccctccttcacgctttgtcctaatcgtcaaaaagaacaatagtataagcaagaaacacatctattgcaatttcatccagacatccaggtacgcttcagaaagaaaattcagacagataagaggcagccgagaaatgcaaatttcagcttgctttctgcctgttcagctgtaaatgggatgaattgcactccattgttgtgacagtcacatcctttattccctgtcagttttgaaagcagctacacattccatcttcaagatcacttcacagcggtgtgattctcagtgacaagaacactactggttggggaaaatcatcgcgccattatcagatcagttcttgcaccacgtgaaattggaattgttttttgacagaacgaatggaattctgttctagtgatcttatcagagtttacatcacgggggaatatccggtgaaaaccatcgaataaaaccggacctttttcacgggtttgatggttttcactggatatttccactgcatcatggtctacaatcatatctcagtcgcacacagaagtggtaactgaagcattttttttataatacaaatattagcctctacatccaaaatacatgtgaccaagtaaactgtgtgtaaaaagggaggaaaatacctccaaggaactgacattaagaggaagaatatgtgccctatctcgagacagagagaactcagaaaattgatctagcttcttacttcatagagacataaaagcatatggatcatgcatgcaagtcacagcaagatcatggcaaacatgaggacaggtcaactcctgttccagaatcagaatagtgaagcaactgacgtgtcaagtacagataacagatttcatggggctcagagatgcctcctctagctgcattattgcacaccttttacctgctagtagcttctgaattctgatcaagcaagccaaaaagtacttatattatataagatcctgaattctgaacaccaacacttgtgcttgcagcttgctgttgcagtggcagtcatacagaagtacagaatcgagtagtagtagtagcatttgcaggcaaaatgacaggtctcctcaagtagttgctctccacttgtgagaaaatattccaattccacagccacatacatatgcctgaatctttctcagcctcttctttttctctcacaatatatatgatatatatatctctctcttcctctgaattcatcagagaattactcaaatttcttcctgccccaaaatttgtcagtcacaacacatattttatatacaaatacaaaacatttttttctgcaaattgtccatctctgacgcctcatctgaattgactgacgcctttttgaggtaaacgcagtgacacatctacttaagcactttggctgaagcttctgcggcatatcttttttgccggtgcaaagctttggttcttggccggtggcggcggcgcgcatggcggcggacggcggcgcgctgaggcggctgttcgagaagccgctgccggtgccggagaacccgacgctgctggaggcgctgtcggcgtgcaaccatgtgcaccaccgcaagaagctcgtcgacacggcctccttcaccgagatcttcggcgagctccacttccaggagaagccggtggacgtcgccgccgccgcccggttcctgccgccgccgccgccgcctgttcgcgcggcgtcgtggatcgacgtcgccgacgacaagagcaaggacggctcgtccctggacgcgctgctccggccgaagtcgtccgccgtcaagaggagcgccagcttctgcctcaagagctccgagtcgtcgctgctgctctgcaccgaggggctcgggacggaaagcacggtggacgccgacgacatggtcaaggacggcgacggcgacggcgaggccatcccccgtggcgaggaggagacggacggcgtggaggaggacgacggcgcggggagggagaagcggggcacgccgacgctggcaccgacgccgccgacgttcccgccgccgatacggtcgatcgggcgcggcgggaagccgtgcgtgtgcttccggtcgttccgggcggaggggaggttcgtgctgatggaggtggtgatcccgggaaggagctcctgcaggcgacgcgcgagggcggtcgcctcacgctgcgcttcgccaacgccgcggccgtgggcggcggcggcgaagcagacgacgatgtcaacgacgacgacgtcgatggcggcgagaccaagaatgcatgcgcagcaagagatgatatgctagctaataactgcacttgttaattaagaatttaagatggctgcaagttgcaacgaagaacttgatgcttttgaatatttgatcgacgtgtgtcaaatcgccatgcgtgaatccaagcaaacagaaaaacaagtttgtttcgaatcaaggagaagaagttcataagtggatcatttcagaccttcatggttgattcgggggagcaccggttgagtggtatggcatggactcataatttcttttagagcaatgctacacgtactaaatttttcttactaaacttttactaacaatcatctcaaccgtttgatttaagtagatggaagttacaaaaaatctagatgcactcgtagcataacacatcagtgttagtaagaatttagtaagaaaaagttagtacgtatagccttttcctttcttttaaggtgaatatgactgccaggttttgccaagcagtataaattttataaataaaaggagttatctacaaaggagccacaaagaaaattgttcttactccctccatttcgaaatgtttg

SEQ ID NO: 15101 - DNA, 628 bp, Oryza sativa
agctttctgatttacaaggactttgaagactaaccttcagataggagcagaagtaagcaaaactgggaacaaattttggaagtaatctgacacgtgtgggaaacactgatatgagctgggaaacaatgcaagctccagaactaggaagatttctcagaacccagattgcatagaactcacatggtaatttgcctgagatgtcaaatgatttaatgtcctgcccagtgacaacaaaaaggggttagctagattttgttgctgaaatactacttatttatgtgatttagtggcaaattatgtttcccgtgaagcccttcatttcgaaaagagtgccttcgattgataaaagggttgattttacagttctaaagttaatgagtagctaaaagttggaacagaatctacactttcagtgccagaacatcttggattgaatttaaaagctatctaatagaatagaagtgaatctgacgcccagaaaaagagaggtccaaactacctagaaatgaagtcttttcagatctagcaactcatctaaagtctgacattgcacacattgttggtgggtctgaaagacttttggttattctgctgcaatcagtatgttgcaacagttgactagtaggag

SEQ ID NO: 15102 - DNA, 4125 bp, Oryza sativa
tgttctgaatgttgcaagtgttcgacaggtgaaagtattattgattcttcggtaggcagcacaaaacaactgttactttgtgcctgcatccaaagcttttcagaattcagattgacttgtagctaaggcaaagatttgggcaatggatttagctttcattaaattaagctataggataacttaatcatgcagcatcaagtgtagtttgcgtcaccatctcatgaaaaaacagttatgagttaaccatgttcgtggtacgaagtttcagtggtatgtgtgtcttttccccttcaataaaaaaggttggtgatagtgttgatgttctatgcccatccatcgatatctccaggtgggttgtttataaaagttttgaaggtctctggagatattttgggagtaacttctccagcattgtctttcataaagaaaagtttcaggttgcatttttttaagtacttacctttccacctatcatgaaaatgtctattggaaagatagaattctttgtatagtggtggaaaatcacaccagcctcctcaaatcctagtaaagatttggtgcaatggcttttcgatattttggtgtttggtaccttttaaatttaaacctatgttgcaaaaattaggcaaaaggatgtgacgtaattattatggggaacccgtgtggcccaacgatgttttatatagtacttttctagagaacatatcctatacatataagcttctcgtgcacactccgtgcataccaactagcaaatatcacagaaaattttagaaaaaattggacacatgttccaatagtattacatccacgtgtgaaatattatcatcaaattcattatatttcagccataacaaaaaagacaaaattctgacaaattttcacccttaaaactgtcagatttttcactttttgttacagctaaaatataatgaatttgaatatgagactttgcagatatatgtaatactattaagagtatatgtctatttttttagtttttttgtaacatttgttaattggtgtgcacggagtgtgtacggaaagcttatgtgcatagtagaatttcccgtgacatttttctagtagtacttctacgtacttttgcatgtaagggttgttcggttactaacattgtcataaatcataactcactttagttaagtgtggcttgtcataattttttccctacaaattgtagaactatttttagaaacaacaccatttaaatgagaaattgcaaaagtagagatctgttggctaaaattgtaagtttagcacattgtcgaactttggttgtttgaaaggggttgcagggtaaaaacaacttgaaaactcatggtgcatgtgcatggcctattattgttggccactacatgcatgtgcttttaccttacatgaatgtgtaattagtccagcaacctttattgaacaatggttgttcgataggttatccgacgtgtcatgctcgtagcttcgtattgtggttgtttgatatacaccctactatcaaacaactaaatgattggtgaacaaacgattgagtatatgacaagaggggcaatgtgctaagaaagtgtggcaagtcataattgtagcaatgaaccaaacaaaaggttaaaagatgcagcagcctaaagtttggtatggtaagttgaactgttattagatggtacctaataggttattaggtgttcttataatgctttcaatgccgacatacttatggataatatcttttctagataatatcaataaatttcaaaatccatttcgtcacctaatggctaccatcgtctttttaatctataccgctgtaactgtttggttagatacgggagtaacattacccactgaaaaatccaacttagttcactaagatcaggcaagccatagaagtgaggctcattttctagaatatgaacttaatatggcctcgtcaggtagtgatgaaaataaagattaagtacatgcacgtaaaaatgagaaagccattagcacatggttaattaagttttaattatttcaaacttagaaaatagatttatctaatgctttaaagcagcttttatagagaaagtttagcaatttaaaaaatgtgttaacgaaaaataaggtaaaatatgtatcttactcagaaacgaacgggccttaacgataaatggattcacaatggagcttcaaaaacaaatcatcgtttcctaacccatttgtctataaacactttattttgggcctttccaactaaggcctgtgtggataatttcgcctctctataaatttcggcccacataacgtagttgggcctcaaccccaaatccccccaaaattctgatttcctaatcggatccgctcctcccactcccgcagcctctggtttccgcgcttagtcttcctcctcccccacctccactccgcgcgacgatccgcaggtcatctcccctccacccgcgaggattcccggagatcctgcccgctccccccgcccccctcaacccccctggagcggaggcgcgtggtggctggcgcttcccccctgcggtggttgtgctgctgtgttcgcgcgcggggcgcacgggaggtgttcgacggaatgcccagccgagagaaagagagagagagggagggaggtatgtgggtaagcgtaagcctcttcgtttccctgttttatggtttactacttgtgtttgcatgctagcgtgcggtgtctgcgcgctatttcagatggatggaactggaacatgatcttgcactgctttgaataaaacagtgatgtgatgttgagcattcggaattgagacatagaactaatttttctccgggtttctactactgttgaaatgctatttcgcttcaaagggctagtaaaaatggcaaccccattctgtagtccatcagtgttaaacccagaagctcaccaggcattagaattccctgctccttaatctgttttatatctttgttatcttgcctagtgaaaatctgtaacattttagagttcctttttcatgagaacttgcatccttttcctgatcaaatttcatgcaacaggattgaaaaaaaaaatcgaagtatggcgaatatcacatcgttgttgctgacattctcttcctaccagaggttttatcaaactctcaaattttgaaggtgaactaacaagagaaattatcatttcaggccacaacggatcctgtgctcttaacagcaggcaagcatccaaactttcctattagctgctgctttttgtgtcatcagtgcatcaaaccaagtcaattggtaaaaagttagcttgaagtataattatgaacgtatgagcagttgatttgcatggatgggcatttggtttcactaccatcctctatgccaaaggaccaaggctcttactttagcatgctctggaatttattttgctactcgtgctttctgtgacaagccgaaccacaggattgtccacaaggataaaaatcttgttagggtcgagagggatttgattgacgtgtttacactccatgaacttctgcagttatgtgcaaagaggaggtccctcttagttgggaaaagctgccatggattagccattcattttgggctggtaactgatactgtcacatgcaatattctcatcaacttgtacacaaaatgtggccagaatgattgtgctcgtcgcgtttttgatgcaatgtctgtcagaagcataatctcttggaataccatgattgctggatatactcataatagagaggatgtagaagcactgaagcttttttcaagaatgcaccgagaagggacccagatgaccgaatttaccttatccagcactctctgcgcatgtgctgcgaaatatgctattattgaatgcaaacagttacacactattgccatcaagcttgcacttgattctagcagttttgttgggactgcatttcttgatgtttatgcaaagtgtaatatgataaaggatgcctgtgggttttcgagaatatgcctgagaaaacttcagttacatggagttcattatttgcaggatttgtgcagaatggtctccatgaagaggtattgtgtttatttcagagtacacaaagggaaggaatgcaattgactgaattcactgtttcatctatcctc

SEQ ID NO: 15103 - DNA, 10351 bp, Oryza sativa
ctcatctgtttgcctttaagtttctgagacgaaactattgcaaaccaattaaagaacgctaggacagtcagagcttgcgttcttatgcaataaaaccagctacagtagcgaaataactgtgtaaatcagaacactttaatgttctatcttggtcacttcaatttcatcagagtacacatttccctaactacaaatatgtactcctacgcaagaactatcacttttttatcgcatgaaagtagaatgtgatataaagctcacatttctcagagtagcaattcacaattgtacttgtattctttcaacaactttgtgcgaaatgctggcaaactttagggtgtgtttagttcatgccaaaattgaaagtttggttaaaattagaacgatgtgacggaaaagttggaagtttatgtgtgtagaaaagttttgatgtgatggaaaagtttaaagtttgaaactaaactcggccttaactgaaaaggtaagaagaagagtcaggctcttccaagattatgatgcaatcatctttttaaccttagacatagattaccactcactggatgaagcatggaaaagttacgagtaagacatctaatgatgcatttgttgtagtatatcttactagcaacttaggctctagctaatcaatagtattatcgtcttgaaaatccagcaatttgtaacttatttctccattaactagtcaggaatctttcctacatttatcgtttctgcgccaagggataccagtattaagttggcatcgttcctcaaaatgggctacaacctttatgagctcagagccttaaaggcaggtgtaaagagggacatgtctaatctttgaccacaaaaaaatgaattaacccaggaaccagtgccatcgtggataaatgaatcccattgacataactctccagcaacaggtagaaataactctaggaaatgagcagggtacttctccctccctctccacaaatataactgttccaagcatttaaaatttgtccacaaatataagaattctagaatactacttattcatcaattatatctcatctgaatttcttcccatcctatccccaacaacaaccatctctccttcaataatggacaccaaagtcttttctcctcaatcttaaatctactaaataacttagaattacttatatatgtggacagcgggagtactctacaaacataatcaatgcattatggaacacaaacttgtaggattgaacacaagtaaccaagcctaccagagagggatgaatggtagggaaaaccaaaaacccaaaaacttttagcggaaataaaagttaccctcaaatcgatggaaatctcgacgtagtcctgtcgccgccggccggaccactcacacgccgccggttagatcatctccctgccgcctgaacccgaagaaacacaaatcgaagaactctcaaagtagatgacaactttattgcttctctctgtgttacaagtgcaccaacagcactctttacaaaaatttcgactaaactcgaaaccctaactaaactagcaactcaattgctctcgaaaacgataccgggaggctacctctccctctctgtttataccgaaaacctcctactcaaagtagcagaacaactcctaatcacactaggactctatcctcaattaccaaccaaattacaatttaccaaattgtaattctctcaaactacagccgcacgcatctcttataccagcttggtctcggtctccatcgcacgggacgacaccaactcggcctctctaccttgccctccagggcgacacggtctgtatccaaccgagccgctgcatcgctacctgtttgcacagaacgcacacacatgcatgctacagtaccgcccgtactgtagcaccatatgccagccaatcacagacacgatcaatcacacatatatgcatgctacagtacctcgccgtagtgtagcatcatatactcttcctcagttgtactctaatccccttcgcgaacaccgacgcttgcatgcatacctcgtgaagcccgttgcgaatatctctcctacacggtatccatccaccgtgtaccatctcgtatccaacttcgtcacccgatatacttaatagtctggacctcaactcctccttgagtttagtcccgatccccaccgttgactgaagttgacctccaagaatcctgactctagtcaccttctcacatggtatcccgaccgcaatagacctctgctcctccctgagcatagtcccggtcctcaccattgactaaggctgacctcaagtcacctgcacacaatcagacaaaacaaccgtttctggacacagatatcacaacctgacccacattagtcacacgcactcacaccaacatccacacatactttcaaaccaaatctttgattaaatcatttgcatagccaattgttcatcacaaatattaatcataaaaatgatttcacaaaactatttaagacaccatgtaatataacataaaaaaaaagaagaggtggtcagaagtacttctttctcataaaattttgtctcgaagatctgatttcctgaacaaagatatgttttcctttgtacaggacagtaggacacgtatagacctaaatgaacaattgaaaagtcaggcaagaaacagaggccgagtttagtttcaaaatttttcatcaaactttcaattttttcatcacataaaaacttttctacacacataaactatcaactttttcagtcacatcgttgcaatttcaaccaaaattccaaatttggcgtgaactaaacacaccagaaatgggccagaaactaatatcagaaaatgagttagacaaaatgtatttcagttttgacacatggaaaggggccatccaagtatccaagtaagatctttgctcgatacagttatacagaggcaacataacctgcaatcagcagcagtaatgcacatgaacaattgaacacagatgctgatttacctttgagttccagaacgagacagatgatgccacctctccagccatgttggcaacaacatccaatagagtaccaggaagcgcagaaaaggtgtcagggaacacacatacagacagaggcagtggtggtggtctggtggatgcctatcttgttgtcgtcccgtcccgtctcgtctcctccaggcagatatggctgagagctccagtccatgccgcgcacacgagctaggcacgcacgcggcacgctcctcgtcgtcaggcgacctggctgcaaatccaagcgggggcgtcctcttcaggtgttgttgcgagtccaatccagccgtcgcctcactctcccccactggtgcccttcggcgcggcatttcgtcaaacacctcgtcgccatgcggtgatgcatgcgcggtgcgcccgtgccgacgagcaacttggcaacaggaaacagtcctcctacgacgagtggcccagcactttcgaggcggcggcggtggacgttttctgcctcggatcagcttgcccgcaccgccgcacgccggcggccgcggcggcggcggacggttttgctcagacaaagacggtgagggtatggcccgtgggccgcctctccaccattctcccattcttgggccgtctaccgatctcctattctcccttggaataagttcaccggaggtccctcaacttaacagcgagaattttcgaggccctcaaccataaaaccagaaatctccacccctaaactatacaataccgttcactcaaggtccctaagcagtatatatgggtggtttcgctgacgtggcatcctagtcagcaaataaaaatttaaaaagtgcgtggggcctacatgtcaactgcacatattctttttcttctctttttcttttccttctcttctcttttctctcctctctccttttcttcagcgagggaggcggcggcaggcggagcagcggagggcgagcgcggcagcagagggcgagcgggcgcgagcgcggccgcgggcagagaagcgggcggcggggcgcgtcacgtcactagacgtgtccatgagcctccttgccggcgagctctcaccggccatcgccaacctcacgtagctcgagctactcatcaacctcacctccaacgccttctccgggagcatccccgatggcctcggctggctccggcggatgtggtatctcagcctatgcgacaacgcgttcgccggcaagatacctgacgtgctccgcaattgcaccgccctcgacgtcgcgtacctcaacaacaacaacctcgattgtcggcggcgttccacggtggctcgacgcgttgccgaatctcatggtgctccggctcagccacaactcgatctccggccacatcccgccatcgctggcgaacctcacgaagatcgtgcagctcgagttcgaccagaaccttctggaaagttccatccccgacggcttgccacgcctcccagcgctccgcatgttagccttgtcgcagaacagcctcaccggagagatcctgccgagtttcttcaacatgacgtcgttgcgaggcctcgcactcgcgaacaacgtgttccgcagtgagctcctagccgattgacgtgggcgtgcgcggaccagcacattcctccaagttctaaacgcagatcaaaccatacaagtgtaaaacttcatcaccgaattcgcatttctatctactccacgattcggacgtcaactagcgatagcactgtagtctgtaccacgagttcacgacccgacacctccaggctctatccctaacccgagtaacaaccaaaagaacccaccaaacctggacatctcgagcgattcccacacagatctgcgagggctagcgaatctatcgacactacataaatcagagtaagtccaaagaagcaccttgcggcggaggtgctccttggggatgccggagaccatgcttatctcgcctggcttgatctcgacgagggcgtcggacgctgccgcggagagcatccgcgcgggcgcgggagacgatgagaggagcgcctgccccagggaggggaagctccgcaggagcggggcgtccatcttgtcagagccgtacgccgaccgatgacggcggcgcctgggagttcttggacaacctgaccaactgcaacgccttggctgagatattcctcgacggcaacatgttcgccggcgtgatgttgagctccatcgtggttccatccgccattggccgattggcgacctcacgcagctactcaagctcgaccctgagtggtaactcgcagctcgttgcgcgccgcctgccgcctgccacgcccgcctcctgccctcctctcccgctttttccccacgccccgccgtgcccgcacccgcatctgcccgcctctccaaagaagagaagagaaaagagaatatgcagctgacatgtgggcccaagtactttttttaaaaaaaattgctgactaggatgccacgtcagtaaaaccgggcaaaaatactgccgagggacctccggtgaatggttttgtatagtttaggggtgaagatttctggttttgtggttaaggggccttagaaaatctcgctattaaattaagggacctccggcgaacttattccttctccctttcttgggccagtggtccattttgaaacgttaaatgtttcatccctcaaaaaagaaaaaaaataaatttcacaaactaagtataattccaccaaactattacaaaacggcaggttgatgtgttggagtatatcataatcacagattgaacattatgtgtactatgtaaaactacatatctactctctctctccctaaatataagggattctagttgtaccaaaatccttatataagagattttggttgaaagtgacaggacggagggagtataagcgtataagttagtacggattaataaagttattatttttacaaagttagaaagctatagttttattatgtttgtagttttgtaaaaataaaattggtaataaatctctagttttgtgatttttttgtttaagcaatccctccgtttgtaaatatttgacaccgtcgactttttagcacatgtttgaccgttcgttttatttaaaaacttttgtgaaatatgtaaaactatatgtatacataaaagtatatttaacaatgaatcaaatgacatgaaaagaattaataattacttaaattttttaaataagacgaacgattaaacatattttaaaaagtcaactgtatttagaaacggaggagtatatattttatttttttaaaaaaaaatacttaaaagaaagaaaggcgtctcttggtggcgtggcgggccgcgcagctgctgcactccaactctccaagagagaaggaatcgcgacttcgccgccgcggccgcaacaccgacttcgccggcggcggcggcgatgggcaacgcgcaggcttccgcctcctccaccagctccccccgcttctccatggcgtccaggtagtaccccctgggcatcgagagagccttccccgttctcgcagcagccacttcaattccccttactcgattctcccctcgcgatctcactcgctctcgctgtctcgtctcgccgcgcagggccttctcgaggcaggagctggacgacctccgcgcgctgttcgtctcgctggcggcgcagtcgcagaccggcggccgtgccatctcccgccccgtcttcctcgtgagcacaccaccacgcgtccgttaccgttgaatcgaggttctggatctgggaattccagtttacggaatctgacacgcgctgttgatcttcgctcgcaggagtatttcgggatacgtggggcgctcggggatcggctgttccagctggtggcgagggagagcggcgggggtgagggggtcaccttcgaggactttgatcgtctccaaagtgagttggtgcctttctttctcctacttctcaattcattcggtccgttttgttgttcaattaggtgttgcaagtgtgagttttagtggattggacaaatttattagggcattcttgcttgatttcttagtgctaggagctctttgcgttcaaagacaaatgtgcttcgtgccatatattgttcgaagtttagctagaatttattagagaaattcgataatttgacacttttctgttacaaatttgctttaatttacatttgtgcggatgacatgtgtgaccatctgggtgaatgaaagtggcccaggatgtcaaataattgaagcccattttaagaagtgccaaattatcaaatctctcaatttagagaattatgaactttcatctctttctttgcagttttttagctttgttgcatgcatgaaattgttagttcgacttgatatcatgtttcattaacagtgtcagtgtactagagccttggattctgtccaaaatggcaaacactacagcaatggaaattgttttgcttaaccatacttcatagggttttatctttgaaaccttctacctctatataaatttagtccatgaggtgatgtagtttatgtaattatttcttgatttatcaacacaaatgtctctacccagtgttctagcgtaaaatggatatatgccatattttttatggataccaagtgctttcaaacattttatttttattttttttcttgttaggtaatgttttctttgtacaatctaccatgtaggcaacatacgagagaggaactcgagatgaagttgatgaattcatttatcaactatgtgatgttacaggagatgaagtcttagaaaggtactgtcgactgttctcgtatagactggtcttctcatggtgtgtactgtctataaatttgttgcactcttctgatccaaattaatttatgtgacaagaatttcttctttgaagtattctatcaaatacttagatttattttgtgttaggttttattattagctcttctgtttttttatgatccgtttactcttcttctttttatgaatggtcattttacatttgcctttgctgtcctggattgccaggtctgatctggaaactatcttggcatctattcgtgaaaccatattttcagaaaataaggaagctggggaaggctcaaacaagaggacatttgaagcatttatcaactctgcagtattttcgaaggatgctgaaggagtcgcaaggaagtctatgtcgctatcagactttaggagctggtgcattctcattccatccttgaggaagttccttggaagtttgttgatgcctcctgattcaggtctgtttttccattctgtgtattccctacagcagcaatttgaaaagaagtgtctttactgcatttttaatagactcgactgcatagtctaattaatttgtatgatcaagtatgataattgtgttaatcggactagcattatgtttatctcatacacatattattcctcatttttagaatttaccctgttccaacttccaaccccactcaaatggtgagtgtagcttttgtgcagactacagatggtgtttaggggataagcctctctttcacaagtcctgcaataggaatttctacgtccctcacatgtaattatgtgtataggcaggacaaaagattagaagaaccccgagaccatagaaatcaaagagtgttaagacatcattttctcttacttctattctgtctatttctcaaacatgcattgtttccggtcatgcttggaatggacatgtactaggcctgttttagggtacatatacatctggaattacataacctgcatacttttattatcggttgagggagattaacaatggacgtgttgccaagaggtcatgcattgagacgtcacagcgcatagctaacttgacagaggcttagggatttcctgtgaacatcccaatctcacaataacaaaggaagctaaaatggatcaacattcaatctaccatccagtttagtaagtaagaaacctgtggttgattcaatattttcatgtgtacaacaaagccaagtcctgcaggtgaaatgaatatgcgagttaacatagatctttttcacttcatttggtaattgggcagtttctagtgggcatgaatgactgaatgagtctgaatggtgtcaactgggcacatggtgttggcatgattgcaccagtctgctggaacaagatggacagttggtgtagactgtaggctgcctgtagagggccttcatcttagaacattccaccgttattcaaagtgaacctttgatcaaaatcaccacaatgcttgttattcctcattgatatgatcctactgtacccttgcttgtaccttttgaaacagtgtctctattggttaatttgcatgcgatctttgattatgctatacctttttttagtgtttaagcagtctaaaacaattcttcatgaaaatatgtgaactctgaaaagaccatatctaacctggatatgtatggtgtatcatgagcatgatttgtgttattctgtaggcagaccaggcttccaagtaccagcgcttcattacctagaaaacatctccccagatttgctacttttaaataaagagtatgcttggcatattggaggtggtttttcacaacaggaggtgcaagaatggaggcttctatatcacagttctcttcatggacaaagcttcaacactttcttaggcaatgtaacgtgagtactcttaaatattggtgattccaactactctgtttgatataatatacccatttcaagactatctaattctaaataaaaactacacctacaaactaaatgtcatgataatcctttcgcttggtctatcatatctgatataccatcatgattttccagtacgtgaataatccctgggaatgtttgtcattttataggaatggagatgcacagactgttatcatcattgaagatactgatggatttgtttttggtggatacgcatcacatccttgggaaaggcacagtgatttttatggtgatatgaaaacattcctgttcaagttatatcctgaagcatccattttccgccctacaggagggaacagaaacctccaatgggtatgctctgttcaatttcatgctctcatatgtatctatgctcggcatgtcaaatttaaaggagtaaaccttatgtatttttttccagtgtgccgtgaacttcagctctgactccattccaaatggcattggctttggagggcagccgcatcacttcggttttttcctatccgcaaattttgatcaagggcactcatttacatgtaccacattcaccagtcctgccctttcaaagacaaataggttcaggccagaggtaattgaatgttggggcatacaaacgaagggggcacttgatgaaaaggcagagcttgtcaaggggac

SEQ ID NO: 15104 - DNA, 7251 bp, Oryza sativa
caagagaaaaaggggacatgacaaactccgaaacaacgaacggcataatgggcatcgatgacagcatagcctgacaatcactgcacttgcgaaagtacatgtacatctatgtatatatatgcctgtaaatagtagataacatttttggcatgtccaggatctaccatatagggctggggctaagtaaattatgtgctgggccaaattattattggaccaggagatattgatttgtccattaatttcttcttcaatgggcacacggattgtaccagtgcagggtaagctatccgactcagaaaatgaaattacgatgtacattcatcatctgcatgtagagccacagccaaaatttaaatttcaaaacttgatttttagagtaaaattcaaagtttatttttcagcgtggacttttaaaccttaaaaaaaaacttttgctcataaattactttttagtagcttagttcacttctccatggccgtaggtccagcaaattttaaaaatccgtttctacacagaatttccacagccaaaatttaaaatttaaaacttgatttttagagtaaaatttgaagtttttttatcgtagtttatttttcagcgtggacttttaaaccttaaaaataaaacttttgctcataaattatttttatagtagcttagttcacttttccattgccgtaggtccacaacaaattttaaaaatccgtttctgtacagaatttttcgaccatataataattgttcacctacagttccgaatactgtagcatatcactaatctcactaaattctcgttaaaatctcatctacgtatgtcaaatatttgtgagcgccagaatttgaaccctaatgggtgaaatcatgcaactatgattccaccacatcattgtgtttcccccgcaatcccttttcgtttgttctttccaccgaaaatatatttcaggagcacatcatgtagatctcagattaaccaataatatgacctagatctggcttgaattactatgtgatgtggggccacataattctacaatgaagatgctcgaggttcaattatgccatattcgggcaaagatcaaattactcctatttcattttgatatgttcaactaacagagcgtgaattatcaaacatatctgaatagatcacaataatttagatatctgaacatagcaaaccataattacatgtatctaaacacatctgtgttccacatgaccagcacatctcatttcgggaatacaacaaagtgtacaaaatgctgccgaatttgaaccatgcaatctcctcatgcaaaccgaaggagatatatcaacttatcatgaatcaaggaccaccaatcaggagggcataatgtgcacaagaaagctctctacagatgacatcctaaccatatttgtgaagaatttgcagtgcatgtgagattcgtgatagaaagatactttgcatattggccactttgaaagggacaacacctaagaagatcactacatgctagacctaaacatatgtacattgaccaccgatattatttgtgccagcatatcgcgtgaagttttgtattgcacaataataactcatcaaagcttagtacactagttcttctctcagaaccaacaaggccacgttatcaataaaaactcatgtagctagagccagggccacggccagcccctgagctgatcactcagtccgatctgatcagacccaactctcttcaatcatcactgaaacatgcatatgccccccattaataacaagatggacccaaacacagaactctcaaggaaaatagaacatgtatacttatgctcctttcacatgtagtctcatctaactactttacagtagacgcgtttccattatctatgtgcctgtatggcagggtccagcttcagtttcacctctcttagagttgaagccaactaaatggtttcaggttcataaaaaaaaaggagtgaagtagactagtgatctaaaaatgaactagaggagtgggttagggttcaggacgctccatagctctactccgaacttcgcttttggagttagattttggagttggagccttaacaaacatatcgtgcaactaaagcatttcatcttgccattaatcttgatataattttatgcatgatttcttcccatatgttaattcttcataatctaaccaatttatgcattattccttctgtcttcaaatacttgttacaatgggtactattcatcttcaaactgtcttatttgaaggaaatgaatagatatttagagtgtgttatatcctaaatataatcatgaactttcatacatcatgatctaaccaggggcggagctagaacgaaaagaagagagatgccactcgcttgctttactctattttagactgatataagtacatgagtttagattgagggggtgcatatatggtgaaaataattaactatagcttaaaaaaatttcttgaccgagttcttgggcaccccctctcctacctagctccgcccctagatctaaccataaaaaaatattaatggtagggagtacaattcaccccatacttgggccctgtttagttcacaccaaacttcccccaaactcccaactttccatcacatcacattacatccaaaactttcctactcacataaactttcaactttttttccaaactaccaactttccccaaacttctccccaatttcaaaaactaaacacagccttgcttcagccagagtcggggcagaatcccaaatgctcagaatgcctacctacacattgcaaaacacatgcagatgatcagatggtgggttgagtggcatgcagagtttggagcaccagcaccttccaccaccttggtccctactaattaagttccctcctctgatatatctcatccctatctccatcaataactgtacgctttattccattttttttcatctactccatgagtgacaagatgatgaggatgatcaaagcatatagatagcatcatggcaatttgcaaaacattataccggtacttccaccacactcaaaatagaacaacttctaacctttaaaatttgtttcaaaatacaacttctccacttatatacattctcttatcaatcaatcataacattttaccattaaaattctctaaatatctctctcttcaacaaatcataattttcaccaatttaatttcatcaacttttttaatagtcttgtttaaccctaaaactacttagaagtatattttaagatggaggtagcagtagtagataccagtgtggcttgcaaggacagaattgggtaaagtgcatgctaggggaccagggcccatggagggcctgcctgacaaggcgatctgcatcggcaaaagcctagctagagtccagagagagagtggaggcccacttggagatggtgacgtcaccaggcatgcacacgaggttcaggtgtcaccggacaaggggacccacctgcaggtgacgagaatcattgatcatcacgctagctagctccccgctgctgctggtccgaggcttcacccaaactacgtcactctagctctagctagatcgatcatcgatcagctcaaggaaagagatgaaagaaggggggtaatgtagcagtggttgatccgtggatcagtctgcattcaggttactgattgggcagcagcagagagagagaagcagcagtacaagaacggtgtgacgcacgtacccgatgcatgcatccagctgacaagatccaacgaggcgtgtatcgtgcatcagcatgcacagtggttagcctggtggtagtactttcttcgtttcaaaataaacaaatttaatatgaaatataacatatgctagcattgtatgttcgtagctttagaatccatcacatctcttactaggttagttcctctccaagaagaaaatccactataaaatggtactacattcgtcccaaaacaagtgcagttgtggatatccgtgtccaacgtttgaccgtccgtcttatttgaaaaatttatgaaaaaattaaaaaaattagtcacacataaagtactattcatgttttatcagtttctaataagagtcaaacgttgaacgcgaatagtgtaaaactgcacttattttaggacggatggagtagagtactactagatcggatcaacatagttagttcacacaataatatattactatatttgttttcagaagtaatatctctatctttaagtgtaacttgtttagattcgtaatagtagaatgtatataatacaatcttatgtttgacggaggaagcagtaaacaaagaagccacaagaggtaagcttatacgtaccgtagtgactgaggtggacaattaatcaccgtttccagcggcattatgcattgcaaagctgtgacgatcattcgcgcgctgtgcaaagtgtgtaccccagcagcatgcgagaaacttgatggcgttttgctccgaggtccacatgtacagtagagatcggggacctcatccatcaccttcacatcacccctgtgtgtggcccgcgcgcgtggaggagagcgctgagctaggctggaccgccggccggctagccggggacccctgcctccggctcgccggcgcggcggcacgtggacaccggcgcccggccccagccagttacagcacgcgcgcctgcaacctgcatgcctcctcctcctcgtcttcgtcgtcgacaacccgcctaacaacggcagcagcaggggaccagagagagatatatgtgagatcaattcatcaatggaggagtctagctaagcaaacataatgcagcttgattaggccccgtttgggtttgctcaagatgataaagtacggggcacgcagaaggagaaaaccactaacacgtgattaattaagtttttattattattattttaaacttgagaaatggatttgtgtgatattttaaaggaaaaagtacgaattaccccctgaacaattgtggtcggccgaattacacccctaaacttgaaaactggacattttacaccctcaattatcgaaaccggacaaataacccccctaaacactgttttgagtggttttgactagaaattacacacgtggcgccaatgtggcaatccagtcagcaaaacaaaataaaaaaactccctgagcccacttgtcggactaattcctcaacccaatcccttccgtccggctctctcttgcgcatgcgctcggacaaggaagccgtcagcggaggcggcaggcagccggcggtggaggcggacctcgcccgtgcagtgggtggtggaggcataccgagcagccggcggcggaggcgggcctcgtccgggcagcggtcggcggagacgaacccggcagcaagcggcggaggtggacctcgcctgggtagccagcggcggaggcgggcctcgcacgggcggatggtggcggaggcgaacctggcagccggcggcggatgcgggcctcgcttgggcgactggtggcggagacgaacccggcagccagcggcggaggcggacctcgcccgggcagctggtggcggaggcgaacctggcagctggcggcggaagcgggcctcgcctgggcggctggtggcggaggcgaacccgacagccgatggcggaggcgactaacgcggagctcgggctgcaggccggtgcgggacgagggtgacggcgatggggccaaggcggcggtcctgatggcaacgacgaatgggctcctcctcttatgctcttctctctctctcctcttcacgcgcgccgcggcgccggcacggcccatgtgggcgctgctccagctctcgaagatggatcattcggggtgttgtcgcagccggcgcgtcgctccacgccgactatccgccatgcatctcctacctcaccttcgccgccagattcgtcgacccccgcccctgccacgacaccgagtccgagatactcggcacggtctccaccgacatccacgccacgagcggtgacggcctcgtccttgtctgcttctgtgactcccgcaaccacgtccccaccgtcgggagccgcggcggcgagctgatgcgcgagtggtccgcgaggaggcagtcacgcgagcgggacagtgccggcgcctggtcggcctctgcctccatcgtcggccgccactgcctcaaccaccggttgccccggcgagcttctcctcagccgcctgccgcccgggcgagctccgcctccgccgtcgaccggctggtccaccttcgcctgcagagccgcctgcctgagcgtgcacgcgggagagagaaagagagcgaccggggaggcggggagagagaggggtatgaccggttgtaggatcgaaatgtcgactagagggggggtgaataggcgatttaaaactaaatgacacataatcaaaactaacctaagttgctaggcttggtgagggtgaactctaactaagcaactaagttatgttttgcaaacctagggtgatagtggctcaattatatctctaggaaagtaaatcacactcctatgtcaatgtttagcaatcctaggataatatgatctcaagtatgtctctagaaatgtaaattgcacaaatgtaaatgcgacaatcaaatgagacaaggagacgagatttttcaccgaggttcggaaactcgccggtttcctactccccgttgaggcgagcccaactctaccgctcaaccacgaagccaccgcacgcccccttcgtcaaagggtggacaaggcgggagccggcccacggagaggactacccaagcctcgatcactagggtagttcttccttcactccgaaggtggtgaactccaaaccactcacaaaccggcgccgggcctcctccacaatcttctcggagaggtcaccgggcaactcctccacaagccgtctaggaggcggcaacctccaagagtaacaagcaatgacccggcgtggagatgatcaatcaagtgccacactaactctacaatggaagcaaatgcacttgactcttggctagatcaaatctctaacacactagatggatgaacacaaagcttaagtgggtgtgagagaggtgtaaggggtgtatgcaattgaattgggtgccaagagagtccccttgctgctggtgggggagtatttatactcccacccaccaaaactagccgttgggggcgaaatcccccaatcattgtgctctgccggtctgaccggaggtatgtggccggtcagactgtgctattctgcaacggatagaaaactagcc

SEQ ID NO: 15105 - DNA, 3350 bp, Oryza sativa
ctaattgcacagattgcgactaatttgcgagatgaatcttttaagcctaattgctccatgatttgataatgtggtgctacagtaaacatttgctaatgacagattaattaggcttaataaattcgcctcgctatttactgccggattctataattagttttttctattagtgtccgaatatcccatacgacaccctttataatactcgatctgacacaccaaaactttacaccttggatctacacaccccctcaatgtgcatgcatgcacagagaaaacaatagcagaaaacttctagggattagtagtgactacgaggaccaggagttgtacacgcaacagcagggggtgaaggaattggggacaaaaatttgcatcaccccattcatgaggttattggaaattggagaagggggatctctgcgcaggtccaatcttgatcctatttcccatttcaatgttagaatattttgacgtttgggaacttggagcccccggcaacaccaaggcagaacaggtaacgccaaggtcacgtgagataataataatcatgtatttgctccaattttcctggagctagttaggccagggtagaagaaaacataatgtttagatgatactggtatttgacatatgatctggatgggtgatgttgtgcttattgcacataagaagcaaattatataattaatggagccattacctattaggagatccctttaacaccgttatgattggattctggacaaaaaaacgccccatcttgggccctccggtttctccaaaggctgacaaactgaataatacttggccattagtatacatcagtgagcacacaatgtatctgaccatgtgatggaatacttgtctccaaagaagcaagcaaagcgacattgctgattttatcgttaatattttacagaatctgatacagatctgtcgttaaaaaaaatataaagaacagatcatattatgttctgtattccaatcctccagcagcaagaggtgcccccccaaaatgccctaatgaaatgataaagaaccaccactgatcttacttattactattaaggttatcatccacacaagaagaagcagagtaatgaccgatggctttactcccacgcaagcacacacactccttacaagtggaattgtgtgtgtcctgagcagggtaggttgtcctagggcaaaggtttgaatggaaacaatatcttacagccaattcaattcattgtgtgagaatccaaccaaaaccagcttgtaacttgcaagtcttgtcctcttaaggggtggtcagcacacattcaatgagacaggcctcctgacaaaaccccttgattgtgttgaatctgagatcaaagaaatggctggttgctagtagtaggagtactctactccatggctgtgcatgataattagagcacacagcccatacacctcaaatgtcacatctctcacaagaggcctctaccctgaacaagttattgcctactccctctgtccaaaaataaggcaaactatgggttttcgtgtccaactttgactgtccgtcttatataaatttttttataatttgtatttttattgttgttagatgataaaaaatgattaatattttatgcgtgacttgtctttttaatttttttcataattttttcaaataagacggacagtcaaacgttagacacggaaaccaaggtttgtctttttttgggatggagggagtacaccagctatttcaagtggaccacaaatataaactgctgccaatctatcaatccaccccttttagctagtaaatctatactaaaattccatgtctttctccacaggttaaattgcaatgcaacaagaacaagcctcctcattcattcagttccaaatgaacagtgggatagacttgggttccttacccaggacttccaaagccaaatcgaaatttggtgccctgcagcaacacaccaggaagctaaaggaacctggacctctacaagttaaaatggggagttaaggacagtggtcatacatgcatatgcataggcccccaaccacccatgcacatggaaagcaatggtagggtctacccccctggatggctgtgattaggccacaatggccaggcaccaacttttaagtaccaccacctgatcattcctcatcacctacactcagactatatattctaacctcaccacctttgaaccccccttcactttgattcttcctgtctacctaggttaaaaaaactccccatctctctctctctctctctctctctagagatctagcagtaatacatgcatacaccaaaagaacctcatgtactagtagcaaatatcaatacataaagctctacacttctactactagtatagttggaaggctataaatgcctagccatgatatgtgcatggttctctacacaacacaccatcatcatcttcatctcctacctcctctcctctcctctcctcttctccactacccaacttttgctcccaacacatctttgtttcgatcgaccgatcgatcagctctagctcagccgcagcaatggccatgcaccctctcgcccaggggcacccccaggcgtggccatggggtgtagccatgtacaccaacctgcactaccaccaccactacgagagggagcacctgttcgagaagccgctgacgccgagcgacgtcggcaagctcaacaggctggtgatccccaagcagcacgccgagaggtacttcccgctcggcggcggcgactccggtgagaagggcctcctcctctccttcgaggacgagtccggcaagccatggcggttccgctactcctactggaccagcagccagagctacgtgctcaccaagggctggagccgctacgtcaaggagaagcgcctcgacgccggcgacgtcgtccacttcgagcgcgtccgcggcctcggcgccgccgaccgcctcttcatcggctgcaggcgccgcggcgagagcgcgcccgcgccgccgcccgccgttcgcgtcacgccgcagccgcctgccctcaacggcggcgagcagcagccgtggagcccaatgtgttacagcacgtcgggctcgtcctacgaccctaccagccctgccaattcatatgcctaccatcgctccgtagaccaagatcacagcgacatactacacgcaggtaactaactaaacacgcaattgcatatctagtagtagaaactcaagaacaaattaattaagcactttgatactataattaacatgcaactacagcaagtgattaaagatcatatacctttcgcggtggaacaatttgcaggagagtcgcagagagaagcagacgccaagagcag

SEQ ID NO: 15106 - DNA, 22065 bp, Oryza sativa
  unsure (1)..(22065): unsure at all n locations
aggtattattttgtaccttattcgacgtattagtactcggataatttatataggcctatcgcagtctgggtcgtagaaacattatgtggacttaaacaaggagaattatgtaacatgaagaaatagtagtacaatttgaacatgatacaactatttgcattgcggttacatagatgatattagattcgaactaggagggaggtagtgcaatagttgaacacaacgacgatgtagtaatgggacaaggaagcatgacagtagaaatttcaatatgccaagttgtccgataatagctaacccctacgtgaggatccctctcctctctcaaaccgcgctttagtaaccctgtattgctctggtagttcaagctgcacaacacggctaggtggagttagaacccttctggtgtctatccattctcagtattgacatctccttggtggttcctgggaggaaagaatagatgtaaagcaagcaaagttagtaaatgttgtgagaaaataaggattcatgtaatcaaaatattcttaccatgaaatcgtcgttaagaatatttggacaaacaaagaaccttcgacccaatgttgtaggatttatggaacgaagaacctgataacgctcaccacacctgcatcttggacgggcttcccatggagggagtgccgtagttagcacccgccagtcgctctgttgttcacgacattgtcgttcataagccgcttttctctgtaagtattgctcagtactttcggatgcgaaataccagcgaccttcttgtaaacaagtggttaggtcaagaacgggattttctgtatcgacccactcgatgtatgcgcaagccgtagtgcgggtctgccgaatagagtagtgttacgaagaataaagcgattgcccatacggaatgaataagcatgtgcagataataaaatacctcacggtcatagttagggcacctaaaaaagcgccttcctcgaatatcaggattcctcgaagccattagttggcatcgatcaccgcataggcagagaggacgctggcaccaaggtggtagtaggtatacacaaggatcgctacgccagtttggatcctcaacacctcggcgtctagccattgacgaaagccggtcggatttgtaatgaagcaagtggggaagagagtactgaatgtgactgagttctgaaagattgtgaggcctcactcgttaaggcgacttatataggcgcaaaaaatcgagtgatacccctgacatgtgaacgtggtggggtatggtgggtacgcctgattggcgccgaaagatacatgcatgatcggcgccgaaagttacattggtcatatgcgccaaatggcgggcaaatactcgtatcacacgcgaataaaggaggctgcatcggtgcggcagaaagtagtcgtgcatgcgccgaaaggtatcgtgcatgcgccgaaaggtatcgtgcacatataacaacaacgtagtcattacacaagcatacagtactggaaagtgaagcaagtaaacaaagagaagactgctctactggccctgccccgcgccgcgaccacgcttggtcctccgggcctgtgctcgcacgtggtcctgggagtaggtgaaacgatctggtggcacagcacgggtagcacgagtgtcccgcggaggagtggcctgcgcctggtcctgcgtctgcaccggcggtgcgcctcccagctgtgaggggccgatgacgtcctctgtcgagcctgaagcgaagtcgaagtcagtgatgtcgaagaggaaggtggaaggcaacaagtggtccgacgaggacccagcatggtccagtggtggaccctgactcgacgtgccagctgcctgtgacgaagtcccggtgtactgccagaactgcgctgagtgcgaggtcgacacagctgcctgagacgctgaccctgcagcctgggagaagtgggcggcctgcgtcatagcgaactaggcgaaacctacacatcgacaacgggacccttgtaagctaagacataaaatgtatgtaaattgattgtcgaagtaatgttgtttttttaagtacctgtggggggcacaacagaaggcctagccgaggaaggcggggtgctgaacggtgcacgaaaccctgaagcaatcggcaagtgaaacgactcacttatatgtgcgaggcatgtacagaaatagtaataaaaatacttacctccgtgcggagggggagtcggcctaggaacgtgcgcagctggacggggaccagtcggtacgggtggccgctgtacagctgcgtctgcccgagcaacgtcgtctgcacgacaggtgagcactcggagaatcgagcgcatcgaccccaccatccgcgtgtacgtcgtcaggtgctcctctacgggtaccggaatccccgcgcctaaacgttggatcgtcgttgaaccgtcaacgacgacccggttgatgtcgtcgacctgcatggttaatttgttcgtaaatattcgtaaaatttgacgaagagaaagacatgaaaacataaaggaatggtgcgatgcaaggtactcacagcacgagcgaagtcctggttgcggtgcctggcatagaggtctctagtgctcgcaacgtggggctgctgctccaagggagcgaaggtgaccctagtacgggtacgtggctggtaccagcgtaggtaggcctggtacgactcctcagtgtgtggctctccctcgtggtccacgacctcctcggttgcgagcaaccagtcctcaacaaaagtcgccagctgactgctgacccttgcgcgagtacctgcgaattaatgtgtaatattagtgtaaaacgacagatgttacaaattattgtgaacaggcagattttaatgcaacaacggaaagcgtagtgcaagatcttactggtgaacagcagctgggacagtggtcggaaacggtactggaaagggctgacggaagccgaactgccgcatcacgcggaaaggggcatgaggctcaacgcagatgtcgaagaccatcggaaccgtagtcatccagtacgcctggtccctggtgcagagtgtggacagacccaacggcgcacgagcctgggtagctgtggcactgtagggctcccacacgacgtcagtcggcagaaggcggtcgaactccataacaaactcaggatacgaccgcctaacctggacgtgagcccatcggcgctgcaataggagacgatcgatgtgatgtacaatgaacttagcaattaacttaacaatacgataagatcgatgcaacgtacctgacgacggcaccacagagtacccatcgtagggtagtcgacctctggtcgctcctcgtacagtgactcctcgtacgcgtgctggtccacctcagggcggccgatcgcaatcttctcagctgcccagatagaaagaaagagagggcacccaccaaaggtcgcgctgggatccgtcttcgtgcaagactcacaaagtgcacggtacagagccgccaacaacgcggaaccccagctccactgaggcacctcacctaccgcggcgtcggcgatgctcctggcgtagtgcacgagtcccttgtcgaccgcgtgcccgtgaccgccacagaacatcacccagccaaaaagccagagtaagtacgcctccaaacatcggctgtaggagtactcgtcggcctccgcctgtagctgctcaacctgcaagccgtcgataaaatgttaggcaccttaactgcggactaaatatgtaatacgattgtcatttcggtacaaaaacactcacggtgaactgaagcagccacctcttcgtaggtccggtgttgcggtggtgtgccaacggctcgaacgggaggtgcggtgcgcgctgtactagtgtgaaacgtgccgccagatcgtcctgccagtccacagccgtggtcactggcccaacagcgtctcccgcgagcggtagccccaacaagtacgatacgtcctgtagggtaggggctacctcaccgcacggcaagtgaaaagtgtgcgtctctggcctccatcgatcgaccaaagctgctaggagggacctgtccacagtccatcgtctggccgggtccgcgtcgccggccgcagcctccaccagccgacacattggtaggaggccggcctcacgtagcctgcaataacaaattaatatgtcattataaaaaatattacagtgcaactaacttatagtaaaacactgttcgtacctctcgacaaaagagtcgtgaactgggagtagctcaccgcacgtgcgtgcccggaacgtcccaagctgagccccctgcaccgcagtaaggtgagaccggtgtccgtgatctatcgccgggtccaacaactgaggtgtatcctgacgtgccatctctgaaaaatatagtgtttcgtgttagaacaattcaaaaaatagtactgtaaaacaaaagatagcttggcaaaattatgaaatagtaataaatttttgaggttaattatgtacaccaagagtacaggctatttaaataaagcacacgttactaatggtacataccgatgacgtgcaatttaacatatatgtagagttcaataatataacataccattacgtgtcgaagtccgacatacatcagcatacctaaagacgttaggcgccttagtccgacgttacatcccgagacctaaagacatgacatgccgaagtctgacattacatgacgaaacataaacacatcgataagttcgaaccgaattacaagcaaatccacatgccgacatagaacataagatctacaccacgtagccagacgcggcacgactacgcctaggacgtggtcgagtggaggtagtgccttcaccctttagggcgagctccatctgctactgatcctaatagtcttgcctccgccgcacttggtttctccttgtctttaggacaatgcttgtaggtgtgcccatgtcatgcattgctgcaacgcttaaccatgccagcctccgactcgtccatatcgttgcggatgcgatgagtcctcctccttctagccttgcctcggagtttcgatgggtcacgaatattgagtacttcatcgttagtctctgtgaactccccagctatgccgaacccataaatctcgccgctccatgtatgatatattgcttgcttactgaagtactgtgacacatatactgcatctggtatgccacactccgctgcagcagcaatgacatgggtgcatggcctgtggagcagcttcggctttgcacaagagcaatgacatgtgccgtcggctttgagaacacactcctgcttcactctcttgcggtagatacccctgcctgccttatcttgacatagtatctcaaacctgtgctgttgggtaccttgcactagagctcgatgtttcatggcctttttacgcaactcctctagctttttctgcatgaaagctccaaacaaaatgctgttgttcggcatagagggaagaactgcctggaaccgatccctaaaatacctgcatgtcccatgtaaaatgaactctactatgccaactagtggcagtccacggacaccgcgcatcacccagttgtaaatttctgccaaatttgttgtcattattccatatctagcaccacctgtgtcatacgccttggcccatttctcttttggttcatgcagaatccactgagaaagttttcgaatctccaatccagttcttctaaccaatgttggactatccattgggagaggtccaagagcttgaggagggtcagcaacggcggtcgatggagccgctgcacgctgatcactgcatttggctgtcaactcatctaatctcttccaaagctcattgaattttttctcctggttctgattgcacagcctcttgaacatgttcatgagctccttgttcttgaattgcttgaagaaattagctcccatatgacgcatgcaccacctactctgtacatcttcccaaacactggggtatcctcgttccatactcccaaactgcaactctcctatcgctcgcagaatgccagcgtgcctatcatgtatcaggcatacatttggcctcataccaacaacttttgttttaaccaatttcaggaaccagtaccagctgtcggtattctcactctcaacaaaagcaaatgccaagggcaatacctgattgttcccatctacccctattgctgttagtatctggccccgatactttcctgtcaagaatgtcccatcaatgcagagaacaggacgacagttcacgaatgccatcttgcatgcatgtagagctaagaacgccctttgcagcacactcttgccaggatgttcaattgaggggaatttcttcacttcgtaagagctcccagggtttctttcctcgataacaccaagcaggcgtggcaaattgtcatacaaggcttcgtaagttccaaatctcatctctattattttctgtttggccctctaggccttggcatagctaatagtatacttgtatgtctcttcaatgtgtcggattattgaccttggttcatatgtgagattatcgatgacatgcgcatacatctcagatgcaacaaatgcacatgtaatgttcctgtggtatttctgaacagcaggtagaaaacatgtatgcttggtaacaactgacactgtccaataatccttccatttccccttatacgcgtgcactctccagggacaaccatctttttccttaacacaccgaacttcatattgcgaccggttcgacttggcaacccaaaactctctatgaagtgacactgcaaaatgttttaccgcctccttcatatcttctgctctactataaatcgctcgctgaataacctcattttctttgtactcccatctcacactatcctcttcagagacgatcagcccagaaaaatcctcactagcccattctgctggattaatatctgtctcatcatctgacgaatcaccttcctctacacgctcattgtcagaatcctccctctccatttcatccacaatggcaccgacagtctccccctcgtcggccactccacctggttgaatgcccactggagctactacgcccccgtcctctcgtgcgttgacctcctccacagaagtctcgtttacttcagcacttggtccctcgctatcatccatgttcgtgtgcacacctggatccttcgggtgaacaaacggaaccaaagctagaggccacccgcgttgcaatgcattttccaaataccatctccacactcgagagttttgaactggcattagttcccaataaaaaccctcagtgcccgacttactataacattgattgttatgtcacttgtctgtggatcaactctcaagcccctcattaaccatcccgttatagaaggtacactcctctcagccgggctatcaattcccctttctgatacaataaaatctgacagatctaccccaggtggcccgtaacggacgtttactggtccatggtaaacttggaatatttggttgttcgacatatctgtcaacgaaataactagatcatattactctttcatgcaataaacatctacaacgtaatatcttcttgtgtaagccaatgcaacggtaatgtattaattccaaactagcagatctacgtaggtaccgatatctacaatacgcacttttagattagtacaactaaaaccctaaaaatataatgcatttattcaaacaaatttttaaagaatacacactatttaactcaatagtcacatataggatctatgaatattacctgaaatcggcgtctgaatccggcagggcttcgccccttcttctcttctcctcccctctcttctttttttttcactggaattgaggagagaagaatgagggctgggggctgggcagcaggccttttataggcagcgaggcctgccgcccggccagagggcggcaaggggccgcctgcaaaataaccggccccgactggcttttttgcattcgggccccttgccgccccaccagagggcggcaagggttttcttgcaaaaaaatcctccctccgtcaccgcccgttcctcccccgtttgccacgtcagcttgccgccccagaggtgggcggcaggggctatttctacaatttttttggtcgatagattatttctgtaaatattaaaaaaaataaatctaaaaccgaaaaaaattcccaaggaccatcgatgcatgggccgctttgtcaaccgcgcacaagcaggaacatatgggccgttgaattatggaactacactttgcttgcaccggcctaatagtctaataatgttctttctgggatcatctataaaaaaaatgattttgctatatctcactcgaaagatttttttcttatcgctcacttgattttctcactcaaatttacagtttatttttttgtaagttacagtataatttttgaatctttgcataaaaattttgaaatttatattcgatttggtctttttcttgatgatatggtaatttagtgtcgattattgtgtttttagttgctttttactttttactgtgtctattggattttaatataaagattacaaatctgtgtgatatgttcataaaaatattttgaaagatgcataggtactccctaaaaaattgtctcattccgtcaaaaaaaaattgtctcatcacaatgacagtcaatagcaatgcccaatggccatgctggcgtgaactttctccctttttttaacccatcttcggcctctgcactatatatagctggctttagtaacattgtaactatggggcaatttcgatgattgtgatataattggtcacaagtcacaactcacaacatactactgtgtatgtaactttatgtccactatagaccatctacaatgtggtggctcattgatgatttatgtccacccatgataaacaggacacgtataccaagttagtaccaactaggaatattttttgaacatagcacgtatgcatattctacctatatgactacatctgagagaacataccagtatatcttaattaagatagataaactattaaaataataactaaccataaatatatacaagcatccataggctttatttctgagtgagcattccaccaatttttaaagtaatgctcatcgtttaggccggtgagtgacatttttgttcactgcgcattcacctttggggttcttcgcatctaggtagtaccaggacccttgtgcctcggactgcaccgaccgccttatgacccatgctgcgacgagacgtggacattcctcatgctgcggttcccttcggtccattcccgggttgggttaggggaagatccgagcgattgccttcacggacgcggatcgagtatcaaagaaattaataagcaatggaaaataataaaaaaacccagaggtttggaaaatgttgtgtgtcctgtagtgtagagcagcataaatcatttggacaagatcagggaagtactgatcggtcgatcgatggttgcatggtcccttccaaccaggcttggaccccttctttggaggaaaaagacgatttgctgttcaccaatgtgctcatcaagctagctagctttgtgggggttccatagctggctaatggtcggtagagcatcaatttttgtttcaaaaaatggctaaagttagcctagtaacttaactgtcctaaaagtggcagaaagctatatatacaactagtgataatattatattgtaattaagctgatatgatctacacaaaaagtgtggctgatatctttcatcaattatcattggctcccatcctaccttgttgattcgctctgacgttaattagctagcatcatatatatttatcagggatagctagttgctagcttaatatattgcagtaagtaacatgcatgcatgtatggggatagatccctttcctaaaaaaatatataggttaattactaagtaagatgtgtgagaatatttgttcatatgtagcttgtcgatatccttaatttgcatggtaccttgtgatagcgaagaatatatactctgccctttcgaatgatcgcaaatctaaatattagtacgccccccttgcatttggtataatatctcttttttaaaataaagatctaaagaaaggcactagttattgttcatcccttacagctcccatagacataaaagcatcatcaagaccttaattcaactcaagctcaatagctacatcaaacatgttccgaaggattttacaaaaatttcagtaaaagccacacagcagctaaaacgaacattttggattggtgtcgatttatgccctaccaacattttggtagttccaataatgacttattggttttgattttggattaaagccattttttgtccacactaaattattgctcgtagcaaattactataccaaatttgatagtaccaaaacttgcttagttttcggcaagctatgtaacataagcgcttacaacacgtgcgcacacactctataatatgattaagtcatcatagacatctcattgtatagaacttaaatccggatgaatagattccaccacaagaaaatctaagatatactccaacgcttcgacaatatgaattagaagtctatctttggcagcatcttgctggtaggagtataagcataattttcctctgtaatccaacctaaaaagtggtgtgatcactgcaacttgttggcagcataataatacatactctacacattaaatttgggtaagtttgggtttttaatatacagcaaaatcaatcatgctttcatgcatgccaatgtagccgcataaacagtatagaagcatgtgtgcagcaacaaaaactgtgggcgctctcaagtatggactagctagtacctgtcacttttggagagtggtatgcagctcaatccaaagctggtcctaaaataatggtgattaggtgcaagatcggcttctgtagtggaccaatatgctagcctaagaacaagatttggacatttgatttgatgcgagcagtggccattggttcagttaggtttgttgttttttgcatgcacatgttgactactccagctcacaagtaaattaatgaaaagatcaaggtagggcttctaggaattcagtgtgttaagataaacagaggtctactgaggatttaggcacaaagcagcatgtatttatggactaattgcaatgcattctaacgagactatactagtgttcatcgatcgtaggtggcccgaagttgttcgcgttttcctctcgaattaatgtgacactcatatagctcattcaaatatataaatacggaaaaaattattcaggatactctatatttatggtatttgcttaggacactctggttttgacataggacactaattatatggctctttataaagacactttgattcttatcttaatatatccccttctaatatagatcgagataaaactttgcaaatgatagttttactcttgaggcgaaaatttaaaatttgaacgcattttggctaagcgcttgtttagtttggtgctaaaatcaaccttatcaatatttggcattgctaaattggcacattttgatagtgttataggggtttaatttgtagccttaccaaaatttcgtagtgttcttatgagagtaagtttttggaaatatgagaatttggtagtgtgtcaatgacaatagaatgtttggtttattatcttatcaaattttggtaatgcacaaaatctgataaagttgaaactgataacaatctgaacaatcccaaattacataattcaaatacattcatttttttttcaaagaactaataaatttgaaataatgttgtctggattcaaacagctcttagaaaaaaaatattcttttatttccatagtttgtgacaacttttgattttgcagtttatagaattatctcaaatgtatttaaatgtgaattgtacaaggtgatccaagggtaaaatattcctttgtgaagttttgtctcttcattgctgatgaaggatatatgaaaataatggtcaaatatctttattagggatattaattattaccgatattgttgtacataccttgtttagttgtttaggctatcgagactgtgcttttaacccagaaccataaagtgctctatggtaaaatcacaaaactagcatatcttagagcaaacatcacaaatctaaagtgtcgtagagcaattttacctatataaatattatattcgtacgtactatttgctaggaacgatggtacagtgtattataaaaaaataatctgagaaaaactctagtcccctcaaatttcaaaatcttcaaatacataagtttgtggaaaactaattaatttaatctgaggctacgaaattatgcctcaattaatttaattcctgatgaagagcagtagagcaccaatttaccaagtactccacctatccgtaaaggaagtcgtttagaacaatgtttaagtcaaaccttgggaatataaatcatgaataactctcaagttgttgagtttaaaaatataaaaaatatatgaatagatttatcttgaaaaatatttttataaaagtatacatatatcacttttcaataaatatttttatagaaacaagaaattaaagttgtgttttggagaccgtgtcactgtgtaaaacgacttcctttacgagtacggagggagtcactgtgtaaaacgacttcctttatgagtacggagggagtacagtagagagcaccgcgcttataattcataatttgctggtactaattaattttctaaaaaaataaatttgctggtgcctttcgccctgcaggtaggcataacgcaacagtagttaagcatctttgatttattggtacagatcgacagaaagagcgaaaggctaaccaacctatatcgatcaggacaggaacacgacaaatgatacctaacatgagtctttttttctctaaaacatgggagtttacactatatgtacttattgaaatttaaaagtatatgcacacatttatttataatttatggtgtcattggtatgtttaggtaatgtaagtgcacccaaagacagggttgaagccagcagccgaaattatcaagggggttattaactccattgcatggtatggtgaatcttgaatcaaaatagtgtttcgctagaagatttaatttggagtttcgcaggggtcgctgaccccaacaaagactagtttcgatcttatatctacaacttatgtacagagaatatgttcaggtattaattaattacctgcaatgttatatggacatatgtatgtgttttttcactttatattttactgagctactccctccgtttcataatattgtttaaattcattagtatttatatgaatattgacaataataggaagtcttatattaaaaaatagaagaaataattaaggttcacggatttataagtaacacccgtctgcgagagcagatagagtcgtgtgtacatgttcggcgaactaaagacttttgtgcacatgaacttgttgtacgatacgatggagctgagtcacgttaaaatttaatcagtcgtgttaacttaatttttgcgttgatagtactgtagtacatgtgtacgggggttaattagttaatattgagagcgagctgattgatcgatgttgctgaaaatgcaagtcaacccctttggcggaaaattcctctcttttcccctaacttatgtactgatcgatatggtattttgttcttgtacgttcggcttgctaagagtcaacaagcgcatgcaatggccttttaggaaattaatatacttttctttctggcctaattgaggatacatgcatatggatatgctgctactcttgtgttatttgtgaagtacatagtatacataatttttaatatgtttatttaggaaggacacaaataaatgagtaccttacgtataatgtattgtatgttctcctgcctatgtcagatttatgtataaaaaaaatttatttctgttccagagagtatttgtgcacccagcgtatttatggattattattctttcattgatatgtgatacatatccattgatagtgaggtatatgtctgcaataaatttatcagttttgtaagatgtttgcgagtttctccaagatactaacttaggagtatacagctaatgtgtactctcccttcgtcagaaaaaaatcaaattaggagtatatagctaatgtgtactctcccttcttaaaaaaaatcaaccaatttaatctgtatatgaggtttttcggatttattgttgtaggtgttatcaaattttcatctagttttttttttgcgcgtcctccgtatcaaaatataagggattttggatggatgtgatatattctagtacaatgaatctggacaaggagtcattgtactaggatatgtcacatccatcaaaaatcacttaggtagtgtttggtcgcaaggatgggatgggatggggtgaacccacttttagaggtgtttggtttaggggtgagtgggttgggttggtccctgcagagcaatatttctctcaggtttgggaccaaccgatccggtaaaatcaactggacgagcacacggcgtgagccgcgccgcttcacnccgttcactcgcaccgttcgcgctcgctcaccctactagcctgcacggcaagcgacggattcagtaacgccaccctctagtgcgtttgcggtgacgacgacggcgggctcgagcggtggcagggggctcggtgacggcagatccgacgatcgggatggttgtggcagcgaagacaatggcgggcgagggtgagtgctctggtggtggcggcgacgatgacgatggtcgttggcggcgccgtgcggccatcatcacactcctccacccacccggctgtcgtcgaggcagagcctccacttgctaggccgttgtcacacatctccgcccgtcgtcgtccatcttgcaagcccgccctcgctgctcttcctcttgcttgcctgcccgccggcccatctcacttgccgcccggtcgttgacggtggttgcaaacggcatccatcccatctctccctcgtcccttcaaccaaacaaaaaattgggatcgtcatatcctataaaccaagggcctgttcggtaggccgactgcgacggctgcggctacagctgcgcacagtgagtgcggcattattcgtgccgattgcggcacaatcgcagtccaggcagccgaatagaccccaaatatataggtggaatcatcccaactctaaaatcaaagatggtttcatcctatcccatcaagttccaaaaccacacacatgtttatattttgggacagagtgatgagtggtatactccctccgtcccagaatataagaattttttgggttggacacagttattaagaaagtaggtagaagtgagcgatggagggttgtgattggatgagtagtggaggtaggtgggaaaagtgaatggtgaagagttgtgattggttgggaaggtggagaagttgttatattttgagataaattatgatggctaaaagttgttatattttgggacggagcgagtacattaagggcatgtttggtacagctctaactcttaaatttagcttcaggagttaggtctgaaatagagttgtgaagctgcctaaacccagctctaccactccagatcattttgtgagagagcttcactcagcttcgctcctatttttgatggagctgaaactgtttggctgagctccagctctaggaggggtgaaaatgaagctggagctgtgccaaacagaccctaagggcccctttgaatcgcatgaatagaaaaacggaggaatagaaaaaacgtaggattctgataggaatgaaggtgtaaaacagagattggaaaatacaggaaaaacacaggaatgcccgtttgattggaccacaggaaaaacgcaggaatcggataagagagatagactcaaagaaattttttcaagaggttggatctcttgctaacttttctctaaaatctctataggattagccatttcataggaattttaaaggatagtataggattcaatcctttgtttcaaagtcttttatagaaattttttctataagattgaaatcctttaaattttgtacactttttctacgaatcaaaagccctaagagttgagtgtatgatgtgggtgaatgtctatgtctacacgtttgtactgctcagttccggtaggaatggacagaggagcagcagcccacaacggccaacattgcggccggcgaggcgacccgacccatgccaaatgcgtgacgtgacggcggcctactacttttaacgcctcgagaagcgtggcaggttggcctcgtgggccccacatccccaagccctcgaggccatcgtactgggcccacctaccagagtcctggcgtatcagaagatcccgtcgcgtcttgtcttgcaggcatgcatccggcgctgctgcccacgtagcccgccggtgaaattatcgaatagccctccgatcatcctgcctcacgaggggcaatctcacggaagcttggagggcatatcgggaaagaaggaaaatacagtatgtatacggggctggcacactgctcgaggaggtactatacgttctatctactgtataaagagggatggataccttgtgagcagagggatgaaggtccacttgtcacccgttatctgaagctagaatgggtaagcagaaaagggaattaatggcaatggttatccgggcgatggccaatcggatattccgtggtatcgatcgattaatcgatcttcgagaaaaagggaaaaaaaagaaactgaaggagcttgtcggaaaatactgtacacactatgtttgtgttaagagtctcgctccggtgctttctacttggagtagaaattaatccgtactgttaatcgtatttaatcgtagggttgagatctagttctactcccaccaaattttattggagtagaaatgtggagggctatatttgttcagagataataattcgcgtaggggtattatcgtaatctgttattatctaactgttcaccctttccctatcctatcctaatcgacgccattcccctccattcgccgtcgaagacgaaggccagcgtgtttatcgtctgcgtgccagcgacgaactgatcgatttggagacaatcgtcagatatgttcatgagaaaaatgtttactaatctctgaagattaatctgttcttgcttatgatgaccatcgtaccggaacgcctttgtgaatggtgctgatgacggcggtgtcgctggtgaaaacgccgctaccgaaccacatgccggcggcgaggaaggccgtcagcccaacgccgaggacgacggtgagctgcagcatgcgggcggtggtcaccgccaccttgtagtgatccttctttgcaaacacgctggcaagcaaggcctgaggttgattgatcaatttaagcaaagttaattaagcagccatgcatatatcatcggaatgtaggctaagctagctaggtaggtaggtagctagctcacctggccggcgatggcgaggccgtcggcgaggagcgacatggcgagccagacctgggcgcagatttggaacgccgccatggccgtcgcgccgtggcgcgacgccagcgtcacgcaaaacgtcacggccaccactctcgtcaggatactaggagattacttacctgctctttaaaataaacggtccagatgaattctactcggagtaaaatacttaaagtacattgcacaggagcatctctcttgtgttaagaaaccacaggtgatctcatccacccaaggaaataagagcaacggttcctaatctaaccagtagataagaggagatcgctcctctctctccctttggcgtccctctcgacaaccgatgcgatgttcccaaacattgcgtcccctgcggttgacaccgcttcacattgtataatgtattgttgattaatgagaaatcgatccattcgctctagtgtgttcaattctctctctcgctcaatctctctcgctccaatcaattctattcacaatagtttgcctaccatttcagtaacgattaaacgccccaccgtttaagtggaaaaacaatctattttatgtagtatcaaaagttgcagccgttaataaaccgtaggagagggacgttcgatcgtaaacattagatcgtacgtatagtaactctcctgcttatcagcccaacaattcaccgagagttagcatgtcttttttaatccaactggtagtacgtgtactaattttactccctctatccaaaagttttaaacatattttgttttctagttttttaaataagattcgcatatttatagtcggtacgtattaaggttatacaaataatttactctatttaatcctccctcctaaagcataaaaatgtttggtgtttttctaaagattaaggaaatgtgaagtaaaataatacagtcgtgattggttaataagagaaaattgatagaaaaattaaatgagagatggttataattgattgagaacttagaatattttgggacaaagattaaggaaaccatccttttcttttcttaatcgttcctcctatatatatttcgtcccttttcgcctacccctatagttttccttccctcctacaaataatgatttttactttttgttgtgtaatgtacttctactatttgggtttatccaaagacaataaacatgctattttttccctacctaaacgactttcttctatgctgaaaagggtagctagaaagtgggaaagagaatacatgagtagaaaaggaacctttcacatgattgatagtggagacggttatatatgtgcgttagcaataagcttcaacttgtgccttttgcttagccaaaggaatgcactcaacttgttagtccgatcctagccgtttaattcctctttcattcaacctatcaaaaaaatgtaaaaccctttaactttgtttttgttcgacaagagaacaaactttgtcgcttgctaaaatgtttagtgttcctagaaatataattaatgtgccttccacttatatttcagggtttccagtattataaggtgtcaacctatctctttcagtgaggtagaaccaacaatatacaattctataaaaaaaataaaaattgctatacatacgacccaactgtccgaatcacgtatgactgaatttgatcaacgatggtaaatggctacagtgcatatgaacatgctcttctttgattgatctatgattgtatatgagttatatatgagttatacaactaaatcgtatatacagcagtataaaaaaagggttaggagaaatttctaggatgctccatgaaagtttatatgcaaatacttctctctcagtgaggttgaaacaactatatataattttgtcggaaaattaaggagaaatttcctggatgcaacttgaaaatttacatgtaaatgtcaaccatattttgtggaaaaatattatttgtccattttccatgaaatttttattagtaatacaaaggatcttaacttatggtagctaactaactggccagcatcacctgcataagagcatgatttgtgtgcagcagagagaagacatgaatgcagcaactactccctccgtccaaaaaaaaaaggcaaaccgtgggttctcgtaccaacgtttaactgtctatcttatatgaaatttttttataattagtattttcattgttgttagatgataaaacatgattaatactttatgcgtgacttatctttttaatttttttcataattttttcaaataaaacggacggtcaaacgttggacacggaaaccagggtttgtctttttttggacggagggagtaccaaattaggagaagtgtacataagagtaaggttgtcaggatcgggatactaggtagtatcattttgctcaaagtaataccgtatcgtagaatcgtatcgtagtatcgggatactaagagattttcttttttttaagtttaattaatatttatattaattatatatagccattttgtataaaaaaatatagtaatgatatatataatgcaaataaagacaagagaaaccacgttggttttgatatatttaactgatttttatataaatttgagcatatttagttacattattttgaaaccatattatttaaaataatattttgtagtatcgtagggatcgtagaatcgggataccacctaagatttcgtaggatcgtgtagtaatgaatagtaggatcgagatactatgaaaattaagatactaggtgggatcggtatcctttcggcttgataggatcgtagtatcgtaagatactagtatacgaatcgggatactgacaaccttgcgcaagagacaagggaaagagatggagaaaccgtccaaccaccaagcgggacccgcaacggctgctcgcctggcatagcttagctcaggctcttgtcatgaaaccatatggttcatcagttcgctgaactcgataccaaacaagtcaacatcgatgtatctaccagattattttcgtgatgtaaaacaagcataacagctacgtttactgttaattactcccccgttgttgaatataatgattcctagattttaaattttgttttttcatatataagaaattctaggtactgatatattgtccgatcaatcaaccatagtttaattttctttcatcttacttctaactatcttccaatcacttcagaccttctctcatttagtaagtgaggaacattaaatccttttcttttctcttcaatcttaaaaagaaatctagaatgcttatatttgtagacgggaaaataaaataacttgtgtttccttaaacagtactataatttattatcacatttatggtattttaaagaagagaaactatttgttgtacaccaactcatgtcgtcaaactttagtcgccatatttaaagctgccctaattgactacatgaaagtgatattttgagattttgagatttgtcgataaaagtatatatacagcgcattgtgatttttcatactaaattataattcaattagtgagtttaacatagctcagctgattaagttcattgtggtggaattcatccatctgaattcaagttttagaccgggcaaaggtgttgatatttgcgagtaattattctagctttcagtggtatacaactgctcgccgataacgagacgtctgtagtgactttctcaattgcaagatatatgtgggactgtttttgaaagtatttataggggtgtatatgcttttagtgatgagtgtacatacgcgtatatgagcatcaacgtttataccttttttgaaaataataaattagttgctttgacacattagtttttttttggctgcgcactcctagttagtgcagtggtcggatgtttttattggttaataaaatatttaattatatttagaaaaaaaatcatttaaaatgacaaataatggagagagcaattaaataccacacaaacatactaactattttatcaagtgtcgtccgttgcattgtggaaaatcttttgatgtcacgaggagccaacaaaggagatgtatgtcaccttggattgcaaaatcaccaataagtgtagaggaacttggacttggaaatttattaatccaaatggccgggacagattactaagaaaaaccacggcaaattcactttttgtttcaattttatattaaagctatggacattgacaaacaccacaaaagtatcacttttggttgcacgtttgccgcgtaggcacacacgagagatagaggggacatcacaaacttccacttcacatacataggcatcaataaatttcaatccccaattcaagttaaggagatgcccacgacacaccataataatctgtatgttactccctccgtttcgttttatttgacaccgttgactttttagcacatgtttgaccgcttgtcttatttaaaaaatttaaataattattaattcttttcctatcatttgattcatcgttaaatatacttttatgcatacgtataattttacatatttcacaa

SEQ ID NO: 15107 - DNA, 10290 bp, Oryza sativa
tttttccacacaaggatctcacatgtattaatgcatatcggatgcaatcatacatcatagaggtgatatttagcgaagttgtggacagtgtctactactgttttggcccgtttggatgtggatgaattgcttctatcaaattaatggtgtactccactacaaatatgggctatatgggagttggacaactgtacctaggatgagcttttatggaccctttcaattcgagcatgtctgtccagcactccagctggttaattaattggaatttggcaaaattcatttgaaaacatacttcgaatttcatataggaactgatagtttatttgtccaaaacagagatcaagcctcaaagagatgttataaagctcctttagaaagagaattaaacatagctagtaattctttaacataaaaggtgaacttttaggatttggttgtgaaaataaattacctagcaccagaatatgatctctaggtctaccaaatccttcccacccaaatatcttcttcaaaagctttcaaaatctggcccggaaacttccaaaaagaaagatacgggcaaatttaaaagtgagagttccactagaaaccattgctaaaagaaaaatcaattattccacataaaatccctatttaatttctaagttgacttttacaatttcaatcctatatgcaagttttgcatgtctggtcctgtccattcgcgagtccttatgctgaccttgatgacgtacattgtgtcagcatgtgttttcaatttggaattatctctttttacgccccctttgaattagaggatattattgtaggaattttagaggattattatatttaattttctaattattctttgcaatataatcttttttattcgtatgaaaagataaatttccattgaattgtattcatatgaaaaaaaacacgaatattagagaagaacctaatatcaaataattagaaggggtgaggcttggacgtttctcatccatatgactcaattttatggaaaataagtctaaccatttgaaaaactattcggtcctctcatttcctatattttccatgttgtaggattagacaaacatacaactttaattactgtggttttcttattctcatgtcctttcactttggaacatatttttgtcataaaaagtcaaacttcaaaatttcagctcattttaccgtcacatttcaccgttggtaactgtaaaactaaaacggtaaaaattgaagtctcaccttttcacaggctcactcactctataaaaaccgctcccgacctgccgctcggtacgcatccactcctctcctctcttccgttccttctccctcgccgtcggccaccgcatcgccgtcgtccgccgccgacagggacagcgttccagccatggacaagggcgccctgatgccgtcgcccgacgagacgtgctgcgtcggcggaggcgggggctcgtcgttctcgagcctgcgcgcgtacgggcgcgcgctggcgcagacgccgcggcggctggcggcgcgggcgtgcgccgcggcctcgcccggcgaggagatgagccgcgtgcgcgcgcgctcgggggccgacatggcgcgcgccctgcggtggccggacctcgtcgggctcggcctcggcggcatggtgggcgccggggtgttcgtcaccacggggcgcgccacgcgcctctacgcgggcccggccgtcgtcgtgtcgtacgccattgccggcctctgcgcgctcctctccgccttctgctacaccgagttcgccgtcgacatgcccgtcgccggcggcgccttcagctacctccgcgtcaccttcggtgagctcagctgctcaatcacgccaagatcatgacttaaatatttcccttcttttttggcgtcaattcaggatttcttcaaatttcgtttcattttgttgggccgtttgttcatgtaattacgtcattaaagattgggttctatcttttctttcttttcttttttttttctgtactcaaagatttgatggttatctatctctatggcttggcttttcgccatccttcggtttatctatctatctatctacacgctagaaagtgcaaatttcagtttctttttgtgagcatttatatgcatatgaacatggcagtttccttttaagccggctgctgttgtccttttgtttgctcctatggttttttttgataaattttataatacctgtacttttgctgattgatgctgccctgcatattttcgctgtatttattatgggctcaagttgtatgagcaagaaaatgtctttctctgatttcatattaattggctcttccttttcttaaaggttactagatttttcatatgttttttttaaaaaaaaatttgtcagcttgaaaatccgatctaatttctattttcacacttttttattttgacaagtaactacgggtggtttgattattttattatttgttcgagggaaatgagcattccaaaactagtaacgaagcctaatattgtgccaactttatttagttacatgcacgtagatttgtcaataggtttcatatcaacatttttctttttcagaaactcacaccaaatggatcataaaaaaaaggagtttggctagattgtgactcccaacaaattttattacacgggcgcatgtccatgtccaaataatgttgcaaagtccctttctttgtttctttgcatctcccaaaccgcttaccctttttttttccacctgggaccaaaaagatcccattgtgactgatcatcagtttttgcagtcacttcattttatttttcacaaaaaaaatatatcactcttcagctaaccaagcataattgcatagaaattacatacactgttgcatctattaacttgcttgtaatttactatatctgtcctagaatataagtatttctagagttagaaatacttatattttaagatggatgtagtagtaatttagaatttgagactatttttctgctctctaaaagtccaaaatgcgttatgttttttttcagatggatcagatttttgagtttgtttggttgtgcaggggagttagcggcgttcttgacaggggcgaacctgatcatggagtacgtcttctccaacgccgccgtggcgaggagcttcacggcgtacctcggcacagcggtgggcgtcgacgcgccgagcaagtggcggatcgccgtgccaggcctccccaagggcttcaacgaggttgacctcgtcgccgtcggcgtcatcctcctcatcaccgtctgcatctgctacaggtacgcacacatctgtaaaaactaaaaaaaacaacttttttttttgttgggggagtactccttccgtccaaaaaaactcaatctagaagaggatgtgacccctacaatgaatctagactaccatttgtccaaattcgttatccttaactctttctagggccaggtttagttcccaactttttttttcaaactttcaacttttccatcacatcaaaactttgctacacatataaacttttaatttttttcttcaaacttttaagtttagtcaaacttctaattttaatgtggaactaaacacacactagcttaagtttttttttgggaccaagggagtatggctgtgtttagattcaaagtttggatccaaactttagtccttttccatcacatcaacctgtcatacacacacaacttttcagtcacatcatctccaatttcaaccaaaatccaaactttggatccaactaaacacaccctataatagaaattgtgctggttttgcttatgacacaagtgtcagagttcttgtctcttcctacggatgtgtactgcaaggcttttgcagagcaagtgcaagcaacttttgttgcgttgtctgttcccttgtcttctctgcaactgctcctgtagtcctgtgtctttcttcttggcaaattctagctcaaagttcacacaatgtgcatggtgccaatttaattttggtcgaatttctcctgctccatggctgcatggtcctcctctgcagagaaaaaaaaaattcagagattttgttctgaaagaaaggatcttgttgaatggtcggtctctgctattccaaatgcccgttttaccctccctttttctttcacgatcgaatgtgttttctgtggcgaatgtgttggcaagctttgtccaaaggaagaatctgcaaaagaagccgtccggcctgtgtccttgtgttcccatgctctggcatatcgtatcaagtcaaaacagtcaagaaccactcttttttgttcttgtcccctgcacaaatgtgtgctgagattttgggaatacaattcctgaaatgattggtgaatgcagaggagaatcaatcagtacattatgattgaattctgatagctatgtttccatgaccaagattcattttggtcagcatgacaatattcttacaattttttttaagaaaaagaattattttgatgggattttttatggcgcagcacgaaggagagctcgtcggtgaacatggtgctgacggcagtgcacgtgttgttcatcatgttcgtcattgtgatgggattctggcgcggtgacacccggaatctgacgcgccccgccgacccggagcacaaccccggcgggttcttcccgcacggcgctgccggggtgttcaacggcgccgccatggtgtacctgagctacatcgggtacgacgcggtgtccaccatggccgaggaggtggagcggccgtcacgcgacatccccatcggcgtctccggctccgtcgtgctcgtcacactgctctactgcctcatggccgcttccatgtccatgcttcttccctacgacgcggtaagtacacctcccctctctctgagatggctgggcccagtgtcatctctccctccatccaaacatataagcatttttgatagtttggttgagaaacattaaatgtgagataattatcactagttgagatgagaagtatagagagaagttgcaatattctgaataaattttcaatgttaaaatttgttatatatcgggacagaggggatactacctatcaaagctatcaaaggaatctatctatagaaaaaaaacggagattcccaaataggacattgtagtctcactctcctaggctaataattaaaaaccaaggggaaaaaagtttttttctaggctttgatgttagaggataattctggggaatatattagctatagctagaataggaggccggcacacgaatctctttctttttctaatcctttgtttcgctttcaacctttccgggatagatatgtagtagctggatgaatctacagtaaaaaaagatctagtcacagtattactactttttttttccaacaggatgaattaaaatacatcaaagaatctgcaaaattaacctttctgatccatatgctcacattcccccctcgagaaattgggaattaatttggaaaaataacatcaatatttatttttgttgtgcttgtgttttggtgtggtgcagattgacacggaggcgccgttctctggggcgttcaaggggagctctgggtggggatgggtgtccaacgtgatcggcgccggcgctagccttggcatcctaacgtcgctgatggtagcgatgctgggacaagctaggtatctctgcgtcatcggccgatccggtgtcatgccggcctggctcgccagggtgaaccctcgcactgccacccccgtcaatgcctccgccttcctcggtgagccttttattatacatacctgctccttctgagtcgtaaataataaatatttgatatttaacacaagattcggttgaatttctagttccatgaaccaattttgctttatagtgaattataaagtctgatgagtttaaacgatcatattatattttttcatggtgaatatatggatatcgtttgtttttatttctaaaccaaccatctgagaaattatcgatggttagggctgtgtacatcctttttgggtgtagaggccgatttattatattatcttaaaaaataaattatcgatggtcaatttttttaaaaaaaataccaaatattgctgtaagtgttaaagatatatatatttttttaaaaagaaacttttacatggatgttttttttccccataagtcaaagtggcatgtgagtagcagttgacgacgaaacagtgagctagcttagctagtacagtaccagctcttgttcacacagtgtctaaactaataacagcagcatcagtctgccttttcttgttagcctttgcggccagggaagctagctaaccgcgatcgatgaaattaaagcggcggacatgacacgggtgtggtggtggtggtggtggttgttggcttctctctcaactcatctcggcgaggaagaagaagatgacgacgagagcacaaccaacacaaacacagccacacacacgcaattaatgaaaagctgcttagctaactaactaactaactaactaactaatcgtcttcaaactcacggttctagctactactgtttgacatttgacaggataacgacatgctgatcgagtgagtgagtcagggagtgagtgattggctgtgcgatgcaatggttttgattgatgagccgtgagaatttgtaggatggtaatgttcactgtgagaggaaattattagagcccgtgtctttgaattccacttgtaatcccgtgatttgggagtactgctagggggtagtactcttttgtctcatgaatcttccgtgattagtctgaaatccgtgtgagccttttctgacttctcaattcaacttaccttcctcctaattaattccaggtagtcaagacagcgacactgcctcgattccatatatatatatgtcatttaaatagttatattcttttaaaagaaattaataagatacgttactaaatgatatatcatttcagaaatataaaaagttaaattttgacttgtataaattttagaaaaaataaactatagataattaatgtatattcacaattaatttttttctcaacttgtagtagatgttaaatttgattttatatgcttgtgaactgatatatcatatattaatttatcttactaaattttctttattctttttctaattatttaaatgcatgcaaacggggtgtaatctcgagagtgtagaatctactccatctattttatattataaatcgttttgacttttttctagataatttttttctggtttaactaaatttgtagaaaatatctagcaatatctatcacaccaaattagtttcattaaatataacattgaatatattttgtattttgatagtacgtttgttttatgttaaaaatgttactatatttttttttacaaatttaatcaaatttagacatatttgacttaaaaaaagttaaaataacttatgatataaaacggatggtgtatctttctacaactgtttgatcactttgatccatttgttctggggaataaacagtttggtccttggcgacgatgcaggggtgttcacggcggcgctggcgctgttcacggagctcgacatcctcctcaacctcgtctgcatcggcacgctcttcgtcttctacatggtggccaacgccgtcgtctaccgccgctacgtcgccgccgccgaggacgacgaggaggggcggcggcgcggggcggtgccgacgctggcgttcctgctggccttctccctggtggcgctctgcttcacgctggtgtggaagctggcgccgcgcggcggggccaggacggggctgctggtggcgtgcggcgcggcggccgccgccgccgtcgcggcgttccgggcgctggtgccgcaggcgcggcggccggagctgtggggcgtcccggccatgccgtgggtgcccgcggcgtcggtgttcctcaacgtcttcctcctcggctcgctcgaccgcccctcctacgtccgcttcggcttcttcaccgccgccgccgcgctcgtctacgtgctctacagcgtgcacgccagctacgacgccgacgaggccgccgccgcgctcgacggtgccaaggtgctcgacgagggctgcaaggtataactagctttggggggtggctgacatgtagggacagctggtcaagtgtactctgtagtagattttttttttcttcttctttcttgctatatggtgtttcagctttttttcaggctaaagtagttttttagtgttggattaaaaaaaaggctctaagtagtttttggtggtaaaaaaagattcaagatgctaacagggtgaaaagacaaggaaatagacaggagtgtgaatgagtggaaggaaagagagaaatgtaactttatcttgcaaatatgcaattgtacaaaaaaaaaatcccctcaagaaaatggttattacctcggtcgtctcgttctaaatttgtcataagtcaaacatttatatcttcaactatcaattttttttcaaaaaaaaattatattttaacaacacatgaattacatctcgtgaaagtatttctcatggtgaatctaaaaataaaaatcttatggtgctaaacgatataaatttgtagaaattggtggtcaaaggtgcaaatgtttgacttaaaaaaactagaacaataagtaattttaaggacacatttgctatcaatgagttatcatcaacttttactcctttaggagtggatgggagagggagaagagcggacacagtgaggatcatgggtattagacccaattcctatatttattatatttatagaaagtagttctctatttgagcataaacctcttgttgcttaattggttagtaggcgattcacacattcaggccttgtttggttaatccccaagagggagggattggaggggatttattccacacttattgtggtgtggaattattctccatcaatcccctccaatactctttaatcccctttaaaccgaacaagaccttcaatggaagctgggttccatcctcgtgattcctctagatttcgtgctgccataggacaccaccagcccaaataccattgacctcgatggattaagtcctcagggttggggcaagtgtacaagagggttggatggaaatgatagctatagagctagagcaaacctagacacctagacaagctgtttaggtttatagttaaaaataaagtttttcaggataaatgtagcctctagaacaataaattcttgtccattttacctttatattattgttaggattcttgtccattttaccttttatattattgttaggaattaatgagagttgatcaccaataccatgagtccatgactgcgaagttttaacttgcatttttacaaatactccatttggtaaaaatatatttgatctttagataagatttggttaattttcaatttgatcatcaactttatattaaaataagtttatgatattttgatacttctctccaaggtaaatctatacataccgattttttaaaataaattaactaagcatttcagaagtaatttgtggtcaaagtttgttttaaatgaaaatgatccattctcatactaaacgtcaaatatttatcacttgaagtagtataactgaagcaaagtaccctgtccgtcccaaaatatataaaaccgctaactttcttgcataacgtttcaccatttgtcttattaaaaaatataaatattatttactttgttgtgatttgtttcatcatcaaagaaaatataatctcaacttatacttttacatattaatacttaatttttaaataagacgaatggtcagatactataaaaaaagtcaacggcgtcatacatttcggtacggagggaatgtttacatgattgcatcctcctcctctgtgaatatgtgacaatcagcattgttatctgaaactatattttttagcgaaatctgaaactatttatcaacagaaacgcgagaagctttacacagctcggagaagaagggccggatcgagccgtacaagcaaatggattacatccttgttcagattctcaggatagacccaaatccagaatccaccattgctgcactgttcttgctgcacacacatttggcacgagctgattatcccagtagcacaagatagagacgtccattttgcaaggatatatatgcattctttgagctggctctactctacacctctccatatatcctttttcttttttgctactaattgattggttggtcgtgtgccatttttactagattgcagcatcattatctacatctcgatgctaatctttcat

SEQ ID NO: 15108 - DNA, 725 bp, Oryza sativa
ctcgcttcaaagcttcatcatgtctgttcacaaagtagtcattgcacttcatgaacgtaaatgatacaaatggccgtcactggaagcttacgaacaccaactagcacgctattgaactgttcggccatgttggttgtcatgtaaccccaccggcggccatttctatcgtatgcacgagaccacttatctttatccaacaactcatcttcaagccatttacgaggaccttcgggaatacgctgccttagtgcctcaacatccctctcaaatatccacttctcgtcaatctgacatatccttaggagctcttttgtctgatgcttgtccgcaccggccttgtggaaattagcactgaagtgcttcatgcaccaccggtggtgaaccgatggcaatcctggaataggagtcatcatggcattcattataccagcatgtcgatctgagataatacaaacctccctatgcggcccaaccacaacccgtcggacaagatcgataaaccagcaccagtctcgtgaattctctttctccaccaaggcaaaagctaaaggtacaagttggtcctccgcatcagctgataatgcagtcatcaaggcaccaccgtatttcccagttaggaaggttgcatctatagctagtacaggcctacaatgcttaaaagcctcaatggaaggaccaaagcaccagaatgcacgcataaaaattttcttggtcactccatcaat

SEQ ID NO: 15109 - DNA, 5367 bp, Oryza sativa
atcagtaaaaatccacacaaagaaatattgcattggagtccggccagaggagatgctccatgacatggcttcaccaaggcatgctctgtgccgattacttgtgccagccattgggatcttcttttttttttttaaggaacacgacggcagaagctgtgccggaatttaattagaaggagagaaaagtgcttacagtccagagaaaaacattaacaaaccctcaagggggcctaaaagccgatctacagagatccaggtcttgctttacaatatatgccacttccatctccgagcttgtgttattattgaagattctcttgtttctctttagccaaacattccaccaagtagtaagcagtgctcctctcaccgccttcttttgatccttcaaaccaacacaatcaatttcagaccaccactttgatgttccaactggaggatcgacattgttcagtgtcaaattttgccaggcacagacaaggttccacacttgtctgacaaaagggcattcgctaaacaaatggttagtgtcttcaaaggcgcttgtgcacaaacaacatatccaattgcacggctagtgtcttcgaagtagattttgtgcagtaagtgttttctcatgatgaacgagccaaccaaaaaaatcttgtttttggtttagccggtgccttccaaagcgaggtaaaatctgtggaagcaaaggatccttgaaattggtaaagataggcgcttttgcttgtgtaagtccctgatttgttccagttccatgagatatcatcagggctcagtgagagctggactccctgaagcatactccccaggcgcactagttcatatagcttttccactgtggttatttgtctgaaggagacaatccagttattgtttaggatctccagttgaacacttctttgctttctctttgccagcttaaagcacaatggtgcaatgtcttttgggcagccattttggagccaactatcatgccagaaacttgttttagctcctttacccaactcaattgtcatcgctgcttgaaacaaccttttgtcagattcgtcacagggaacgctcatacctgcctaaggttttccttcatccttcaaactgaaccataaccattgaagacaaagagctctcgaaaatctctctaaatctggaaggtctagacctcccaaagattggggtttgcacaccgtttgccagttgactaaactactgcccgggttagcttagtcaagatcttcacctttccaaaggaaggatctatgaaagcaatcaattctttttatcacccatttaggcgcatgaagagctgtaaggtggtgagcgggcattgagctcaagactgattgaaccagagtcttgcgtccagtcgaggtgaaaaatattcctttccaaccaggtatttgtgatccaatttttccgatcaagggaaggaaatcgatttttcttagctttcagtagtggaggggtaaaccgaggtagcggcaggggaactgttttatcatgcttgggaaattcgcgagaagagaaacgaggtttatttcttcacacctgatcgggtagatctttgttttgctgacatttgtgtgaagacccgagacttgtgcgaaaaagactaagagctgcacaagcatcgataaatcaataggctgaggtttcacgaatactgcaacatcatccgcatacagagagcacctgaacctgtcaaatctcccaccaaccggagagagaaaggatgcattttcagttgctttcagaatccgatggaaaggttccatggttagaataaacaacatgggcgatagcggatcaccttgtcaaagaccccagacatggtttgctgtttgacccggggagccattgagcagcacttgagatgatgaggttgctagcaggttccaaagccaaaatgatgaaggacatcaaggagatatggctagcacacagtgtcaaaggctttagcaatgtcaactttgatgaacagactctgttttttcgttctatgcaagatctgcaccatattttggacatagaggaaattatcgcggatgtcccttttgcggatgaaggcactttgattaggagaaacaagctcgcatagccttggcgctaatctgtttgccattaatttagagattgtcttggagaagctgtgaattagacttatgggatggtaatgttcagctcccgaagcatcttctttcttgaggagacaaatgaaagctgagtttagatcatgtagttgcgaggtgtttaggttaaagaaggatgttactgttgttaggaggtcctccttgattatctcccaggctgccttgaagaacaccccaataaaaccatctggccccagtgccttctcaggtggcatggagaaaacagtcaccttaagctcttcttccgttatatcatcttccagctgtgcaagatccagtgtttccttcatattccaattgattcctgaccttctttgaaaacatgttccaagtctctccttgaggaaacggaacaattccccttctttatcttgggttgaaattgctatcccggaaggtgtatgcagcgattgaatgaagttctttcttctcctggagttgactttaatgtgaaagaattttgagttgacatctccctccttaagccatgtttgcctagagcgctgcctaatctgaattttgtttaggactaagagagccaaaattttgttttgagattagagatcaaaagacgctcttcattggacaaggtcctggtttcctgtgctacctctagttggaatatcacttcggatgcaacagcaagttgtaacttgatatctccaacttgattacggctccatctcttaatgtcgcgggcaagacgtcgtagtttcaagcggaaattggctaggctgtttgtggcgagaattggcctttgccaagaatcctgcacaatccccagaaacctaggaattttaagccatcaggattcaaatctgaaatttggaaatttcgttcttttctcatttccaactaaaaggagaggtgcatggtcagagcacgcagaagacagtggatataagttggacccatcaaacattaaatcccagtcagtggtaacgaaagcatggtcaatcttagtttgtgttggatttgcgccttgtcctgcccaggagaaacggcggccaggaagattcaattccttcacccggattttgtctaagaggccacggaaatgctgcatcattcttctattgaggcggtcatttgtttttatctgaagctttatagatgaggttaaaatcaccaataatcaaccaagccggtttcatggagggttgtaagctttcgagttcagagagaaaggcaattttatcggcttccaattgaggcccatacacaacagtgatggaccactgcagaccctcctctcgcatggtcacagttgcagagacagagaattggcccaggacaacatcagagatacagaaaaagttttcattgcatgcaagaagcacaccgcccctgttggcaaaactcaggatcaaactacacacgaatccctggaaattgacaatgcttgatgttgaacagtggaagagaagaacacacgcgagaagtttttgtgccgccaaacttacgcagcttttctgtgtatttcatcaccatttatacaaagtgaaaacgagatcatgcgatcgtgtagatcatgtctccgactctgtgcactcccacgaactccatttgcgcatgtgccatcccacacggcgaagaacgtgagcgtacgactcgctacactacgcctcatcgtgaacaagcacgattccggctttacaagcgcagctcgatccttaacaaccaagcctcaaaaaacggaaataaaatagactctaacaaacaccttgcatgcaacgaacagtgcacggtgtggtgaggaagaaacagagctccatagcgccagcttatatcatcaagtctaacattctccccctaagcttggcgccttggactgacctcgacgacgccgatacgaggtcgcaattcttgaaaacaaacccgcccgagtgccttggtcagaatgtcagcaaccttcccatcggtgccaatgaactcaacctgagctctcccgtcctccacgcactcatggatgaagtggtagcatgtggcgatgtgtttactccggtcatgaaacactggatttttgctgagggtgattgccgacttattgtcaacgagaagcttgaagctttgtggctcctcttgttcgatttctctcagcagctgcgccagccagattccctgacacgccgccgtcatcgccactatgtactccgcctcacaagacgagagcgcgacaaccttttgcttgatggactgccaactgaccgggttggcgcccaggaagaagacgaccccgctggtgcttttgcgagtgtcgacattgcctgccatgtctgcgtcacagtacccgacaagctcaggtggcatctccatcctattgtagtagcagccgaaatcaaccgtgccggcaacgtaacacaagatgcgtttcaccgccacgtcatgctcggtggttggaacttccatgaagcggctcacgtacccaacaaagaacgcgaggtccagccgcgtgtgaaccagataccgcaggcagccgacgatgctgcggtactgggtggcgtccaccatcgctgctgtgctcgccttggtcaacttgagatgaggctccataggcgtcgagcaggaattacatccctgcatcccggctcgctcaagtatgcattgtgcatacaatttctgcaacagtcgaacgccgtccgccacctgttcgacctcaatccccaagtagaacgagaggggaccaagatcgctcatcttaaacagggacatcatctccgctttgaaacggtcgatctccatcactacgttgccggtgatgatcaagtcgtcgacgtacacgccaaccagcagtcggctgtcgccactgccccgcccgtagaccgtgtgctcgcagtcattgcgccggaagcccagcgacagcaggctcgtgtccagcttcgcgttccatgcgtgccgagcctgccgaagaccgtacaaggccttgtccaagcgaagcacttggtgttcacgtccgtccacaatgaaacccgggaggttgcttgacgtagacctcctcggtgagctccccattgaggaatgccgacttgacgtccatgtggtggacaggccagcctgcctgcgctgcccgcgcgagcagcattctcatcgactccagccgtgccactggagcaaacacctcgtcgaagtccacccccggctactgcatgtatcccttcgccacaagacgagccttgtgcttggtgatcatgccgcgcgcatccttcttgat

SEQ ID NO: 15110 - DNA, 1070 bp, Oryza sativa
tcttaaccacatgcacatgagaatcaatatcacacaaccgctcatgttggatgatggtgcctgacgacaacaggcctcacagagctgtctatatgtccacgccaactgaaacggcccagatcaccaaggttggcgaccaaaggaatccatatcgccgaagcaatgtcacccccagcatcaggaaacagaacccctcccaacaagtgcaagatgtatgcacgggcataacactcaacacgccatggctcagcatcgtcgtcaagatgtgagaagttctgactcagccaagacaggggtattccattctgcttcttcttccccccttgcccctgctcaatgttcagtggaatgccaaacagctgctgcacttgtgcatgccatccaagagtctctgtcctgcccgtcacggcatgcccccgtaatgggagggccaagatcatagccacatcctgtagagtgatggtcatctcaccactggggagatggaagctgtgtgtctcaggcctccatctgtccacaagtgctgtcaacgcaggagcgttgaagactggcattcctctgctcacgaccaaggccaccccgagcaacccggcagcctttaggtacgggatgtacctatcgtcgaacactgggggggtatgagctctgactcggagcggttgaagtacctgcattagcaattgtaaatcaattagttaatataatgtcaaatacacgctaccgatacttatgcacaagtgaatcaatgccgattcataccctccccgcctcgatcgcagccccgcgatgacgggcctcgtagtacgcctccaaggctgggtaagtcggcggttgtccctgctcggccatcctacatgaaaaagtaataaattcaccgttagttaccaatgtgacatatattaaaagaaaatgaatgcgagaacatgagtaggaaaacaaaatatttacctccctaacacttaaattttttttggacttcttcttttttggacgcttaggacacttagttttcttgtgaccctcctgatgacacaacgagcatctattttgcaccggcgcagcatcaagtt

SEQ ID NO: 15111 - DNA, 584 bp, Oryza sativa
agatttcatctattagaaaaacttgaaaaaggagaagatgatgatgtcatgctgacatcatccatggcggcgggctcagatggcgacctcgccggagctagggtggtcggccgggaaaaaggagggcatgtacacgtagaggacgacgagacgaacccaacggtactcaccacaacgacaaacgacgtcggacgacgaccggcaacgagaggggcgacggcggcggctcggttgaccggcggcggaggggctccggtggccggcggcgaaggggaacgggcggccgagcatccccacggcttggcgcacctaaaggcgatggcggcaagcggcggcgacggcggagaaggctgctcggcgcggctgcaacccggccggcggcggcggcggatggtttcacgcggcgacggctctacgggtcacgggaggggacgggagagggggcaaacgaaagaggaggactagggggtcctatttatagccttggattgaagagatcggactcctcccgcaagaaatcgatccgggaaatcaaaaactcggttttggagataaactcaaaaacgagttcgattcggataaaa

SEQ ID NO: 15112 - DNA, 6953 bp, Oryza sativa
tagtatatttcagtagtgggaattgggcgtctgttatttactcacttattttaggtattttgttcttctacttccttctgcaattggtagcgtgaagcatacttattgttctgttgagattgtgtggtagtattttggtacaaggatatattggtagcgttattatgtttatagcgtggtcattgctctgctgagactgaggtagtacttggtacaaatatatatttggtattccactttttcatgcccatgtttaacctcaacatctcttgattataaatatattttgggtgtcacttctttgcagttatggcactatttttgtgtttgatcatattgtactgtgcttaattttgtgcaatgattcatgtgtttctctgtgtaagaactcaatgttccttttgctcttgttccttgtgttctttattataacctcttgtgctctttattattaccttttcccccctgtagtcttattctattaatgttggtttctaaaatcttttattttgaaacttttctgctgcttaaaactctgttggtgttttatgaatcattgtgtctagtccctgtcctttttcttgagtttttgaggggacctgattatttttctcgaactgtacagtttaagttttcatgccagcttgattactctatgcatattatacatacttatattttgtattcatatataagcttaatgcattaaagtgctggtcaatttaatgttatgtacttgggctggaaaaatggtgttctaacgacctttttgggttatgctcctaagtttccaagcctaaaagcatccatgcttttgcatcatgcactgtttgatatttcttgcttgtttgaagagaagaaaaaccaacaaaggaagtgtagtttctatcacacagatataagactttgcaatccctgctgttttgacatcaagcatctcgttctggtgatctagtcttgcatcaaattttaattatggcatgatttagtgtagagttgtacacatacaatgcaaaaagaaaccatgagggtcagaaataattgaactcccagttatatttttcttctgagaacactatgttttactttcatctttgctttgaacaatttccatgcttttccaggagcaattttctgtcactgtctgtctgagagcctcattttctttttcatcctgacacaggttgaggagattcctgacaacttcccctttaaaattagtgatgaaaagggctttaattcaattactctcacaagaacttaccagggtgagaatattgaggttctagtttccatgcccagtcttgtgactggcgatgaacctgaccgtgagaatgaggctgatgaggacagaaacgaggatgatcaggaggaagaaactcagaaggccccaaaatctagcattcctctaactgtcaccatctcgaagggagaagagggaccaagccttgaattcatctgcactgcctatcctgatgagatcctcatcgatgccttgtctgtgatgccatcagagagtggggaagatgaaatgatcacgtatgagggccctgatttcaagtaagaaaaccaaacctagtgtatttaaatttattgaacactcaaattcttcaactaatcactgtcaccgagtgctaatgttcaacaccttgccctttgtctgctgcagtgaccttgatgaaaacctgcaaagggcattccacaagtacctggagatgcgcgggattacgcccatggccacaaacttcctacacgagtacatgatcaacaaggacagccgagaatacctcatctggctgaggcggctgaaggattttgttaggaattaatgattaacacaatcatttccttgccataagattagttttgagggctgtgaaccgctcctttctataagtatacatggaccatgaattgtgaatgtatgcttatttaggcgtttaaggtcgttgtcgtgaccaagttttttggcagtatcataatggctcatgagtcatgaacctggatgttggaaccaatggaaatgcttcagttaggatattctgtgattttcatctacactgatgttgctttgtttcattcctttccctttagccatgtgcactcgttacttaaaagtaccagacatgcaaatctaatttgctgaaaacacatagtttttctctaaattcacacgtcttctgattgtttgggaactatggcaagtagttcttcacagctatggcaagtagttcatcacctctgtgaagaacttggagtattcatgcttaatcctacagccgtcactgcaaaagccttcgtagccttcccatcccaactccagaccacaactggtggttgtttgggaactatggcaagtagttcatcacctctgtgaagaacttggagtattcatgcttaatcctacagccgtcactgcaaaagccttcgtagccttcccatcccaactccagaccacaactggtggttgtttgggaactatggcaagtagttcatcacctctgtgaagaacttggagtattcatgcttaatcctacagccgtcactgcaaaagccttcgtagccttcccatcccaactccagaccacaactggtggttgtttgggaactatggcaagtagttcatcacctctgtgaagaacttggagtattcatgcttaatcctacaactgtcactgcaaaagccttcgtagccttcccatcccaactccagaccacaaccgatggttgtgcactggtggttgtcctcaggtaggactagcaattggccacgcctcctaacgaccttccacatcacctcctggacggcatcctcagcgatctttcggcaccgtcggcactcctggttggtcctcttgttcccggcatcggtcgtcgccgcctcatcaccgtcgccctcaacttggctgatgtactttttcccagtggcgcgagcctcatcggacttgtagaggaggaggccgagcacgtaggccgctgtcttgtggcccgcggtggcagccttgtcaaggaggaaaaggccctgggccatgtcctgctgtgcgaagacgagcgtgacaccgatgatgaagcaagtgtccgggttgtccgcggcgacgaggtagcgctcgttctccacccacttcatgttatctagcctctccagcgcacacgtttcccgacgtcgcgctccttgaccgccgcgtgcatggccttgcagctgcagtacgtgtttaccaccaatacacacacagtcaatatacaaagtatttccatatacatatataaataagtttatattaacaagttaacatatgtagcacgtagactgagtaggtcggcaattggctccggtgaggtagcagccacaaggcaggcgacgtggacgatgttatcgtggtaaagcgccaactccatcgccgccggtaccggtgacaacctcttcctcttcatcatcttttccctcactgccatgctccgggtggtcaccatggtgccctacgagtgagacacttacgcgtacgtgcgtggatgtgttaattaattattaccaccttgatcccttgtaagctctcctaacaataaaacaatagcttcgcttagctatttgtaactcgcgccatgataattcatccgttcgtagtaggaatcgattagtgtagtccgaattggatttgaataatatgtttggttcggccacatttggaatcggattattcacatttgaatcggccacattttgaataatatgattaattgattattcacccgtttgttttacataggctggaatcggattccggcccaacttaaatctgataccgatacgggctcggtgtctctctcgccgccgccgccgtcgacgacgactcacgaggctcgattccatctccggcgccgccgctcctccgcctccgcctccacctcggcctgccacctccggcgccgctacctccgtgaagtggccttgctgcttaccgcccccaactgtcgtccactcccactcccagaccccgacaaccaccgtgagcgcctaaaatggcggcggcatcccgctccatgacggcgagatcatcggaatatgcttgcgagggaagcagggcgatgaagaagtcatgggtggattggcgtagcggccgacgacctcgcggttacggagtagcccatggatccacgacgatgacgaggccgacgaggacctgattgtaaaaagttaatatccagatagggacctaaatgtaagaatgacagatcgctataattgatagcgatcctcccaaatatctgcgtcctataaaggccttcgtcggattatggaccggactttgtgttcgcgttgtaaactttgggccttagtgaaggcccaacgttccatacgtccgggaggcccatcgcttcggatatcgtgggccggaaactgttgctccctcgcttggagccacggaggcccagagtagatctggcccgcatgttggccagtatcccgttccgaaggcccaactgctttattatccgttctctacttatgggccaaattcgtagtagctccgaattttgggcctcaaaatgggctgatcgatcctcttgtaccatcgagaagcccagagtcacattcttaatcgctgctaggcttacagcttgctagcctgaaagagaacacttctgcgaataatcattgataatccagatttgaaaaaaatattgataatgacatgtgtgatcgagttgctaacgtcttatcaaatcacagaaggatctttataaaagtaaatacttttatcttactgatttaagtatattattattgcttaaagtcaagacaaaactaagtatggtggatattcagagtttataatggcattattaacgaggccaattaatccacaatcgtcaagcatctctgtccgtcgcaagtgacaatgacactatctagcaggtgacattgaccatgctcaatgctgcatgatctggcaaggtttcagctggtttttctgaagaaaactaggggcggccaaatgcctaagctgtttcaggcttcctttcctgtttcaggctgttgcctatcctcttcctactgcatctgttttcatgaatccatgacattgcaacttggacaagatatacaagttataatgatgtgttcatttttcattaattattgcttagccaatagctagacatgtcctcaatacatgaccttatcttgccaaattcggtgaactctcagcacacttgattaatttagtttagcgtattttctacatcaatttgatactagcttgcaccaacaagtcatttcaacgtacaaagaaaaggttaaacgacatatactgatataccgaatttggtttgctccgacatttggttcacacagagtatatctccatgaatgcaatttagatttgaagatcatgacataaacgctccgttggttaaattccttttggtacatgtgggcttgagtctccgactcataacagatgatcgtatttacaattaattatttttctagtaataaacaaaatgacgatcaatagtgaggtatttgttgtgacttgactttgccaatcttagtctattttctcgaggatgttcatatggataacatttgcgtgtgccgattgttgggaacaatctgcgtgtgcctatatagggcctgtttgggggagctttagattctgagaagcagctgtttggtagccagcttctgatctgaaaaagttctaaacccagcttctccaggttctagcttcttagttcatttttcagaatatataactacagattctcaaaagttgtggactgtttggggcagcttctagcagaagcagcttttggaaaaagctgcagctgagataagctcccccaaacagggccataagcgtgcacatttgcattatatttttcccaaaaaaaacaacatattacgcattacaaaataaatttcaatacccaaacaaaatatcttttatatgtttaactcaaaattttccttcagtttttactcaaatttgtgccacatcacaaaattttttttaaaaaaacataaacatgtacttactcgtactacatacacaataatggaaaaaaaattatcattattaaaataaggtagggtaaaacaaacgtgaggaggtggatgacactacgcgcccaaccttcccccccccctctctctctctgcttcgaattcctcacctcacctcacctccaggcggcggcgaaaccaccagccgcttcgcttcgcctcgattccaaccctagccctacccctatccgaatcccatgcagacggaggcgcgggtcggggtcgtcgtcgacggcggccgcgccgccatgggccgccgccacatcggcaccgtcgcccacctcgccgccgggggcttcgccggcgccgtcagcaagacctgcaccgccccactcgcccgcctcaccatcctcttccaggtgagcgcgtccccccagcatttccctgcctgagatttcgctcttcgtccgtacgggcagtattgggggtggatgtactggatacggcgaggaggaggaggggattgggagctactgctactgcggaggcgaattttgttaattttccttgtctcgcaagtggaattcggggaggaagatgtttcctcccctcctttttttttttggatgtagggattggttggcacgagcagctacgacgtttgttactaataaccttgttgtgtgttgctttaacatgtgtttaataaatgatttgaccataaaggagtctcccttttgaacacatagggatttctcttcctgtgggtgaaaccagtacaattgtagtacagcataccatgtgttgttgttttggaatcctgtgtgccctaataaggaactgggagtaaagaaagcataagacaaatatgacttcttttgtcactcagaaacggtgggagtactccagtagtgagtagtgactggtgaaaatgtaagcctgaggg

SEQ ID NO: 15113 - DNA, 1751 bp, Oryza sativa
agcagcaccggggtccgatcttgtaagggcaactatgaccccgaaaccatgaagaagtacatctacctcgtcgatgccaaagaggtggagaaggtggagttcgggcagcaagtcaaacaggtagcctacggggttccggagacggtggatgtcgagaaggtctggcaatgcaaagggaaactgctgaagttgagcgacggtcgaagggatcaaggtgtggcgcggcggcgggacctatgcctgtccttcgccctcttcaagatgctcaggttaaggtttgccgtcgatcatgttggtcgttttgccctccctttccaagaaggcaagtcatgggacttcgtcgtcaaggggctcctcgccgatgaccaagacctcgatagggcgtaccgggtggtcgaggccgagcttgggttcctctttgatttcttctatgcccgttatccatctatcaagaacagcctggctcctgaccttgctgtgtatgtcgcgatcctcacgacaagcctattcacccttttctccccggaccttctccgataccggccgcttcggcctggtcccggagacggtggagatgccagcaacatcatcatccatggcttcaaccttgacctccttgtcacccgtttggtaatcgtttggtacatcttcctcgagtcctatcagttctttaccttcatcttctctgattggcacaaggtgaagatgatgtgtcggtacgtgcgcaatgagtcatggcacagggcgctcatggaggtcccactcaaggtgttgtgccatttcagtaccatcacgaggtactggaagggaaccatcggccaatacttcctcctagacaacattcatcctcactggatcaagaccttcctatcatggttctccatcgaggccaaggccctggactcatggctgatgactcgctccatccgcttgacaccggaggtgagccacgccgtgctccgtgagctcaagaactgcaacggcaacatcaccgacgggaggatgtggttgtatcagaagggcatcatcgacatggacctcgatcgtgacgtcttgctcggcaacccatacgctaattacatcctgaagtggcacattgccactagcatctgtgactacgggctgagcatggagaacggcgctaccaccaccgacgacgagttcgcgaggaatcacgaggtcgcaatgaagttgtcagggtactgcgcgtacctgctagcgttccagccggagctagtgcaggacaacacgtacaggagcacgtcgacagttcaaggcacgctgcaaaatgcccgggacttcctcggcggctgcaagtcccacggggaaaagtacaagaagctgatcgagctggggcgctcgaaaatagtgatggaccacgagatggcgcagaaaagcaaggacatcatctacagctacgactccgacgaggagaaggtgaagaagatgatcgagctggacaactcgacgagcaacgacacggtgaacgtgcttaagatcctgtctcagggcgcgagtgtcgccgtgtacctcgtcgataggatcgaggacacgagagagcggtggaaggtgctcgccgctttctgggcgaacctgatgctgtacatctccccgtcggatagggcggtggcacacgccaccaggatggcgaccggcggcgagtttataacgatcctatgggctctgctgacacatgctcatgtggtagacccgctccagtcgcgcggcggtaactcgggattgcatatgca

SEQ ID NO: 15114 - DNA, 910 bp, Oryza sativa
attttggtaagattctttagtgaattcagttaaggaaaaagcacaaccagtcgacggaaacttatccaaaagagacatagtttaagaaggaaccttgaaaactttggcatgacggtttaaattctatctattaattagacaagatttagtaatttccttttatctttaggaaatgtttatttagtgtccgatcatgacttgtatctttccttttatctttaggaaatatgtgtcatgtccgatatggactagtatctacccatggtataaatatgtacaccgatggtctttgtaatctatctcttgatcaatacaactactctcgacgtatcgccaccctcttttccgaggtttttacttatcaaccggcagaacttggcacgtgacgcgtgttgcatcggctttcgatctctggcgagggggtaagtcctacgttccgccggccctggcaattgtatcggctacattggtgttgttcaaggctgtattgtttcgacctcttagattgctctagtttggttgatatatttgcctaccggtttatcatatatcttagttaatctaatttgattattcaatttacttgtatcgatctgatcttttctagggttttactggtatcggctaaattgtttgtcggtctagattagctaaggtatccactaccctgaaaatcagtcaatggcttgattgtttagattttatgattctttttatattttgcgttgcatcagccctagtcatgcttagaatcataaaaactaatatgcatgcctttcattgctaataagagtttcatcgaggttttagccgatgggttatctggacgtttcatcggcttataaggattatatacaagttagttttagctgattgcagtaaatgtttcattgattatctaattgtttga

SEQ ID NO: 15115 - DNA, 1208 bp, Oryza sativa
attccatctaacatccatgtccaaaccaaacatacgaggacgataacccgcagcaatgcaaacatttttatatgtagcaatgcgctgattagatgcattcaagaatgaaatggcagctctaatgtcatttagcatgggcttgaacttgtcaagtccagccttaacaatcaaattgatgatatgacatgcacagcgttgatgcaaaaataaatcaccaatataaccagacagagcaggagtaagggtgtccatagctttagaattagcagaagcattgtctaatgtaatagagaaaaccttatcagtaataccatattcttcagcaacagcaatcacacgctcagcaatattagcaccagtatgtgactcatcaataagcctaagacccaagaccctcttttctaattgccaatcagaactaacaaagtgatctacaacactcaaataatcttccttagcatgaccagaccatatatcagatgtcaaagcaatagagctagcagaattgagacgatcaataataacagaacgacgatccttaaacaacttataaaaatctctggtagtagtttgtctagagacaggaacaaatctagggttatgagcaaccttaatatagttcacaaaagcaggagattgaccaaactgattggaagatcctctctagcaatcaatctacacaattcaaacctagcaacttcaggactatattcccatggaataacagaaccatctgcactaaatctaagcatggactgaggcaaagcattagacccaagctttctaggtttgcatgacttaatatgcctaagcaaatgtccagtgccagcagaagaacgagcactcaaagttttatgacagtaattgcatttagcagagactcgaaccctattaccattggtcgtttcataaagttcctcaaagtcatcccataccttggaggttttggtcttcttgttggtacaagtcgcactagagccagtcggcgtcccattgccactgtcgtcgaccggcgggtcgtcgtcatcgacattcacatggatcgggatgtcggaggtattgccgaacacctccacacgatcctcctccacatcatcatcgcatcaccgcgcatccccatagtcctcaactcgtagttgacagaggtaggatcgtcgtccatcgcaggcactctggtccctcaacggcggctgccgctaagcaacggg

SEQ ID NO: 15116 - DNA, 936 bp, Oryza sativa
gggaaggagctgacaccatcgtgatgagcaaaaataacaaagactaacagctagctaagtcttctaaacttcattatttgcttaagaaaatgaagtgatatatatacacatctaggggcgagcttcaatttattcgtggatcaaggcgctgatcaattgctccctccgtccctaaatatttgacgtcattgacttttttaaatatgtttgactgttagtcttattcaaaaaatttaagaaattattaattcttttcctatcatttgattcattgttaaatatactactactactcaagtttttgaataatattcacaaatgtttttgaataagacgaacaatcaaacatatttaaaaaagtcaatggcgtcaaatatttaggaatggagggagtatttgcttacggccaaggccgggatgttatctattccattatctaaaaagttttgcttacggcaagaaaacgattgtgctaattgttacaggctaacaaaatccttcagctttctcaaccataggaggtattcttcgttttccttgtagatcatgtactcttgcaagaattttgcggccatgggtgtgatcccacgcagctccaggtacttgttcaacgccttttgcagactttcatcgaggtcactgcagcagacagggcaaagcaaattgcacataagaactcggcgattaatagttaagaattaattagactgctcaataatttaggttttgttatcttactcgaaatcaggaccctcatctgcgatcatttcattgttgtcatcctctggtggctgcatcaaggacaaggtgtcgatgacgatctcttcaggatgggcagtgcaggagaattcaaggatctgtccatctccctttgagatggtgacggtgagaggaatgctggatttggagggaacctgaatctcttcgtactcagat

SEQ ID NO: 15117 - DNA, 821 bp, Oryza sativa
gaggttgcttcgattgcacacaactatggcacttagaaccttgcaatggaaaacttaggaattaaacacatgctggaagccgagacatcaagccaaaattatatgacataacgtgaatgccaaacattagcctcattatccatactgccacaaatatggttcacagacttattgcagaaatcagaaagggaaaagcggaacaggcctccgcactcataacctttaccaataaaatatccatgtttagacacgactactttattagactcaaaaaccaacttaaatccgtctctagtcagacgggagccactaacaagattcctgtcgatagaagggacatgctgcacgttcttcagctgcacgatctttcccgaagtaaacttcagatctaccatgccaacaccatgaacagaagcatgtgacccattccccattaggacggtgtaactctgtgtgtcatagtaaatagcaaacagttatttgcttgcacaacaatgttctctggctcccagagctgtatcttgtcaggtcttttcaatcacgtaagacaccattggtaatatagcactgtatctttctatctatcaattatcttattaatactgccttgcaagaaggcgttatagttatctctgtaggctataacttgtcacatcaattgaattaacaaatgtaatttgtcttagtaggaactgaatctttgaattttattttttcgtgagtttcaattaagagatatcgagagagaagtgcgtgtagatcccctttttagagtgcatcaaaagttggaataagcgcctcatacccgcccgactgaatca

SEQ ID NO: 15118 - DNA, 1363 bp, Oryza sativa
tcgttaaaaacctttctaggtaaaaacacacacctcgtgagaaaccctagaaagaaaaagagtacagcccatagctaaaatgttcatatcaattacaatcatccagttcaagggtttacatcaatttcatcatcaagatacatattctcataagcattttgaagctccacattctcagtagtatgctgactttttgcatctgctagctcccagtccttgatcactgccagaatttccaccagcctatggtttagacgccgccgacggtcctcgatgatcctgccagttaagctaaaagtagactcggacgatatagtagaaacagggaaggcagtttccccggttgttgcattgcttcgcataattctagtaatccttgttacatatgcaggtatgctaaaaggctaagctaccaaaaatcctgccaaattgctcggcaatttctcattgccggacgaagtccttcagcttggtcatccacccgacgtactccttggtttgcttggtcaccatgtaatcgtgcatgtagttggtggtcggcagagtgatccctctttgctccaggtacttgaataggcccttctgcacattcaccggtagctcgctgtagtagaaagaagcgattcgatgaggattatgagtagagatggtgctcaagaaggattgagaaatggagattgaaaccggtgttcttacgtgaattcagggccctcgtaagggaatttctcatctccttctgtggctgcattctccactattaacatgtcgtcgatggtgatctcctcacgaaaggctgtgcaggtgaactcaagtttgggcccagagcccttggagactgtcacctttagagacacgctgctatctccagcgctctcgtcttcctcttcatcttcatcatccttgctagcattcttgccctcaccctcggcttcttcgtcgtcaaactcagggcccccttctaaatttggcatgctgacaatgacctcaatcttctcatctttgtagtcccttttcagaataaccacactcatcccttcttcgtcaaggatttcaaaagggaagttttccggaacaggttcctgttgcaagaaagataaatgggtaagatgaaacacctttggaatattcaataacagatgttaaatgccttgatgtcaaaccagcatgtcaattttacagctagatgtcacacctgcagaggtaattttacagctttgatgtccattcattcattcacttttcagggttatgcggaaaggattattcaacctcaatgccagttctaatattgcccttgcctggagcttccaattgatcaaaatattgaacccaaaccatcacaaactctatcatcagtcccact

SEQ ID NO: 15119 - DNA, 699 bp, Oryza sativa
ctaattgttacaggctaacaaaatccttcagctttctcaaccataggaggtattcttcgttttccttgtagatcatgtactcttgcaagaattttgcggccatgggtgtgatcccacgcagctccaggtacttgttcaacgccttttgcagactttcatcgaggtcactgcagcagacagggcaaagcaaattgcacataagaactcggcgattaatagttaagaattaattagactgctcaataatttaggttttgttatcttactcgaaatcaggaccctcatctgcgatcatttcattgttgtcatcctctggtggctgcatcaaggacaaggtgtcgatgacgatctcttcaggatgggcagtgcaggagaattcaaggatctgtccatctccctttgagatggtgacggtgagaggaatgctggatttggagggaacctgaatctcttcgtactcagattcatcgctggtccatcttttctcacatttgaccttggcagtggcaggctcaggttcatcgtcactctcaaggctgtccatggaaacctgaagctcaatcttctcaccatggtaagttcttgtgagagtaattgcattcgagccctctccataattgattttaaagaatttaaagattttaaagggggagttattagggatctccttggcctgtatcagtatgacaatgaaaatga

SEQ ID NO: 15120 - DNA, 2606 bp, Oryza sativa
ctagatgtgtatatatatcacttcattttcttaagcaaataatgaagtttagaagacttagctagctgttagtctttgttatttttgctcatcacgatggtgtcagctccttcccatgtggtacgtaggtgtatatcatttctttttcattagcaaataataaagtctatattgattctcttaaaagattcatattgacgtaattgttagattcatattgatgttcctgtagcccatccgaaaatattttctcgccatcatccaccattctgccaggcttgagtcgttgatcgtcggcggcaagaagccaatgccaatccatccttgcatcagcgcccatactcgtctagtgaagtcgcattttacaaatagatgcaagcagctttcttcctcccgttggcagagggagcagagatcttcgtgcggccagcctctcttttcaaaaaatggtttcatgacaacaaactttggtttctcccgctaaagcctagtaaaaaatggtttcatgacaatacaccattgaatgatttcaatccgtttaaaaactgattgaatggtttcgacggcctcacgctacacaagctgctcgtctggggagccttcctgtttaactacccggtgatctcctacaccatcggcctgatgcagtcctcgtccatccagaacgaactgttcgtcgtctgggcctgcttcctcctcctcctcctcggcagcgccgacaccatgacggcgttcagcttcaatgacagcagccagcagacgaggtccatgatgaaccagaccctccacgtcgtgtacctcctcttcctcatcctctactacaaaggccagctccgcggcaccttcctcgtcagcctcttcctcctctggtgcttgagcgtggtgcggctgggcttgagggtcaaggcgtacctatgaacgaaccgctcccatgggctcatcagggagaaccaggtggtgtacgagtacatgaagtacgagccgctcaacagcgctggcattcaaggtggctcctcggagtacatctatctcgtcgacggtgaggaggtggagaaggtggacaatggggaggtcataaaagtgtcgtacaaggttccagagacggtggacgtcgaaaagtgtccacaagtgaggttaaggttcgcagccgatcatgtcggtcatatcaacttccctttacagtacgacaagtgccgagactttgtcgtcaaggggctcctcgccaatgacgaagacctcggcagggcattccgggtgatcgaggctgagcttgggttcctctttgacttcttttacgctcggtacccctcaatcaaggacaccctggctcctgaccttgctgtgtacatcgtgatcctggcgactagcttgttcaccctcttctctccagaccttctccgatacaggtcccattggcagcaacgctgccaacaacatccttatccatggctttaatctcgacctccttgtcacccgcttggtcattgtctggtacatcttcctcgagtcgtaccaattccttgcctttatcttctccgactggcacaaggtgaagatgttgtgccgatatgtacgcaatgagtcatggcaatggaggtcccgctaaaggtgttgtgccatttcactgtcaccaggtactggaaggggaccatcggccaatacttcatcctcgacaacatccaacctcactgggtcaagaccttcctctcatggttctctctcgaggcccaggcccttgattcatcattgatgactcgctccgtccgcttgatgccggtggtgctccgtgagctcaacaactgcgatggcaagatcaccgacgggaggatgtggatgtaccggacaggcattatcgacttgaacctcgatcgtgatgtcttgcacggtacatactgacatggcacatcgccacaagcatatgtgactatgggcttagcatggacaccactgctggtggcattccagccggagctggtcccggacagcacgtacacgagcacttcgatggcccgtggcacactgcagaatgcctgcgacttcctcgccaaatgcgagtccgccagtgacaagtatgataagctgatggatctggggcgcttggaccacacggagcacaatgttcggttcctatctgagggcgcaaggatcgccgtgtacctcgttgagcggatcgaggatgccgggaagcggtggaaggtgcttgccgccttctgggcaaacatgatgttgtacatcgccccgtcggatagggcggtcgcacacgccacgaggatggccactggcggggagtttgtaacgatcatttgggctctgctgtcacatgcccatgtagtagacaagcttcaacatcgtggcggtgccccgggattgcctattctacttgaagaagaggaagataaaagggcacaagcagggccggccctgatctgatggaacttgttagatccttgattctccgttggcaacttggcttgcatggaggaatgctaatcatatagtataatgacaattgtgggcagatcagatgcatatgcttggctcattggaggattctgatgcatatacctggctcactggatgatttgagaaggttctttcacaaatca

SEQ ID NO: 15121 - DNA, 1898 bp, Oryza sativa
aatcgatccaggcactacactaaatgttgttttcttctctctattttcttttttttttaaaaaaaaatctattttcctagcttttttatctcgttttctatgtgcacgcttctaaaactggtaaacgatatattttcacgaaaaaattatataagaaagttattttatatactttttttttaaaaaaaaacctaataattaattaatgatgcacgagggattatccaactacaagagccaaacacagcttcagatgttgtatcaaatcatagtgctagaccatttggagaaggagaattaatttcacaagcacaagaaacccatacgcaagttctgttgattttttgtaaaaacgaaatcgttgaaagaggacaggaggcaagtagtgtcagcgacagatgggtcccactaaacggtaggtataagcgtcatccaaaacccctcttcccttttcttatcccctcccctctcctctcttctctccttcgcttcgccaccgcgttcgccatggccttcgtctccgccgccgccgccgccaccgccgccgccgccttcctccccggcgtctcgtccgcgtcccgcgcaggaacacccttgctctcgctgcaacggcagccgctcgcgggttccctgcgcgcggcggcgcaggggtcgagcgcctcttcggggcaggtggtgatggagagcaaggtcaaggcgaagaagaagaaggggtccggcgccgggaacctccccggagccatcgacgcggagatcagggaggcgcaggactacctcgccatcgacgagcaggtgagagtgagacgcgcgctcttctcttgcgcgatactgtactactgtcatcgaaacttgactgatttggcgcgccaaatgagatattattttgtcatattggacagtgattttgtcttgtggggatgatgaatttttggtgaggttttgtcaaattatagtgctgtcttgcgtgaatgctacacgtcgactggtaactggttgataaataatgggcatctctagctaattgaacactacaattgggaaatatatttacgattgctttcacctaaaatagattacttttgcagtctcgttcggcgcttctctcttaatacagatcaattggtgactgatgacgtattgttacttcggtatgctggtggcagttagagaatagagaatttgttcatcttactcatgcatcgatatcttctatttatttattttatcttaagccattagtctaggtgtctgaattctttaagtgatagtttattggcaattgtttattgcaactggcattcagagagttgttaagactttagatttattccctgcgtcagctatgcaatgctcatctggttttcaaggatcctataactttcttgcatctattttgtcatgtttgacctgaatgtctggagagaagtcttatacccttgtgtaagcaaatcgtttcttaagcgttttccttgtttcaaatcattgaaccattctaatgattcttttaaagcggtatgactttggaatagacaaatagtgggactgatgatagagtttgtgatggtttgggttcaatattttgatcaattggaagctccaggcaagggcaatattagaactggcattgaggttgaataatcctttccgcataaccctgaaaagtgaatgaatgaatggacatcaaagctgtaaaattacctctgcaggtgtgacatctagctgtaaaattgacatgctggtttgacatcaaggcatttaacatctgttattgaatattccaaaggtgtttcatcttacccatttatctttcttgcaacaggaacctgttccggaaaacttcccttttgaaatccttgacgaagaagggatgagtgtggttattctgaaaagggactaca

SEQ ID NO: 15122 - DNA, 1923 bp, Oryza sativa
aattaatttgtcatatgacctctaagaccagtaccgtactgacacaaaaggattgatttgacgcattccatgtccatgatccagaaaggcagcttataaaagttgtagaatggttttatgcttttaataggttaccgatgttctggatattcatgcttagcattttattgatgttgtagcgatgttgcatgtatggtgttcttttcattatacagtagtatatgagtatatcacatcatggaatataatttcaattgcattctgtatgttggcagttacaaatatgctgttgcctattgactagtattgcttagtctgttaggctgtccattaatgctattgatggttacttgtttggagaggaatggaataaccgttgatttgtttgatgttatgcatgcattagtattttctagaacacaatataaataattgagctatatcgaaggctagaagtttggtgacatggactgttttttttcacaggcaaagttgcggagttcttcgtggtggtcgcgatactttatccagactggcttgagagagaatgaagggccattgaagaagtttgagcaggctgcttccaagaacaaatacaaaccagactgtcaaatcttccatcttagctcgtaggcgtgttctgatctaggtgatgtgtatccatgaaacctggatcgttgcctcgccggttttgtaagcaatatcctgtttacccccgttgacttgcgcttcttttacacggaggaattgtcacattaagagccagccagccttgagcataggtagcttatgtagagagatttgccacatgctgctagaaaattcttcctggaaagttaaattatgtgttaccaagaggtgcaaattgaagccctgaggatatatatgtaagaacttcacactgttgtaccctgttattcttcttggtgttacagttattcctggtgaaccagctgcagttccgtgagcagtttgtaatgtactcagttcaagagagagagaaaaaatatatatctaccctttgtctgctactctgacctagtagggtgtcattctcacgacttggatgatgcttaaagtcgacccaattctttctattgggatacctgagaacgatggttcaccagacttcggatttagccttttatcttttttgtcttaattatagggttagttgaggcctcaattgcaagcttcactaacaaacacagaaaaagaagagggaaaacacaacaaactccattacaatatacccttttgaggtcaggtaagatgtcccttgtcttcaaaccacatctgtgcatcattttttccctttttttttgtggctttcccttccttcaagcacaaagccattgatattctttatatgattatataggattggtctccctcccctaacacccagaccagaatcagcagaagctgtcctattttaaacctaattccaatcagaaaccagcagtcaccacaaaacccaattgccccctgatttgttcctgtgtgacaccttaaattccaatagctgtttcatcacaaaaaactaatgcaccttgtgtgtccccctgaagtgtaaacagcatctttgttctgcttacaaaaaatccattttcctatccacaagtccacaggcatgcgtgcatgcatcccatcatcatcttctccaattgatgtggctctctcatttgaccatttccttgtgctagctagctagtagcttagctgagcaaagctaagccagttgttatccactaatcagcattgattagtttagtcaaaaaaaaaatctcaaggctcaccttattatactaatctgcagttgtgcccttaaatacccacacgcctctctttcttcctctttatcctttgcagttgcaccaccaaacagagacagaggtagagagggttcttgctttgcttagc

SEQ ID NO: 15123 - DNA, 3363 bp, Oryza sativa
acatcccccaaattcccccatctccccgtctcggaattcgggttgtgctccactaaatccctcgctaatggcgtgctaatcccaccaccacccttgcattgcacgcggccgtataaaatcccgtgccaccgtatcattcactcctcccgtccctatcgcgtcggatcgccacccacctcgccgccgctgcttgcttcactcgcctcagatccgcgccgccgccccccgcgaatcccctctcctccccgaaccctagccccgctctcgggggttccccctcctcctccgccgcccgccgcgtccgccacttccatcggaggtattgctgctgctgctgcttctgcttctgctgctgcgttgggggggggggtgttccgatctgtgggctgtagggggatctggattccgcccgtgctgggggtgtgattttgtgtgggcatttgtttgtgatgacgggatgatgatattgttgggtgcgagcaggtgatcgatcgagcgggggtggggggagaggttgggcggcttggattggagagggctcggagtggatgtcgaggaggtcggtgaatccgagccggcgggtggcggatgggggattgccgtctgtcggtggcctgcttcaccccaagtcacgctcgccgcccgtgctcaccatcgccctcgtggtcctggtagttttccatctttctttttgtcaatttagttgttaggatttctcatgtgctcagctgacagaagtgtgcttgtttttttttttgggggtttcagggtgtcattattctgatcgcctacttcaatagcggctcaggtcagcttgaactccacttgaatattcttcttcacctgtttatttttgttccgtttagcttgtattgcaaaatggtgaaaaaaccgtagtgagagtaactcatactaattcactctgttcccttattctgttgattctctgctttctattaaagaaaggtagtagcaacttaaataatagatttggaggtaggggtgggcgtgctagatgccatcactgattgttgctgtcacaattagtgcacagtgacattgctgcagcattgtacctgcattttcttattggtactgcattgttgctgtcatgattttctgaaatatcaaaacaaaatcaacttgggatattcaattgttaactgagattgccctgtagtatgaatatattttgtgattttttaacgttgaattgtcctgctcctagagatagcaaagtggaccagctcatactcgagtgccaaatatcgtggaccagctcatacttctaattgtcatttttctccaatggccaggtgtaacagttactagcagagaagctgtgagcaggtctgaaggtatattattctttgtgtgccaaatcatatgctgctgtcatcttttaacctctcttaatgcattgttgatttatctcttcaatttcttctgatactcgctgcagtaagaaataggtgttgtgcaatccttcatataagcattctggagatactgcatttggttttttattctccatgaatgtttctgtctttttttttctttgttgatgccttcggtgttattcttcattaggccatgaacagtatataaagaattcaactggtatgacatgatcaacatggaccatgtgataattattttttcccctgctgaattttgacactgtcataccaatgtaatttggctgtctgagtgtctgatgtgtggtacaaacagcaacgcagtttactgtattatcctaagcttcatgatactaatagataaccctctaaattttgataaaatatattggaacatgatagttataacttataagaccctctctgggagggtttagtaattgatttttttaggaatctccattgtattccttttcacacgtgttattgggaaaagttttgtgcttctcattatctcaacctttcctttgcatttgcattcaggttcttgtacaccagaagtcatgcaagcacttccttatcttaaaaaggcatatggcaatgagttgcataaggttctccatgttggccctgatagttgtacagtagtttctaacttgttgaaggaagggaaggttgaagcatggggagtggagccttatgatttggaggatactgatagtagctgcaaaagccttgtgcgcaagggctttgttcgtatggctgatatcaagttccctcttccataccgccaagattcctttaaccttgttatcgtatcagatgctttggattatttgaccccaagatatctgaacaaaacacttccagatttagcaaggatttctacagatggtcttgttatctttgccggtatgtatttctttgagttaatcgcatacttgttgatgatcatagttgacacataaacggctatatttgtagatgtacatgatgattccccttcgtttaaatgtcatggtaggttgggcagacctgaaaggatagcatactgaatgttcattttccctagatcttacatttaaaatgaagcttcggttatttgatggttgggtgggcaatcattattggtatttttagggctttttaattggatgcattctaataagcccatagccccatacggagaatggctatagagaaaaaccaggcaatgggttagagagctattaatacccatgtagatatactattgaaatggtttactattaatctagtctattgctgagatgtacatattttatagatagcaccttactttactattgcgggtgctcttatagcctgctattgtacctgctctaagagatagaaatgatgttgactaaatggtcaaatgtaatgcgaatccgtgacacgagtttgaccatttggtttcctgggcaggaatgaaatggaaatactgggtgctaatcagttggcataataatccagagagttgcacgatggagcattcgttagtgttaggtacactaaaatttcagatatagctaccaaatttcctgtgttgaccattgacaattttccagacctatttgaccattgactagtaataacatgtactagtagtaagtactttcagcccagtgggttgggccggaacccaccgggccaggccgacggccagcgaagcaaagaaaagaaaaggaaaaccaaaagaccggtaggtagaccccacctgtcagtgaaagcaggcgacggcgaccgacatcccccaaattcccccatctccccgtctcggaattcgggttgtgctccactaaatccctcgctaatggcgtgctaatcccaccaccacccttgcattgcacgcggccgtataaaatcccgtgccaccgtatcattcactcctcccgtccctatcgcgtcggatcgccacccacct

SEQ ID NO: 15124 - DNA, 2160 bp, Oryza sativa
taaaacgtgttcaatagtttaggaaatctggtactcgtagttcttatgatggtagcacacactttttcaccgactcccttcgtctaaaaaaaattatacgttacatccagtgctaaattggtattttatgggacagagggagtaactctgaacatacaaacactaagatatatcaaataaaacatatttctccgcaaaataattatattgaaacttgtagtagcaagaaagtgaaccatttccattttttaataaaaaaataaaacctgaatcatatcagaatggctggaaaaattccttttattttctcctcctttatactaggaaagaacagccgacgtggcgatcaacgattggtcgactgagcaagcaacccacgaacagataagacggataaacacaccgtcgctaaagaagaaacacaaagaaaccaactccgacgaccaccggagtcggagagcatcaagaatcgacgacgatcgatcatggccatccccaccatcctgggcagtctgaagctcacgccatccccaccctccgccacgccggtgcgctcctccgcctcctcctccctgcatttccacctcgccaacgccggcgccgccgcgctcgtcgcggcctcgctcctcgtcgccgacccggccctggcattcaagggaggaggcccgtacgggcagcaggtgacacgggggcaggacctcaccggcaaggacttcagtggccagacgctcatcaggcaggacttcaagacggtactctctttgattgttcccattgcctttctgtttcagttcttgaactcggatatgatcatatttctgtagataaattgtaactgttcttgtgggtgaattactgaattctatgtccagaagagtatctgaattgtcagcaaatgcaattgcaaagcttatgctgttttcttggtatgtttttgttgcagtctatactgaggcaggcgaacttcaaaggcgcgaagctgctcggcgcgagcttctttgatgcagatctgacaggttctgatgctgtgcttgtgaatttgttagatgttccatttatcacagtagttgtagtgattcttccccaatgtgaagttctgaaatggcaaaactgatgttttggttctagttgcattgattattcagagttttctggtgataaattcaggtgctgatctctctgatgctgatcttagaggtgcagatttctcactggcaaatgtatcgaaggtagtactgcatattgctcaaagaaaagcattagcgatagcaagctaattgaaatgctactacattccacattgaccattgcattgttcagaaagcctggattgttttttcctttttactgattagaccagtaataaattgatagcaatttggcattggcatcatagcaatattgaacaagcttgcgttacataatataattggtcattacataagtcctcactttcttcagaaagtcattgaccactttctgattaagttactaccagtttgtcaagcatggatttcacaggtttgcagcacaaatagtttgttactagcttgcataacctagtgacaaactgacaatcgagtgatggtgtgtctcttgaatcatttcacaggtaaatctgacaaatgccaacttggaaggggcacttgccacaggaaacacgacgttcaaaggttccaacatatatggagcaggcaagttactggtcctgtctctctgatggccatgccaaactaaatgactccttttatctgcaaactatcggattgttgacatattaatatgatcaattattattttttcaatctctaaccaacctcttactcatctacaaaatgcttcaacagagttttgattttgtcagaggctgaccaaaattgcattagactgaattgactattgtttgatgggatcatcaaacatctaagtttctctctctctttttttttggccttccagattttacagatgttccactgcgagacgatcagcgtgaatacctctgcaaaattgctgatgggtaagtaaccaatgttgcaatcatgcacacaccaatggctgtccattgcacttattttgtgtctccctgtatgtacattacattgagctcactctagctacaattaactttttgcatcagggtcaatacaaccactgggg

SEQ ID NO: 15125 - DNA, 1335 bp, Oryza sativa
caagacctccatgaaacagcaccaccacccagtgtgaaaacatatccactagtggctttgatctcatccacatcagagatccagttagaatcactataaccctccagtaccgcaggatacccagtatagtgaagccccaattccacagtacctttcagatagcgcattactcgctcaagcgcacgccagtgatcatctcccggattagaggtaaatcggctcaacttgcttacagcaaaggagatatcaggcctagttgcactagccaggtacatcaacgagccaatgatttgggagtattccagttgattcctagcaattctcttgttcttgcgaagcaacaagctaggatcataaggtgttggagaaggcttactatcaatgtagccaaagcgattcaagatcttctccacataatgggactgcaagagtgtaatcccattctcacctctaattagcttaatgtttaagataacatcagctactcccaaatccttcatatcaaaattttgagacaagaatgatttaacctcatttatcacctcaagatttgtcccaaatatcagtatgtcgtcaacatacaagcacaaaataactccctcacccccaccatggcgatagtacacacatttatctgcctcattgactgcaaagcctgcagatgtcaatgttttgtcaaatttctcatgccattgcttaggagcttgtttcagaccatacaaagacttcaacaatttgcacactttgccttcttgaccttcaactacaaacccatcaggttgatccatatagatctcctcatccagctctccattaagaaaagctgtcttaacgtccatttgatgaacgagaagaccatgtgaggctgctagggaaagtagcacacgaattgtggtcaatctagcaacaggtgagtaagtatcaaagaaatcttcgccttctttctgagtatagcccttagcaacaagccgagccttgtacttttcaatagtaccgtcaggcctaagcttcttcttgaacacccacttgcaccccacaggtttacacccatagggtcgctctgtcacctcccaagtcccgttagcgataatggaatccatttcactacggacagcctccttccagtagtttgcatcaggagatgcatatgcttctgaaattgacttaggagtgtcatccacgaggtacacagtgaaatcatcaccaaaagacttagccgtcctttgtctcttactccttcgaggagcttcactgacatcctcctcagagacaagttcatgtgtatgttcagtttgttctggtggtgtgattgaactgggaattatttcagagggt

SEQ ID NO: 15126 - DNA, 696 bp, Oryza sativa
catccttttgttaatgaccatccattactcacagacttacattgggcatgtgctgaatctgttttgtgtttccttgaacaattttatgattcaactgttgttttgtctggtgtttattatccaacatctccattaatcatgcatcacattttagagattgctggacatctaaacacatatggcaatgttcaaaaccttgcaaatgttgttggtcccatgaaaactaagtttatgaactactggtctaaaattccaattctttattcatttgcatttatcttggaccctagggccaagattagggggtttagtaaagtgcttcagattatggctcaactcattggtgatgattactctgcttatttaacaactgttagagcttcattgtctgatacttttgctaagtatgaaagaaagtttggttctgttagattgcatagttccactattccaggcccttccactggtaagaaaaggactgcatgggggaagatttttggttctgttgttgctgctgggcttggtgctggtaatgcaagtgccagtccaagtgctggtaatgctggtgccagttcaagtgctgggcttggtgcttgtaatgctggtgccagtccaggggctgggcttggggctgggtcattaaccaagaatgacatctgctactgctttggttcaggcagcttcttcaactgctaa

SEQ ID NO: 15127 - DNA, 745 bp, Oryza sativa
tgcatatgcttctgaaattacttaggagtgtcatccacgaggtacacagtgaaatcatcaccaaaagacttagccgtcctttgtctcttactccttcgaggagcttcactgacatcctcctcagagacaagttcatgtgtatgttcagtttgttctggtggtgtgattgaactgggaattatttcagagggttggttcgaaccactatgtgtatccttcattgggaaaaagctctcaaagaaggtagcatcacgagactccataattgtaccaacatgcatgtccggtacctcggatttaactattaaaaatctataggcaatgctatgatgagcatatcccagaaaaacacagtccacagttttaggtccaagtttgcgcttcttcgttattggtacattgactttcgccaagcacccccatgtgcgcaaataagaaagtgatggttttctaccaatccatatctcatatggtgttttgtccttatttctgttaggaactctatttaacacatgatttgaggtcaacaatgcctccccccaccatgccttaggcagtcccgcggtgtccaacatggcattcaccaagtcagtcagtgtgcgattcttcctttcagcaatcccattagactcgggagaatagggaggcgtcctctcatgtatgatgccatgttcctcacagaataagtcaaactcgttcgagaaaaactctccaccacgatcagacctaagcctttttatctttc

SEQ ID NO: 15128 - DNA, 686 bp, Oryza sativa
gcgaattcgagctcggtacccatctaatttttcttgagctctaggaaaagcgtcacggaagagtgatgtgttcagttacggcatcatgctgcttgaagtgttcactgcgaaaagacccacagatgctatgtttgtgggagaactgaacatcaggcagtgggttcaacaggcgtttcctgcagagcttggccatgtggtggactgccaacttctacagaatggttctttttcttcttcaagtaacatgcatggcttccttgtgccagtgttcgagctgggtttgctctgttcggctcactccccagagcaaaggatggcgatgagtgatgtggtcgtgacactgaagaagattaggaaggactatgtcaaattgatggcaaccacagtgagcgttgtgcagcattgattttttgccgggtccggcgaaggaaccggcgaccaaattttattaagattgggagggaaaaaaaatcaaatacaagtagttctcgcttgcaacgacaggaggctgtcgaattagactgtggcaggaaccacaacccggccaactaaagaactggtaacgtcaacacaacagaaagaaaactaagaactgcatttgcgaaatagcctgctttttccacactaagatctcttttttgatagcctttgctaactggttagggcttatcgatctttggttgaaa

SEQ ID NO: 15129 - DNA, 668 bp, Oryza sativa
agctcggtacccgtatactaaccatggtcgggatgtggatgaagccctcgtcggcggtgaactcgagcacgccgcatagtacgaggtctgcagcgtggtggcgttctgaatctgaaactgcatcgggtactcgatgtgcagatacccttgaaagtaaattaaccacaagcaataacatcagtaatttaaccaactaatttattaccagatgatcaagtatggagacgtgtcactcaagatgacaagtctttctggatgagcgaaggaccgaggtcttgtataattttcttccgcgggcggcggctacggccatggagatctcgcgactcgcgggtcgcggccatgtgccggtgaggtcggctgcttcgccggcgtctccgcctacgcatctacgcctgattgatcccccccaacctatctccactgtgctatcgcgtttcttgcggacttgcggaggttgtggttgaggcagtagcctgtggggcggtgatgcggcacccagatcccgctcgtacaccgattttcggtcgccatcgccgggattcgtatttttcgggcaaccccttgtcgagccgcccgtccttgggcaagatctggtcgggatcgcttgtggtaggtgttgggcacctggggggtagaaagacagcatcgttgatgtgctttgaggt

SEQ ID NO: 15130 - DNA, 536 bp, Oryza sativa
tgctggatgccgaaatgagacccaaaatagcagattttgttatgaccaaaatttttggtgaaaaccagcaaaaggcgaatactaaaaaatccgaggacatgcagtacaagagaagaataatcttaaactttccaacgctgcggttaacagattcacagaagaaagcatatgccttgatcgaaaaaaagaaactaatgagacaagcaggagaatcgctaagggactacccagacatagagctaccaaatgctgccgagatagaggaacttggtaacagacttataaacgaagagcttaactatgacaaagcccaactgaaggatgagcacctcgccatattaaacagccttaacacagatcagaagaaagccttcgatgcgataatggaatctatcaacggagggcaaggaaagcaaatatttgtggaaggctatggcgggacaggcaaaacatacctatggaaagcactcacgacaaaactaagatccgaggggaagatagccctcgcagttgcttcatgtggtacagcagcactt

SEQ ID NO: 15131 - DNA, 5673 bp, Oryza sativa
acgcccatgaacggtggtgtgaccaaccaaccgtataggcgaggacaccagtcggcggcgacagaggcaggccggcggtgaagtcgtagacgcccaacagcggcggcataataggccagccgtgtaggcggaggcaccactcggcggcgacggaggcgggccggcggtgaagtcgtagacgcccaacagcggcggcataataggccagccgtgtaggcggaggcaccactcggcggcgacggaggcaggccggcggtgaagtcgtagacgcccaacagcggcggcataataggccagccgtgtaggcgaaggcaccagtcggcggcgacggaggcaggccggcggtgaagtcgtagacgcccaacagcggcggcataataggccagccgtgtaggcggaggcaccactcggcggcgtcggaggcaggccggcggtgaagtcgtagacgcccaacagcggcggcataataggccagccgtgtaggcggaggcaccactcggcggcgacggaggcaggccggcggtgaagtcgtagtcgcccaacagcggcggcagcggcgcacactaaccgtggaggcgtgtaatccaatcggccgcgacgagggcggccggcggtacgtgcataaaaataacagatcaaataataattagtgatctgtcaattagaagactagaaaacccaagattaatctaatttatgtaagaaaattagaacgataaacctggtaatggcaaatactagctggtgaagtggactcgtggccgattgactggatagcgagacgcctcgagtccatgaccagcatcaatcgcctcagtaatgccgcttgacttgttctcagtatcctcctccaaaagtatgctagcactggccatgtgcttgtcgcggacggcttgtgtatatttgtaactagttttagccttgatcaatcgcggccagacgctagcaaatattgcggccagaccatctgctcagacttgttgcttgcatgccgtactaaccgtatccgtttaggattttggcaaacaaaatacagcagccgctgattggaaaatcctgatctcttgattcaaggcctctggtagtcgaacttttgatgacggatataccaactcagaataactcgtccaggagcatacatgactagataattccttctgttgacatgttcggaatcgatctctgcaagttgcagcgatcttaggcagcgtgctgatgccggagattgatttcgccgaactcgtcaaggtttgatctaggtttttcctgttgcatgctgacgctttcggcgtgatattacaaatcaacgtgtatgtgtagtgatcttcctgatttgatgtgggccagattcccatgcatgatctcatgcgtgtgcatatcagattggctatggaaccttctggtctcgctgatcaagagaagaactcggcggcggcggagattaaatccatcaaaattgccgagattaatcctcccagggcccggttgactggcttgatctagtcggaagtttttggcaacgttcgttccagccttttgttgagaataacatggcctgggatgaaggtgacactcgcggcagccacagtagattgagtctgacgactcatgaagttaattccatcacacttgacgatgatattctcgacgcacccctacctggcgcgccaactgtcgaaacatgaattcggcaataataaaagggggtagcgcacgagacctaaaagtggatggatgcggagacaaaggatttagacaggttcaggccctctcaatgagaggtaataccctactcctgtttggggatttgaatccgccgagtatattatagatctgacgatctagttgtctcatatatgccccctagagggcctcctgcccaccttatataggatggggggcaggattacaagatagaaaccttaaccaatacggtatctgtttcctaaatcaggactttaggccgttccgtaatatacaaggaaacgtaacacccaagtcatgatctgttacatattacatagatataagttatcccctataactagtcggataaccatgccgtgtgggtatggggtacccataatctccacacctgtttttctaatagattaaatcttcggaaattcataactaaaacatcgtaactcggttttgagtggttcaagttgctaaattcatctaaaatcatgatctacatgtttgtttactttatatgtactgtttatgcttgtttttgtactgtttatttggtttttattagtctttttcttcgttttgcgtgttagcttgtcgtttccgtcgttgcgaaggttcgtgagtgcgtcgggagtgttcagaagattaattgaagaccgattattgcaaggcaagtcacacagatcctaaacacaatcctttgagcatgttgatcctatatttaaattctctatttatttcaactgtgcatttattttcgaatgtcactgggtggtgtgaatctattcctttgttatggcctgtttggattctattccttgataccttgggatattataatttgactagttgagctttatatatattggttcaactagatgttagatataattgcttagccatgcttagaaacattagctcactaatgggatgaatcatatatactacattattatttatggttatatttaatggtagctcacgatggttaatcgtgttatgataattaattggtaattaaaatatgattaatggtgggttgtgagcacatggttttgaaggtcgtgctcatggcaattaaggaccggttcgtgaactactgttgtgaaacattaaccgtgccaaccacaagccagcgtgggcaacggctttaccttttgtatagcatggttcattgcggagcaccagactgagaagtggcggagataagcccacgggggtcactggggagtccatgccttgttttataaaggggtgattatgatccaggaatggtgcactgtggtgagttgtgttgtgcagagggtattgtcacagcctctattcgggtactttccagtatcgcgacgcatggtagacatgatgttgaggctgtgtcttgtgggtacagtggtacacctctggccagagtaaaactattcgaataaccatgcccgcggttatgggcgggttgagcaatgtttttcgtgattagtctcacacctctcacaataattatggatgttatacctagtaataatttgcttagctcctggtttggagttagatctgtacagccgggtatggttgttcaggatggttgggcctgtgcagcatgggtgtgttgttcagtgttgattaaaatttctgattaattactccactgttttacttctcttaaatgttttgctaaatgctgcttttgcaaatgagcctatattatgccatcctttggtatccttgtgcacttgcatatttgctgtgtggcttgttgagtatgtcatatgctcattcttgcaataatcaatcaacctcagttgaagaaaaaggatccagaaggagaagacgtttggcttataccccagttgagctgcctgtgggagtggagctgaagccatcgctagaccgttatttcgctgctgttttcttttcttttgtaagtgtgtaacgttattattatgatggatttgtatattaaattgtcagtttgtgtacctcggctgattcctggacgaggattttatgcacaaataagttcggaaattactagtgaatttccgggcgtgacagtacgcttgatgctgttcttgcatttggcaaagcatgtcttggagtcgtgtcatgttctgtcgcatggcttccatgtcggctttggtttgtgtctgggggtcagagttgacttgggcttgcacagcggcgagcgcagttggggccgctgccagctgtgacggagcggcttggggcaccagcagttggcttgtcggaaggatctccgccctggtctggagtgccctcgccgccgcagccgccttcgccatgtcaaccgtgttcggcacctgcacagaggtagcaggggccgaaggcggtagtgatggcgcaggtgcggaagcagatgtgtcacaccctgaaaatcctaaatttataaattgttgtttaaatggaattattagaaatgattttaaaagcctagaagaaaagatctaattttaaataataaattccaatataaaagtgggccagataaaattttattaaatacttcactttctttgaattgtgttatgcgaagggtattgtcacaatctcttttcgggtacttgttaagtatcgcgacgcatggttgacttgatgctgaggttgtgtcttgtgggtacagtggtacacctctttcacttgtctttcgtgattagtctcatatttcacaccataataaatgatgatgaaaataatttgtttagctcctggtttggaatggtatattcctagtttggagatagaactgtgcagccgggattggttgttcagaatggttgggcctatgcaatgggtgtgttgtatagcgttggattaatattgtttaattaaatactttactgttttattaaattctgaagtatttattaaatgccatttatgcaaatgagactatattatgccatcctttgttatcccttgcatttgcatatttgctgcgtggcttgttgagtatgtcatatactcaccttgcaatcattcatcagaggaggagttctacagtcatgccgaaggtgtggaggattaggcgtagccctggtcaaactgcttgtgggatggagtcgcctgcgctgtttattttatattccgctacttagaactttattgtttgagaggaactatctacctctgtaatgactttatattcgcttattaattagaatattaattgcactctattatcgatttgttggataaatgtcttaactccctcctttcacttgtctttagatgccgtgcttcaagcctgagtacttgttcggttctgagggatttgtccaggagttgtgtacgatgtccttcgccataggattcgggactgcccctttgtatgcccagattcctcatgatcgtgatgaagagaagtgccgtgtcaagatcaccttgaacagtaatcgtgaagatatcccatcggtgatgttcgaggctggagggggaaactatcttcatgcctgtcaggaggtggcaaggatcaccataggagagctctgcgaccgctacagtgatcagttggccgacactgagtatcgctaccatcctctccaaccccagggaagtgactgtggcagctatcttgaacctgcagggattgagaatgatgctaccacaaggcatttggttgagatgctgtgggccatggatgagtcccacgctgaagtcgtgatagctgctcaagatcgcgaagatcggaatcgtggtaagaactgcaagctggaggacaaggttgatcggttggagaaggaattagccgcattgaagggagaagcaccaccacaaaaggccagggttcgtcttaccgcaaggaagagagctctatttgtccctcgctaccagttggcgcctaaggttcgtgtggtggaagaaaaaaaagctgccccagtttcagcggatcctcctgtcgttaacgtaagtgatgatgatggaaaagattcgaagcgcacccattcaaaggtcgagtggggg

SEQ ID NO: 15132 - DNA, 11230 bp, Oryza sativa
ccaacggctattgggttcaccttttttcttaggacaagatgaccaggcaacagctccgtcggtcgaacttttttgttgtaagttgccgaagtgcctgtggcatacttttgcatgtgctcgagtgcttcgactcttaccccctccaagagttcgagcgacaactcgcgcccctcttcgcccccagagaacgtcacccttggtgagttagcccctagctctattggggtcattgcctcatcgccatagaaaagcatgaacgggctgaacttggttggtcttgtaggggtcgtccgaagggcccagagaacagatagtatttcctctggccatttgcccttagttgccccctccagccttttctttagtgcttctaggattttaccatttgtacgttcggctgctccgtttgactgcgggtgcgcgaccgatgcgaacctgatttccaggttaagcccttcacacatctctctgaacttgtcagagtcgaactgcttgccgttgtcagtgatgaactcttttggcactccgaaacggcaaacaatgtttttccatacaaacttctgtactgctgccgaagtgatcgctccgaggggttcggcctcaatccatcgagagaaatattcaacagccacaattgcgaacttgtacccatttcatgccaccgggaacggcccaatgatgtccagaccccatctggcgaagggccagattggcgcaatgggctgcaactcatactggggcgtggtttggcttcggccatgacgctggcaactttcgcacttcttaatttgctcgacacagactttcaacacaatgggctagtaaactccttgtctaaacactttggaggcaactgttcttgcggcttggtgcgcgccacatagcccctgatgtatctccttcgccatttcctcgccttcggcgaaagagatacatcgaagcaagggttgaagtaccccagagcgatagagctggcccgagaccatcttgtactttgtggctctgagttgcaagcgttttgcttctgcttcgtcttccggaagccagccagtttcaaggtgtttcacaaacggggttcgccagtcgtatgggtcttcgcccagttccaattggtcgattgtcatgacttccaagctgtccatgggcacacttggtgcatataggacttcaaaaaagatgccaggcgaatgtgggccaccaaaagcagcagatttcgccaaggcgtctgcttcctcgttctggcctctaggtaaatgttcgaccgttatgccagtgaagcatttttccatggactgaacggcctccaaatacttcttcattccttcttcctttgcctcgaaggatttgtcaatatggcctgccaccagcttggagtcggttcggattagcaagcaccgaacccccaatgctttcgcctttcgtaggcccagaagaatggcttcgtattctgctgcgttgttggttgtgtcgaactgcagccttgctgcataccgaattggcgcgccgtttggcgaagtgagtactgccgcaatgcctgctcccctatgtgaccacgaaccgtcaaagtacatcacccagggctgttcgacaggctcggggtcgggggcgaatgctgatgtccattcggctacgaagttagccagcacttgagacttgacggcagtgcgggcaacaaaatgaaagttgaaaggggatagctctgccgcccacttgctaagccgtccagtaacttctttaccccagagtatttcgcccaaagggtactgtgatggcactatgactttgtgggcctgaaagtaatgcttaaccttgcgtgaagccatcaccagggcgtaagcgagcttttccattttgatgtatcttgtcttcgctccttgcaatgcttcggagacgaaatagatcggtttttggcctgaatccgtttcttggaagagagcagcactgactgccactggcaaagctgccaggtatagtagcagttcgcttcctgatgctgcgctgatcagagctggccggctttgcaggtattgctttagctcgttgaacgctgcttggcattcgggagtccagttgaattttcctgcgccccggagggttttgaagaagggcaaacctctttcggctgcctttgagaggaatcgaataagtgccgcaattcggtccgcgagcttttgtacttcacgtatgctcgacggaggcttcatttgctaaatggcatcgattttctcgggattcacctcgatgtctcttttagaaacaaggaaacccaacaacttgcctgcgcgaacgccaaaaacacacttctcaggattcagtttcatacccgctgcgcgcaagttgtcgaaggtctcctgtaggtcggacgcgtggtcgaaagccttgcggctttttacgacgatgtcgtcgacataagcttccatgtttcgccctaactgctttaaaggaccttgtacactagcctggcgaaggttgctccggcattcctcagaccgaaaggcatcctaagatgacaaatggtgccgaacggtgtgatgaaggctgtcttagggatgtcggccgggttcatgtgaatctgatgatatctagaatatgcatctaggaagctcatgagttcgcagccggctgtcgaatccacgagctggtcgatccgtggcaagggaaaatcatccttcggatatgctttgtttaagtctgtgaaatcgacacacatgcgccatttgccatttgacttccgcaccagcaccggattcgccagccactcaggatgatcgatctcttgaatgacccctgccttgagcaacctttggacttcggcttttgctgcctcctggcgatcagcggacatcttgcgtagcttttgtttccttggcttggcatccggcttgactaccaggtgatgcatgatgagatctgccgaaacacctcccacttcaacagggccccaggcgaagatatcaatgttctttttgagtacctctaggatgttcttagcttcttcttcgcccatgtcgccccccagtgatacgagctttgtggggtcggcatcgtcaatctgcatcttgactatcttgccgtgaggggcgggctttggcgcgtgtttcgcccggtcatgcggttcagcctcaacattgtgcactgttctgttgattatggccaaatcgccttttgaagcagccgagggctgaagccccttgaccacgatcactcctgccgggccgggcatcttgagcttgagataattgtgatgggaaatggcttcgaacttgttcaaggttgcacggccgaagatggtgttgtagttctatgggatgtcgacaacgtcaaacaatacttgctcttcgcgtctgttttcccccgtgccgaaggctactatcaagtgtgcttggccaagaacttgaactgcttctccgccgaatcctcgtagcgatgtcagtgctggggtaagggcttgggtagtcaaccccatcttggcatatgcttcggcaaagataacatcggccgaacttcctccgttgactaggattcgtcggacctcgaaaccagctatctcggctgagatcaccagaggatcttgatgcgggaacattactccttcggcatcttctggcccaaaaaagatttgctggttcagatactgcggagccccttcgcctgccgaagtgatattgtggaccgttcgcagctgcatcttcttctgtcgcttcgacagttggatcggcgggtcggcccttgtaattacttggatcactctgtgttgcgcatcttggcgctattcggccgggggtgcttgttcttgagctacttcatgagttgcttcggccgctgctccctgctgcgtccttggatcttacgcgttgccacgttgccgaatgtttcggcattgcttcgtggtgtgcgaagagcgtccgtggaaggcgcagtagaggtctttcggaccttcttgcggacaggctgctgatggttgcttgcttgctgagcgtcgaactccttgcggagggcttgcacttcttcgacagccatcacaactttgcccgcacggtcggttctgaacttcctccaggtcatgggggcttgaccttgccttggtggttgtgcttggaccgccggctggggctggcgaacaacaagaggaggtggttcggcaacttgaacttgttgttgggcttgagcaacggcgatggaagccttatcatactcagcttgtattgcttgccgtcgcttggaatcctcttcgccccttgcgaacccgtcaatgatgcgaagtaggtgttcaagcgtctgcggctccttgttggcgatttttcttgtgagttcgccctcatgtaaaccggccgaagcggcgtttatgactgatgcctcagttatgtcttgaacttggcaccgggcttgcgagaagcgacgcatgtacttccttatcgactcccccggcctgtggcgaatgccgagtagatgttgctgcgtcttcggctcctcataggtgcctcgaaagttaaggacaaaaacatcacggaattgctcccatgagtaaatgctattggctggcaaattgaaataccaagagccttggtattttcgtcgccatgagccgtttcgatcgcggactcataaatggagaggaattccttttggtcagtttcgcctgagtagcgtgggacgggtgggaacttgaattggggtgggattggacgggtcttgattcccccactcagcggtagccccttttcgccccttgccctgttcacggcaccttgctgcgggtacggcgtggcgaagggcgaaatcacggcttgcgcgtgaggttgggccatggcattcggctgcccggccccgattggtgatgcttgctgagccgccatgaatgggtcaaaagttggctgtgaccatgttatggcgacctggtttggggcttggtttgctccgaagcctggcgttggtgcttgcggccgaacggttggcgcctgagcagcattgatagagtcgaactgcggtccttgactgcacggcgaagcccccagacctggctgattcgaaggcaaccaactaggcgcaccttgacttgtattcccctccgggcgggccgaaggggctgtacttgaaatgttgtggggttggctgagctgctgaaggaaagcttggagctgcgcctgcagagccgaagccccttctaccaatgtttgcggcacttggccaggcggttgaggatgtacttgggcagcgaccggttgagcttgtagttgcacgtgaggggccggatgcgctgctgtggttgatggctgcccggcgaagtacattggcgcttgcgcgacttgtggcggaaggggctgggtcggcacttgtggatagacttggggtgggacatagccagcctactactggaggattggtgccgaagtgaccttggaccgccttgccgcctcgtacgtgtcacatcttgatttttgtttcaggatttataaattatttaataaattattattagaatttatattaaatgttcattaatttacaagtgaagttaaacgtgggaaataaaatttcctaaatataaagcatggatggatttaatttttattaaattctccatggttaattatactctctggaatattctcggatttttcggagctcaattcctaatttttaatcatacaaagagcatttcagtaattacccacatattaaattaatcattaaatggtctaattataatttttttaagtactttgagtgtccaagtattttcaggatttttcttgaaattatttgagcattggaagtatttttaacaattcaaagatcatttaagtgattattttaattggaaaagtaataaaattctcctcccttgtcttaggctgaatcggcccattcctttccttcctctctcttccgccggcccaacccgagcctgcatcctctcttcttctctcagccaaagtccggttttgctccctcttctaatcaggctgagaaaagaaaagcccggcaagaagtctactttctctccctgcgctactgttcatcttccaactcaggcagagcccgagccagccgtgccgtgcacagtgccgccgcctcctccttccaaatctcgcctccccgttgctccttttttccaatttagttgaggggaaatattcctcttatcctcctctatctttaccccaaaaatcggagctaatcgttgagtatcttatccgaatcgaactcgttttcgagtttatctccaaaaccgagtgtttgatttcccggatcgatttcttgcgggaggagtccgatctcttcaatccaaggctataaataggaccccctagtcctcctctttcgtttgcccctctcccgtggtctcccgtgccccgtagcctctccgccgccgccgccaagttcgccgtcaccgccgtaaggtgcgccgaggtgtgggcaagctcggccgctccctccccgctgtcgccggtcaccggagccccgtcgccggccgtcgtcgttcgtcgtttggttcgagggtgagtaccgttaggttcgtctcgtcgtcctctacgtgtacatgtcctccaaagtcgcagccgaccatccaatctccggcgaggtcgccatcttggtccggccattgatgaggtcatcatgacgtcatcatcgtttttctttttcctgttgtcgaaacatgaattcggcaataataaaagggggtagcgcacgagacctaaaagtggatggatgcggagacaaaggatttagacaggttcaggccctctcaatgagaggtaataccctactcctgtttggggatttgaatccgccgagtatattatagatctgacgatctagttgtctcatatatgccccctagagggcctcctgccccaccttatataggatggggggcaggattacaagatagaaaccttaaccaatacggtatctgtttcctaaatcaggactttaggccgttccgtaatatacaaggaaacgtaacacccaagtcatgatctgttacatattacatagatataagttatcccctataactagtcggataaccatgccgtgtgggtatggggtacccataatctccacagtagcccctgagaccttcacagtcggaaagataaccttctctcgaactagattactccaaagccgagtgcttcaatcatcttcgccatggtctcccgagtacttttaccaaatctgaagactgtggagggctgaaaaatatagtcaggtgcatcgactagatgcacctaataggtgtaacccccgactatgtggttaatcgaacaaaccaaacatatagtcaaggaataaataatccaaccaaccgagtggttttgataattatagtcaaccaagcgacttaatattaatatgtagcatatgcggtgtgaatccctgaataatatgatccaagtgatataccgactgttttgtaaaatatgatgaatgtaacctaaagttggctacattattgaaaattcacatagcaaaacagctataaagaagcttgtatgttgtgaataaataaattcccaaagtattgggcatacgccatgcgcacactgctttaacagacgtgctttagtccctaaaagacacatggtttcaccacacctggaaatatatggcatatgtggtgtaaaatccgagtaaataaactcataaaggatttaccaaccgtctagaaaatgaccacaatatataatcagcctaagccataatattggtcaataaaaaggcacacttacgtggcgaaaagcaatgatattgtatccaatcaattgcttaaaaacccaaacagcaccttgacttatataaaaaagtcagcgggacagctatataaagctttactgtttgacaccttttaagatgcattgtaccaactcctaaaaagttaagtaactgcggtataaaaggattttaaggtattgggcacttgatcacgcgcactttggcctaagcaaaaagtgcctaagtccctaaaagaacgtgacaggccacacctgaaaatatgggctgcagacatattaggcctaggccaaaaaatatgccttcgacaccctataaaggatgacgcatgtaacatgctcccgagtaataaatcttctgggtaatatagaccaagtgtagctcatatgaatagcttctgatctgaatgattatcccttatgggatactccaaaataaatataataattgaatcccgactggcgcaagtattcggttgatagcccttacggggaataataattggtccagtctttgagcatagaaaatagactcatgactatgaatccatgtggaatgtatccggaacaagtccaaattggagatataatcctcacgcttgagttgatgagcccctgagcatatagcttgtccttctgtcatagtcaaaaattgtctattggcaatagctgacgcagtcggcatggagatgaaatgaccaacatgaagacgaaattgctcatcagaagtaacggaagatgtcagtggtagtaaaaacagtgacaccaatcaaaggtaatgaagttgcataaccatggaggcgaagaaaccagtcggcaacagtcaggtcagctagcagtgaagatgtaggcgcccaacaacaacgaaagaacagtcggtgatgacaaaagcaaaccgacgatgaagacgtagacgcgcatcaacagtgatggcgaaatccaccaatcatgaagatgaagaaaataatcggcggcgacaaacgcatccaacggtaatgatgattaacggcaacagagatagccgactatgatgacgaagtttcccatcaacggcagcagagttggctatgttgatgaggcttgacaagatgttgatgaagatgacgatgtcggtgatccagtcaatagcgatgtagcagctgatgataacgatgagatcctctatcggcagttgcgtagtaggccaaccgtgaagacaaataattggaggagagttgatgttgttgcccaactcgtctaaaccgaaatatttgaagttgttgaagcagaatgtctgttccgaagcaaagatgaagataatgactcctggagttgactcattggctgattaattgatttcttcagcttgacataaaatttgtcaaattttgagccttatatttgtgtagcccccgactctttggttagttgagaaacaactgaacatagagtcgagaattatagcttcttgtcgtcgagtagtcattgcttgattgaagatatgtgttgaaggtgtccaagtagaaatcctgaatattggagagtcacttgttgtagtaaaatatcatggcattgcatgccgagatgtcgaggttcacaaagacgtcgtggttggtgaagtagtaaaacttgcgaagtagcagcaatagagtttgccggtgccgaagataataaagatgaagtcgctccaccataatgacaaagttgtattgccgtaatgaagtgaacacaagtcggcggcaacagaagcaaaccggtagtgaagacgcgtagttgtgaagataaaagcaccaatcggcggcagcaaaatcagtcggcgacggaagatgatgatgtccatcagtagtggtagaacagcggcataataggccaatcaacactggcagaatcatgcagccatggaagtgaagaaaacagtcggcagccatggcaaacgtaggcagcttgtgttgaagatactgatgcctattagtagtgacagcgatgtagccagccgtgaagaagatagcatcagttggcgttataacaggccagccgtgcaggcggtgacaccagtcagcggcggatgcggcggccggtcggtgaagacgtagacgcccaacaacagcggcataaaggccagccgtgcaggcggaagcaccagtcggcggcggacgaggcggccggtcggtgaagacgtagacgcccaacaacggcggcataataggccagccgtgcaggcggaagcaccagtcggcggcggcgaaggcaagccggtcggtgaagacgtagacgcggcggcgaaggcaagccgatcggtgaagacgtagacgcccaacaacggcggcataataggccagccgtgcaggcggaagcaccagtcggcggcggacgaggcggccggtcggtgaagacgtagacgcccaacaacggcggcataataggccagccgtgcaggcggaagcaccagtcggcggcggacatggcggccggtcggtgaagacgtagacgcccaacaacggcggcataataggccagccgtgcaggcggaagcaccagtcgacggcggacgaggcggccgaggcggaaacaccagtcggcggcggtcgaggcgagccggtggtgatgttctgactgatccattcctggagcgtaagagataagcttaaagccatgaatcccttttatgcatatctggatctggatcctttgtcgtattccctcgatgacagcagaagtagccgatgtgggaataaagcagtccatcaatggtgacaaaaacaccagtcggcgccagtggaaccaagccagtggtgtagatgatgaagcccattaacagcggcggagtccgccaaccgtataggcgagaacaccattcggcggagacagaggtaggccggcggtgaagtcgtagacacccaacagcggcggcataataggctagccgtgcaggcggaaacatcagtcggcggcggcgaaggccagccggtcggtgaagatgtagacgcccaacaacggcggcataatatgccagccgtgtaggtggagacaccagtcggcggcggcgaaggcaagccggtcggtgaagacgtggacgcccatgaacggtggtgtgaccaaccaaccgtataggcgaggacaccagttggcggcgacagaggcaggccagcggtgaagtcgtagacgcccaacaacggcggcataataggctagccgtgcaggcgaaaacaccagtcggcggcggcgaaggccagccggtcggtgaagacgtagacgcccaacaacggcggcataataggccagccgtgtaggcggaaacaccagtcggcggcggacgaggcggccggtcggtgaagacgtggacgcccatgaacggtggtgtgaccaaccaaccgtataggcgaggacaccagtcggcggcgacagaggcaggccggcggtgaagtcgtagacgcccaacagcggcggcataataggccagccgtgtaggcggaggcaccactcggcggcgacggaggcgggccggcggt

SEQ ID NO: 15133 - DNA, 746 bp, Oryza sativa
tcaataattattaacagtgaaatttggtaatcggcaaagacatcatcggcttaaaatcattatcgggtgtagcatctgggaaacagccgatgggagttatcaagtcgccaatagtcggattcctgctatattcggttaaggaaatcaatctactaaaggaagcttatctctaagtgaccgagtttaaagagaatacggcatggcaatttatctattaattaggaataatttgttagtttctttttatctttaggaaagtgtgtttagtgtccaataaggactttatattttccttttatctttaggttagtttctttcttgtccgacaaggacttgtatcaacccatgggtataaatatgtacacccggggtctatgtaatctatctctatgatcaatacaattcgacgcatcgccaccctttttacttctatttttgttttttacgttctggcggaacttggcacccgacgcggggctgcatcatcttcaatctccggcgaagggataagtccaatgttccgtcggcccaagcaattgtctcatctacatcggcgttatttaaggctgcatcagtacattcgacctcttggattgctctagtttggatgatatatttgcctacatatttatcatatgtctctattaatctagtcttagcatatcaatttagctctatcggctgcttctcattttagggtttctgccgatatcggctaaatcgcgttgctagattagattagctca

SEQ ID NO: 15134 - DNA, 686 bp, Oryza sativa
ttgcatcaaacagtgtcctattaaattctttggatttgcatcctacagccacaatatgaccttttaagttgcagtaataccaagaactgcacaggaaccaaatccgattcgttttgcttcaatttaagattcactatatggctaaacccgatcactaaccagagattacggagaatgcttgttgatttccgggttaaaaatatgaagggcatgttcaacatcacaaaaacaaaggtaaaatccatgaattacttcatgcataaaccgcacgacataatggaatggacggtgaacaacaaaccgaattagatacagaacaaaacgtaaaatacggtagcaaattattcactccctacaatgctccctccatctgatggaaatggaagtcatcagatcggaggcccagaagggaatcctgcgttccagcaattattcgtcaggcgatggactaaaaaggcagagaaacaagaggctggctgattacaatttttcgacagagtttcatctcatgaagagagatatactgctcactcaggcctcgagctggagcttcttgattgtgtcgatgtgcttcgctgggttgaggcccttggggcaggcgtgtgtgcagttcttgatggtgtggcagcggtacagcttgaactcgtcgttgatggaatccaggcgctccttagtgaactggtcac

SEQ ID NO: 15135 - DNA, 2522 bp, Oryza sativa
gtctttcctgcaactagcttgttggccacagaatcaaattccgggcaactgctccacagtgatacactagttataaagtattttggtgatgtctccttgactgactttgctgcaacaattatgggcatgtttagacatgcaaaaaaaaaaagatatcacatcggatgtttcatcggacgtcgaaaggatttttgggacatgaatgaaagacctaatttcataactcacctagaaaccgcgagacaaattttttgagtctaattaatctgtcattagcacatgtgggttacttagcacttatgacaagtcatggactaattaggctcaaaagattcgtctcgtgattcccccctaactgtgcaattaattttttttaattctatatttaatgctccatgcatgtgtccaaagatttaatgtgatgtttttgagaaaaacattttgggaactaaactaggcctatgttcataggctgatttgtccgagctactcaattgcacttataatcgacactaatctggtggttcacaaaaaataattgccctaaaaaattgtaaattccactgaaactctttttttaatcaaaaccactcttgattaaaaaaacaaaacccgctgcaattagtggtagtattttttttaagagagtggttactcctaccgcttgaactagacacccaagatttccaaatacgttgcgacaaaactattttggcatccataataaagatcatgatccaaccttgttcattagaaaaagaaaagaaaagcaggtcttttttttttccttccgatttactgcatgtcgtgcacgatgaggagcatttccctgctgacttgacccagcgaccccatcgtgagtcatggcgtggcattgccggatattctgcgaatgtgccatatgtacaatgcgatgaagccatcccattttgttaaaaaaaaagaagctcattagttacaaaagagtttccatgcgccattccttgtggcttcacatagttcagttaactagaagcgttttccaccatcagatcagtaatcatctgtaataacagatttgacaaggactactcatctgcctttctcaaagagcaattttactgtatgagacattaacacatgatgaattcagcattcactattttaaattttaaaaatagattaatatgattttttcaccacacccctcgaataaattttattttacaaaaatcccacaccgtttacccgttctaaaagtatgcacgcgagaaatttcttacaatcctcggttgccgaacacaaccaccacgacatgctccttgggcctgcatctgtgcagtggtgcggcgtgcgacggcacttcgtggctgttgggccttggtccactcaatcgtcctggctagacctaaaggggttgataccccagaattataagaatcattattagaatcacaatggcccccttaactagtggcatattccttagttttcggcccaataactattaaaaccggtgtaaattgactctcttggtggttttagagaaccgttttgttgacgtgacgttcacgtgacatcttaatccacaaattaattaaaaaataaagtcgggtccacgtggcatcctctttctctactactggcaagggtatggataccacatacctaatagtagttgactaaatctcggcaggacccaccacataccatgtcctatatggaaacaacctgcggatatggaggaagttccggataaggaaagacaaccagagttctacatggaaacgacaagaactattcggattatatccatattggtttccctagttctacttgaacaaagggacacctatgggtataaatacaaggccctctaggaggagagggggacggacaacacgaccacctcaattgacacccaccatagactggagggaacaacagaggccacaacatacaagacaacatacaccaagacaagacgccgaatatcgacttcagggatagacacggctagtcccctatggtgtctctggatactgtcagtagagacgaaagcgtttctcatataatcaaggaatggtatatatctaaatccaatctaatttcacctataaaaaaagattactattccttggtaatctataggaagggattgtctttttctctgatatcgccgggcacggattcgaggaggaagactaccctgttgtcgactactagtcagacctttagaccgccatgtggacaacagttagataggctaccccacatattgtactggtgtgattatggtgaataagagcaataccggcttcggccaacaggatatagggttattacctgataatccaggggcccgagcatgtataaaagtccctgtcaccgtctgttttacctcagtctcgcgtatatcctagcaccgacgatctccatactatgcaaacaccagaagggggacatctaacgtcgacagtggcgcgccaggtaggggtgttttggtgctccaggatttcgacgagatgggttcaaaagatgga

SEQ ID NO: 15136 - DNA, 5993 bp, Oryza sativa
ctgcgagcctgctacttccctttcgcatttaaggttgaactcttgccctgctttagagttggcacacggtgcagaattcatgccagcgtcccttaagagactcgcaataagttgttgtgtgcttgcacccgacttgttctgtggccactggccgcatctgaaagatattttcatacacgactgcagaagctctgtgtcgttgtttgttggtgatcttagctccctgaaagaattcacactttatcatttgccagatttatgtgtgcttgaaggcctgtcttcccttcaacttcacagcgtgtgtttggtagatatcccgaagcttactgctgagtgtgtgtcaaagtttcgtgtccaggatttactgcatgttagcagctctgcggtgttgaacaacatcatctcggctgaaggtatcacagttcagcgtctctcatccttcaaaggtgcaaggagccatccgtttcatttgaagaaactataaattcctcatctgtcaagcagctgcgattagaaagttgtcaaatgagttccctgcagggaaatctgaagtgcctctccagactggaggaacttgacatcttcagttgccccaatatatcatgtttgccagatctcccatcctcccttcagcgcatatccatagtggactgccccaatatatcatctttgccagatctcccatcctccctgcagcacatatacatacgtgactgtccactactgaaggagagctgtagagtacccgatggggaaagctggccaaagattgcgcatattcgttggaagcgtattgactgaattatgcttcagattcacaagaacaaaggaacagaaaggtaacggtttcatcaatgcattatgaaaatataaatttatgcaagatcattccatccattattgttcgtctaaatacttctttcggttaccagttaaatcgctctcttgtcctctggcagtgctgttccttcgccccctgcattgcagacctccagagtctcacacagctgtttggctatgaacgagagggaccggttcgtattgactgatcggtctgagcttcttcttcttattcttgtgtggttgcatttcgctggctgctggctatggtctatatgcctatggactattaccgagatgtatctgtgtatttggatcttgctctgttatgtttcctgtttgttcttttggactgaattgcttgtagtagctgttatctatggtgtgcaacgtctactgtattactgcaccggtgaagctttgtatgggagtaccatggtgcttttgaactcaggctactgttatcctctcttggagtgtttccttttggacttggtttctattgagtattgactgtaagcctgtaactattatctcttgtatgatgagatgcaagataaggcaaacctgcaatagctctagtcaacttggccttgcattgctgatgacctgatggaaatcgttttattttacccattcgttctaaactgtatattgtagtcacgggtttcctgtatatttgaggccaatttttctagactagctgaagaccaattaagtctcttttatcctcatgtagctttgagatcttgaaaggatggaaaatatgtagtgcaaaccacatatgtggtgtaaatctagaatataccgtcggatctaaaaatggacgtacgagatttggtcatgtcaccaaaggtaaaaattttattcctagattaaccataagtaaaactttaaatggaagtaaaatttttactcttgacatgaactcggacatctatttttttattcaacggtagtttttccagggttccatcacatatgtttgcaatacatttattttccaagagtggcaattatatgtttgcaatacatttattttccaatagtggcaattatgatgaaagggaaaggagtaacgggttattactgctgtcacgtaagtaccattttatttgtttgttttgatgcgctcgtcactctactgcaagatatgaggaagagaagagacgtgatcctattctaactggtggagcttcagcgattaaacatgaaatcgaagtctgtcactgtctctgtttagtgaatgtctccttcaatttggcaagtctcaagtggtttaccagtaatttggcaatttcaccggctgttgctgggaagagtttttcccatggcaaaaagcattatcactgactgccgagttaggcttgctgttgccaagttgttggggttagcttaagcaaattcatgtattttattcaccggattagtaagtgattaacaataagggtttggttttcaacaaatccagctcagctaaaccttaagtaaatgtcattaagtacttagaagttgttcttcattactagtatctggacagtaataagtacttaatgatgaccatctaagcatactaaggttagtatctggacagtaatgaagaacaacttaatttagcagtaagttcttcattgcttagtattcctatacttaaccattatcagtgcataagtactccactaaaccatttagtacttatgcttagattttattgtacattatccagtggtgtggacaaccagattaggcagtggtttagatttggaactcaattatcctctggagtccctactttctacagcatttccctgtttgcgcactttcatggatgatcctgcttctccaacatcttctgattttgattgttgttcaaaaggatgattcaatggctgccccctcaggtattgtttggataatgggatagggaaatgatttcccacctattaaaaggtatctttaaatcctaacaatttattcttccatttaatcctaacccttcattcatttcccaatcccaatcccaccctccatttcccattatccaaacacacccttatggtttcgaccctggatgtcacctaggattttcgacgaaaaataagagagtttagagacgagacgtttgttggtcactcataattagcaattgagtgccaatgagttgcttcaaacgatatatcaaacgtaggattggatgcaaaagtgaatgcaaaattaacgggaacataggcatcgtatcacacacgagtcagggcactgtcaatcgggaaaagcccctaatgaatcaacttgtacaaattttctcaggaacagaactaaaatgaatcaagaattctataccgaaattaaaaaaaataaacaacggaactacaagttagataaaatactagagcaccaggtatgtcctgggtattgtagtacaagacaaacgcatccagacatccagttctgccaaaatgcatcccagaaaaagcacctcaactctagaaccaactttatttcttttcagcatcataccccccccccccccccacacacacacacacaacaacaacaacaaaacaaaaaaaccactaagaaaagcatcatctaaaaacatgttattttcagaaagagcagagtatatgattttagtaaaaacaatcctactagctatcaactttttagaatgatgtaatctaaaatgttgctgctatgtctacaagtctggcagcaaataaaccaaaaaaaaaaaacatgttgactcataaggcaactattgctgctatctgtaacctccaataagaaataaagggttcttgatccctgagcgagacatgccacttcacatttcaccttcctattgctatgattacttacataacaaactatataacatctggctcaatgtagctacatattcggacagcacgacaaaaatccactggttaagtagcaaccagataccaggacggctggaaaccaatagcttcaataagttttgggttttcgaactcgtgtactcctccggggatccacagccaccaaaacagtcttttcattcttcatattgccgggatctttctcagttttaattttcttcgcaagcacaggaagcccatgtttcttatttggtttctgtccacgcttgtctccagagatgatttgcttggcaactggagctgtttcttgaacttgttcatagtccactatgtctgcacttgctttttgtactttggaaggaggcataaccagctctgaatgctcctctggcttgaccttctcaaatagctgataaccttctttggctgcttgattatctatgaggacatcatcagcgctctgcaaagataaccaaaccatcaaatgaaaaggtttttgcaaatatgttgatccagcacgagtccctatttcttacaacagtttagggagtacactatttagctttgataaataattcagtataaaaataggaatcattatgattacgaggcaatgtcagatctatgaaagatcagcaaatcattacaaatgatggtatcaagcacatgtatatcgcatatcacactatcgccttgtgactgtatatcgcaaagcaggaaacaccatgacgttacacagatctactgcatattcaagaaaacaccatcatgctcagcttgtttttcaccatatacttcgacataaaatatttatagttgacttctagaagattatgaaggactagaggtcccacacccacacacatgcaactagaaatcctaacatgacatgacggagatctacatggtttattggatgggcaaagagttggtatatcctatgttcctttttattaggaaccagctactggtcaaagtgttcttcatacattagttctaaaatatcgtgtgacaaaatagagaagaataagatgctatagctaaacttacttctttgtataactcccctacatgggcattggttaggaaattatctttaccacagaacatctcaattgtgattccatttagatctgattgtactgcatcttcttgtgcatcatttttcttcatacattccaacacacagtcagtggacctaccaaatacaggtggaaccacagcaagtgatctatctaagtcatccttctgaagcaaagtatgcatacactttgttttctgatgagaacgtcttccatccttcttacaacaggtcatctgattctgaatcttttgaggcaccttaacctgtttacggtctaagcattgtgacaacttcttgtatttgctgcgagcattgctgaggcgaccctgaagactaagaattcgggactggacatcatcaactgtaagaagaatctctcttaaagaatattgttcaaataccctgtcattctcaactaacgcatcatcagtgctttcgatgtcctcaacaactgcgtgaagagcgacaaatagagaggattagcaactattaagaggaacaattccacattaaaatatataaaagagttcaaaaatacacatttcctgcctttcagcttcattaatataacatcgtgcacaatcaatccccaaaagatagaaaagtaccataaaagataaactaaaagagataaacaaactaaatgtgacagaaactcagtctgatatcaagttcgatggctgctccgatagatactgtatacagaaacaattttacccaaccaatttttgcaggtatgcagcttgcacgcaagcctgcaactctagcatcccgaggaacaggctaaacgtgtgctttagaaaaactgaaattttaacagtacaggcatactgaattcagaccccaaaacaatgcacagtgcgataatctgaccactgacaaaaaaaaaggggcaaaagcacgtacgttaatgctctaacaaccacttgcatttcagattgaagagtgactgcaacaaaaattatattttctccttctaaactacagaaaataatcttgagcacacaggcacaaccatgtaacttacctgaactgtcaaaaccaccattaaccaagggaccatccgtttgaactccactgtttttgttttctgcaaaagatcaagagtcttcgttacagtcaagtataaacacgaaccccatgcaaaatatgatactcattcaagacaacaattttctctaccctataaaacaaggacaggatgtcga

SEQ ID NO: 15137 - DNA, 17095 bp, Oryza sativa
agaacaatgcaagatcatggctgattaatctgatatttgatggttttatctctaatccaaacatcataccttgtacttgtgatagccatcacatgccacatcacctgtttctcctcccggattcctccctgatgcagcagatcacaggtcaaattggcacagacaggtaaaaagaacaagaacaaccatatatttgaaaacacattttttccccgccaacttaaagtgcagaggttaaaagctaggccgttatagtttatcatgtacagctctctcaaacaaacttagcaataatgctccgttgtgctttgtgtgcctttgacatagcgactggtttatccattatctgaagagaaagatcaaacttatttgagctatcaaggaaaaaaaatgtgaatttccccactctcagatgaacccagtgaactccaaactagaatagcaaacaaccattactattgtgacattgtgtgcaaaaaaattggtctcctgttgcaacaagtaattaggaagcaattaggaatcaagccaatccaagttgagagggagagagggagtacagtacatgagtgagcgtaggtgtcccagatgcttggtgtcctcccatcctctgcagctgcaccctcatactgaaaaatccaaaaccaaaccatgcaaattcaattcatgccctgaattgaatctgcaggtaggagcagagcaaccagtagcaggaaaagatcaagctgacaaaaaaaaaaagagatttggagagaaagagacatccctctaaacattttcaaaaggaaattatgagcatttgggaattgaacacaggatctcggggttgaaaccacacagcccttagcactacaatatcaagtgcatcttaagatcaagctgacagaactcagaatacctggaaagccgcagtcccggctccaaacgtgaatccgtcagggaaatcgtctcgcgtgaactgcagcgacctcacgccttgaacaacaagaagcagcagcagcagaagccatggcgagaagaagaggagcagcggatgcagaggacgcctggtctccattgcgtcctctccagatgcacagccacacatcagcagcttcttcttcttctttctcctcttttcgcttgctatcgttccttcctctccaataattcactagcctcgatcgtgtcgttttggtcggtcaataggatgatccggcaaccaaaaagatgaattttgttttctattttactcgatcgaatgtttttgttctcagctgcatatgcgtctcgattcgtgtgggtgctgtaccaatcgtggcaagaagatgattgcatcgactaacaagaggccaacgtttaaagggagtacaacccagtatgaaccatccaatgttacaaaagcatttttgttgaattttgcgtggacagatcttgtcgatctcatcagtcgaattgcgagccacaggatactcgccaggagattcgtgctggcctggtcgttgtcctgtccttttttggcttcttatcagtgtgtctgcccgtctctggtactcgacttgctacgtaatcatcgtattcgtgaatactctctccatactcataacagaagtcgttttagaacaatgtttaagtcaaaccttgggaatataaattatgaataactcttaagttgttgagtttgaaaatataaaaattatatgtataaatttatcttgaaaaatactttcataaaagtatacatatatcatttttcaataaatatttttatagaaataagaagtcaaaattatgttttggagaccgtgtcgctgtcctaaacgatttgtatggagggagtatgccttttcatttttcaatccattttcgtccatacacctatttgatcggaatcatcggatgcccggtagcgatttttctagacacagttccataaatatactttcttcatgctaaaatataaagctcccatcggttcgcttttttaatcaaaaatgacacagcttattaacaatcaaaaaataatttggataaaacttttatatacacattcatagcgatttaaaagaaaaggtcgtaaaataaactacaatgaaaaaccacaaaatcaacttcaaaattaagtttcaaaattcaaattttagtttaaaaacggtggaagaagcgaaacaatgggagcctaagacaaccaccctaaacacaaagacgaaaagaatttaatcacctcgtctcattggttagatcacctagatacatgcaagtggtggggtttgatgatagaggacttacatgtgctagttaatgtatgtatgcatgcactcctttatattatgaaatatgatgaaaagataattatgccttacatttcaagatatgagtacattgtaattggaaaataaatctgcatcacctttatatctcacggggtaaaataatgttcaaaaataatttattgaaagcccgtcgcaagttacaacagaaaactttactatagcacaaacaatattgtgtctcatcgttatagttttcacatatcagcaataggaacatcgaaatatttgtggaataaaacggaacatggtttttccgggattgcctgcctcgtctagtgcgcatggccggcattatattgcaacaaccatgcagcatacaggcctccactcggcacggtctacgccagggtcgcgtcgcctcacctcgccaaaatgataatccttgagttggaaaaataacagaacattggagccacggaagcaacaaatttcaaacttgacatgtataatgcatttaatgttatacagacaaaataattcaggtaaatctaatcagtcaaattgacattccaatcgaactacaccgagattacaagtgcctaactaaatcaaatcacacattaattattcaaaacaagaccagattcccaactcatcgtactcttgtaactaaatattttcgaaactcaaggatgaaataaaaaaaaaatgaagccgcagccttaaaaatatgtacggtcccaacaaagaaaatcggcattctttgtacaggatacaataattaatgtgcaataagatcatatctacaataaactgacacattctggctcacgagaaaagcttattggctaaaatttgacacgagcattcggtttatacaaaatcctgactgtaaaactccataaatgaatgctgaagaaatattaaacaaatcagagcttacaagcaaatactggagaagtacctatcaagatacacatcacacttgaaggcaaaacaaaatggcaaggaaatgcagtaaaacctgaagggtaaataaagtcctagcatgctaatagtgctaaatttaaagcaatcccaagtttccagctagaaagaaactcgcctttcaaaattttgcgtaaacaacaagagaagtagagcagaaagtggctagagttcgagtgaaacaggccaaatatttgaaactgcagattctttggtccaaatctctgagagggagagggagagagaaatcgagagggcaagaagatatcaagaaccaaacaagcaaacatatgacaactatatgctatgttgattgaacattatacgcaaggcaaaagaagcagaaattcacaaacccagctaatatataaacagcacagttgaaatgaaaagtaagcttgttttctacttcacttcatcttctatatttctatggtgaatccagtcatgcagataaggaagagaacatatgcacatgcctttccatactgaaataaactgtacagttgaaatgaaaagtaagcttcttttctatttctacagtaaaatttagccatgacagatcatgaagagaacatatgaataggccatttgcccatttcataccgaaatttggatcgaatctggaagcagcaattcacaaggctgtacagcaaatcaccgttgtaacaaatccaatcttaactaacttccaacagtgcaaatacttacagaggagaatagataagcaatgccttgtactggaattgccaaacaataattgcaggcaagtgtaaacttcttaataattatggcatttcagctacagtagagaatattcagggaatatttaaatacaggcactggctatgatgaaaagcaaaacctggtgtttcctgtgatttcccatttgtagtttcacttacactgaaaaactaagagggatgtctgcaaacgtgaagaaaacaaagtagttgcatttccatcagtaattcagaaaggaaatggcaatattttaaagtaacaaaatcagaacttagatgttacccaatatgtgcacaattcagatgttatctgaatccatattctaaggctgtgttcggtagtaagggatgggaactaatctctcccgcacataaaaacggagcggtccattagcacgtaattaattaagtattagctttttttttcgaaaaatggatcaatatgatttttttaagtaactttcgtatagaaattttttttcaaaaaatacaccgtttaacagtttgaaaagcgtgcgcgcggaaaaagaggggagtgggttcccaactccttttgccgaacacagcctaaatgtttctctgtttcataaatgcatccacaattacccccaaaaaatcactaaaatttccattgaaaagcataagaggcaaaggatttcaagcataagtaatacattttcatcagtacatatattcactcaatcctgaaacatattaagagcaatggaattcagttacaacataagagcagaggcattcaggcacagatcatcactaaacctgaagcataaagaaatagttgcattttcatctgtacatagtatgatatcaactgctgattctgactatccatggtcagtactcagaaataaatggaaggacgcagcatgtatttgcttgtattagtttcaggggtgcggtttttgtgtgtgtggaacagttacaaaaaggttggcaagattcagtaagaattccacatgtaagagtaagaaagtcattaatgacaaaaggaaatgtatctttttgcataccgttgaagtttactggagcagtgagtaaatagagagcataactaatccaagcaacaaaaaaagaatcccacacgtgagaaatacatacaagcataccagcatggcctttctttcaggaaaatagagagaggaaaaaggtcaaagttgacaagcacaaaatattctagcaatatgattactgagttgaccaattggtgactaaaccatcacaaacgtataatcagtgttaacatagttgaatgactaactcaatatttttccctggtccaaaagatttcatttccgaaaaatagtcccaaaccaaatgctattgaactagctgatgcttgaggaacctgcatttcaaacatatagcagtagttagccatgttatgccccagcaaaactcagcaagatttaatatgctctagtagtagaagagtttgagacatttcgatggccaaataagctgtaacaagtgtaaaggagcaaaactgatgcaacatgaagtggctctacagtagtatgaactccataaatgactactccctccgtcccaaaatatagcaacctattggattagacacaacctagtaggtctaatccagtactaggttcctatattttgggacggagggagtatgcaattaggatcaccaaacaaatgaacagaagcaactcaaaacttattagaagcatacatgcttgtcttgaagcatcacacaagactttaaccatcttagttgttatattgaccacatgtgacagtaataaattgagcttcttttaaaggctatatattcttacttctttacttttcagttgagtatgaacagagcaaagccaatgattaataaatatgctgaactgacactattaaaatatgatgtgtgtgcaactgagttcacctgagttgctcttattgagtatgcatcatggagatatccttcatcttacacgtgcataagcatgaggcaccacttgctgatttacatcttcttgatcttcagacaatccatagcctctttggttccaggcagcaccatgtgagggttggcttggggaagccccatattcaggcggtgccccttgatttccaaaccctacttgtcctcgacgagcgttaaaactgttctgaccttgcagagcatgatttccaggagcctgagcatcaaatccctgctgtcgaggctgtgtgtgaaatcttggctcaccctggggagacccaaaacgattatgctgatctactgcttgaccatactctggtctgttctgatagtgaaaaccaggtaatggtggtggtgcttgaggagcaccaaactgtgcctgcggtggctgagtggagccaacagcatgctgcgatgactgaggtccaccataactaggctgttgcacttgtggagcattgaaccctgtatgccatggatgagatgtgccatacccaggctgctgagtctgaggagcactatgcattggttgtggtggttgagggtgaccaaaaccaggctgcatcggtggacccgagctataatcagtttgttgcacttgaccaatgccaactgattgttgccatggacgaggagaacccatcccatggtgtgttccttgagttgcatgaactccagaatgctgccatgtattgggagtactgacatttggaggttgagtcatggagacaaccccaggttgtcgtggatcaggggcgctaggtccatgctgcaacgggcggccaccaaactctgatttatcaacttgagggcctccaaacacaggttgctgaggtctcaaaggcatcccctgaggctgtatcgcttgggatccaccaacgccaggatgaagtggttgagaaccatatgtcggttggccttggtgaggcatgtagctaccccgtgtctgattggatgcaaatcctggcagcccctgaggtgaattgcgagggcgatactctggccttggctgaggaggcaatggcactggtttctcttcaaaagctttctcaatctcttcctgccggccagcgttcttaaaaatgtcaataacagaatcccggaactcaggaggaggagtgacaccgccttttgccatgtcactcaccaactcccgtgctttatccaagtccccttccttacacaatgcattaaccagggtctcaaaggtggttgtgtttggcttgatctccttgtcaggcatccttccatataccttcaaggcatcatccatccggccagcttctgtaagcccttcaaacatccgattgaagaaaccaatattgaacttcgggccatgctcccttccgtctgccatcttatagaaatactgaattgtatcatccacgcggcccaccttgaagcatgaatcaaccaggtaagtgtaggtgtacacgtctggaagcaccgacttggtttccatttcctcaaaaagcttctctgcctcttcaagcattccattctcacaaagcttcccgatgatgttgttgaagcagccaacgtccatctggacgttcttcctgggctgccggtggaacacctcaattgcctcatggaatttgcacttcttgaagcactgattgaccatgacattgtaggactcgctgttgatgccaatgaagctcggcggggtgtggttgtcgatcatggtctcccagaggtcattcgcctccttgtccttatcatgcttgaagagcgtctcaagcagcacattgcaggtggcgggggtcatcctgaacttcttgtccaatagcgactggtaattctccatggcctccttgtccattcctttcttccagtacccctccatgaaggaggtgtgcacgacaccatcgtagaccaagcacctcccctggagctcctcaaagagctcgaatgccttgtcccagttatcttcctcgatgtaaccggcgatgagattattgtacacgagggagtcggcgccctggccgcggttgagcatctcgcgcaagagatcgagggcgtcctggatgcggccggcggcgacgaggcccttggtgaggtggcggtaggtgacggcggagggcgagaagggggccttgtcgagcatctcgcggtacacctgcagcgcggagtcgacgcgggcggcctcgcagtgggcgaggatgagggtgttgtccgagacgacgttggggacgatgttggatcggctgaagaagaagtcgaagagggagacggcgtcgtcgtggcgccccgcgcggaccatggacgccgccacggcgttgcaggtgaagacggtggggcggacgcgggaggtgaccgcggcgcgtgcagcgacggaggcgccgtcgaggtcgccggatcggatgagggactggacgcggttatggaggctgaggcgcgggccgacgagcgcggaggtggtgtccgggaggcgcggtgcgttggggtcgcgcggcgggggcggggcggaagggtcgcggcggagcgcgtggagcggcggctcgatgcggagcctccgcttgcgcctccgccgctcggccgcggcctcctcggcggaggagaaggcgaagccacgggcgtggggtgcgagcggcgcgtggggagggaggaggtggtgcgtggcggaagcggcggcggcgggggaggcggtggaggaggaggaggaggagagggaggggtgcgggtggagggtggagaggcggcggaggaggaggagacgacggtagagcgccatggcgtcgcggtggggggcggcgacggcgggagacgaagtttgtggcggtggtgagggaggcggcggcgatcttcaacaagaggaagaaaaagaaaaaaccctcttattctgtagctagggtttagtgggtgttactgtatgaatgtatgatccattttccatctcccggtgtgagcctcctctatatcggccagcaacgattcgttgggccgtcaagttgggccagtgctacagtttcctactccctctgtacaaaacaaaaacaaaaaaaggaaaacgtacacccaaggtccctcaacttgtcattgtgttacaaaatcatcccccaaccgcaaaaccagataccggacgtcctcaactaacaaaaccagatccttcggtggtttttgaccccggttttatcctagtggcggctgaggcagcgtgagccccatatgttagtgtgaacacatcatcctcctctctcttttcctctcttctctcccctcctcatctctctctccattctcttgtacgccggccgagcaaggcaggagaggcgtcaggcgtctgcagccggcgatgggcgacacgacagcgatgatggcggtgacaggcgacgcggcagcagtgggaggagccgttgcgggagggcggcgagggaggggcggtgtgctggcggcgggggaaggagcggcacgcgggctcccccaccggccgccgcccatgaggcccacaacgcggcggctggggaaggagctgcgggcgggcggcgggggaggagcggcgggcggccgacggaggagcagcgcgcgggcggcgggaaaggaggaaggcgcgccaaccacacgccgacaccaacgaccaccatgcccgccgccacctccatcgcctccaccactaccgcctactggctcgcgcgagcacccggcaatcgtctccttccggtggagcctcacggggctgtggttctccacctgggccttcctcctcggcttcctcgcctccaacatcgcgctcttcctcaccctcctgcgcgtcgccggaggccgctcccactagggcccatgcccgcggcacacgcgctcctgatggccaccgtctcctccgtcatcttcgctggcatgctgctctctacgctcaccgagatacgtgacacacggtggtcgtggcgcggctggagccgcaccacgccgttccgctggctcctctgcttcccgccggggacacgctcctccggctacatcttcttctagtcctacgcacactacctctcccgctaactccacgccgcacgggggatcttcatcgtgctgcggcgccgctgtggcggcgccgcgagggtgttcgcgcatgcggcctccgtcgccatggccttcctctggcgacggcggagacggagacggccgctccccatccgcagccgcgctcagttgccgccgctgccaccgcctctccgccaccgcgcgacgggggcggcgacaggaggagcgggcgtcgtggcaagcgagcgcgcgggaagaagctgggcggcggctgcgccggccccgtgctcagcacaacatcctcctcgtcgccatcctccgtgctcatccgcgcatcggcctcgcgtgtgcaacaccgaggactatgggcgccaccgcgcccgggcaacttcatcgcgggcgtggacgcagctagttgtagccggggaagagccacctagtgtcgaagcagcgacaccgacatcctcccttctcctccgtcgccgcccccgttgcctccgccgacggctgcggccaccagtgcgacgccgccctcctttcccgcctcgccccagcgacctcctccccaccttccagccaccctgcagagaggagaaaagtgagatagagatagaggaggaagagagaaaagaggggagggagatgagctggcattctgaattacgaaagactaggcaaaaactacaattacaacggcactccaactaacctaagctaccatgatgacgaaacacaggatagccaagcccaaaactcagcaaacgccgttcatatgaacaagtaaaaggttgaaagaaaacaagacccccacacattggcaaagacgtgacgttatcgatatcacaccacaagaccgggctactccgacttcgccaagaaacactagggcaacgacggcaacctagcctgcgtcaaagcacaactcaacaaggctcatgtcatcgttggtatacatcatgcattcatgcttgctgacaccgtagctctgacttcattagcatcagtctcgttcatacatggtcgagccagactgacatgcctcgctgataaaaaaggcttgctactccactctagagtgaaacgcggctgatgatgtccaactcgggtcatcgttaccaagctcacaaacacgcagcaactttgactttccaagaaaacaatagtaaaaatctgcctagaaccaaaaatagcttcgactcaccgtggccaccttcgggttcgccgcatcgagctgcaccctggttgcccctccactgtcgccaaccaccaccggaaccccatcctcttcgcgtgaggtgagcaccacccatggtgagcaattaaagagagggctaacagggtggtaaaaattacatttattaccgataaaagtttgtcgagatttcttcaagaaaaaagagatataacgaacaatcaattaaaaatagaaaatgtcttactttaattttaatttgtttcgttagaactattttcgaaacaaactattttctagttgtttttattgtctataaaatgacatgatagtactatagtaggtatttcgtggacagagatagcaagtacaagacacttagctcgtactgccgctaattaacatgccatttaagtcattattagtagtgaaacggtaattaacccatgaacactccatagaaaagccccgcaaaaaagaaaaaaaaatactccttagaaaaaggtgtagaggtgacgggctttcctaccaaaacttagccctacggccctaccaatgttttggtagttaaaatagtacttgtgcttggtttggatcgaaaccaatttattgataatacccatgctagatttgatatcaatttatgttagctttatatagcaaatcaaatataatcttaccctataaaaaaagttgatagtgccaaaatttacatactcaagttttggcactgttaaagaatctatctattatattatattattaaaggaatagaaaaatgagcctccacgttcgctctcatggcctagaaattctcacattaatcggagaaaaagaaaaagcagagtccatatagaaatacaatttagaaatagctgaaattcggaattaaaaaataaggaatattagaagaggagactagagtccatatagaaatacaatttagaaatagttgaaatttgtaatttaaaaataaggaatattagaagaggagactagagtccatatagaaatacagttaggaaataactgaaattcggaattaaaaataaggaatattagaagtagagtatagagcccatatagaaatacaattaggaaaataacagaaattcggaattaaaaataagaaatattagaaatagagtatagagtccatatagaaatacaattaagaaaaaaaaatagaaattcggaattaaaaaataaggaatattaaaagtagagtatagagtccatataggaatttaaaactaactaaaattcgaaataaacataataaaataagaattagagttttgagtccatataaaaatacaatttacaaataactaaaattcgaaattaagaaaaacatggaaagaagagtttaaagtcaatataggaatacaatttagaagtaactgaaattaaaaattaaaaattaaagaatattgagaattgagagatgagtttagagtccacatagaaatacaattagaaataataaaaattcagaaataaaaataaataatattggaagaagagcctagagtctatatagaaatacaatttacagaaaattcggaataaaaaaaaagcaaaattaaaccatataggaatatatataatttacaaataactaaattttaatattaaaaataattaataactaacgcgtatataaaatagaatatgaatattacgtttcgttaagttattgcaaaatttaaaattatgatgttattctaatatatttgaataatataaggagaaaacataagaaaatatagactgcgcgggccaacatgctatttggtcgactgtcagcattttgcccttgacgctcatgcatcccagccgtccacgtcccggaggaataacacaccctccagccttctcctcctcaatccaccgacgccgccgccgccgccggctacttctccggctactccccatcgcatgttccgatagtccaagagcggcggcaacgacggctggcttctccagcgaatccattcagctccggctggcctcgacctgaccctgcccccggcggcatcctcgaccggatccgtctagcggcgacctccgcaatggcggcggcggctcgctgccccggtgaccatcgcgggggtgggcttctcccacgacgacggcggccgcggcagcagcagcacacagcgagcagccggagccgggcaacctgccgccattgtcaaggccgacaggtaataaacaggtatgcgcagcctggttacagtattttacgcccttctgaattttgctgcgaaagtaactgagattatcgatgatatgaacatgtacatcactagagaatattgcgggtcccgtgattagcgacattgctgtgtgcaacgtttgttccttttaggtattattacgttcctttcatgtatctttggacgctgtcgattagtccagtgactcctatcccaattcctcttgccacacaccacttatccgctgcagcaacctcgcaatcccctcggcgctcgctggttccagccaagctgcttccgtcctccttcacttcatctgtgcaacagggtaaagcttccagatcttgctttgctgtttttttttattagttcatatccatcttattctactacaaaaatacttgatctgtctccggtgccgttcactgatttcgttttttctttgttgttgtttctcgatgattttaggttattcatccggccctggtggttttgccgtctgcaaacacctgtcttccattcgcatttcagaagaaaaagaaacacacacacaaaaaaactactcgtcagagttttcttcctaatttcccatccaaaaccagtagttttcattgaaaacaaaatcatttgttgttgtactgtccccgtattttgttcgtagcaattcccatccaaaaaacaaaatcatcctagctttttactttcaccttgttcccatcggtccttgtttagatcttcctagtctaagtttaccaacatttctccatcttcacatccaatatctctgtacctaccaaaattacaaagagagagaacagggagacagcaaattcaatccgatggcggaagtggcattggctagcttacgattggcagcatcaccgatcctgaacaagctcctcgctgacgcttcaacataccttggagtggacatggcgagtgagctccgtgaactggagaccagcatcatgccgcagttcgagctgttgattgaagaagctgagaagggcaaccacagggccaagctggacaaatggatacgggagctcaaagaagccttgtacaatgccgaggacctgctggatgagcatgagtacgacatcctcaagcgcaaggtgaagaacggaggcgaggatccttctccagatctagagcatgcctcctccatcggttccatcattaagaaacctatgcgcgcagcatcaagcagcttgtccaatctgcgaccgaagaacataaagcttgtacgccagctgaaggagctcaaggccatcctagcgaaagcaagggacttccgtgaaatgcttggcttaccggctggtagcagtgtagagggggcacaaactggacatacaaaaacagtggtcgttactgcagcgacatcaaccccaccaccaaaggtgtttggtcgcgacgcggaccgcgatcgcattgttgatcttcttacccaacacaagacttgtgctgaggctagccgtttcgttgtctccattgttggacctggaggcatggggaaatccaccttggctcagtatgtttacaatgacaagacgatacaagaacattttgacgtcacgatgtgggtttgcatctcacgcaaacttgatgtccatcgtcatacaagggagatcatcgagtctgcaacaaaagagaagtgtcaaagggttggtaatatggacgttctccagtacaaactaaaagaaatactgcagaaaaaagagaaagtcctgcttgtgttggacgacatttggttcgataaatcccaggacgttgaggaatgggacctgctacttgctcccatactatcttctcagaatggggcaaccaaagttctggtaacttctcgatctaagacacttccacctgctcttttctctgaagatgtcattgatttggaaaatatgaaagatactgagttccaggcactcttcaaacaccatgctttctctggagccacaattcgagacctccagatgtgtggctggttcgaagagcatgcagtgaagattactgaaaggcttggaagatctcctttggcagcaaaagttgtaggttccaacttgaaaagggtgatgaatatcgatgattggaaaggtgctctcactataaagatagacaatttaagtgaacctaagagagctctgttgtggagttatcagaaattagatccatgtcttcagagatgctttctgtattgcagtttatttccaaaaggttacaaatacataattgacgagttggttcacctttgggttgcagagggatttattgatgcacgtgatacgaataaaagaatggaagataccggcatggattacttcaaagagatggtctctggatcctttttccaaccattttctgaaagatttgatagtacggtgtacattatgcatgacctccttcatgatttggcagagtcactctctagagaagactgcttcagattagaagatgacaaggtgagagaaataccatgcactgttcggcatttatctgttcgtgttgagagtattatacaacataagccaagtgtctgcaagctacaacatttgcgaactcttatctgcattgacccactagtggatgttgggagcaatattttcgagcaggtagtattgaatctgaagaagttacaagtactttatttgtcgttttacaacactagaaagttgccagaatcatcggtcagctaaagcatcttcggtatttgaacatcaagaagacattgatttctgaactaccaaaatcattatgcgatctttaccatttagagttactttatttgcgtccgaaatcgaggttacctgacaaactctgcaatttatgtaagttacgacatcttcaaatgtactctgatggattggagctgtcacggattcctgacataggccggctaactttgcttcaacgtattgatagttttcacgtcctaaaacagaagggacatgagttgcgacagctcaggaacatcaacgaaattggtgggtatttatcgctcagaaatcttgagaatgtgattggcaaggatgaagctttagagtcgaagctgtatcagaaaagtcgtcttgaaggattgacgcttgagtggaatgatgcgaataacatgaatccagagaattgtttacatgttgagattcttgaagccctcgtgccaccaccacagttggagcacttatcaattagaggttacaaatcgactacctatccaagctggttactcgagggttcccagcttgagaatctagaatcctttgctctttataactgcagcgctttagaaaggctaccatccaataccaagctctttaggcgttgccgtgaattgagccttaagaatctcccgaatatgaaggaactatcatttcttccagcaggtctcacaacgttgtcaattcgtaggtgcccactgcttctcttcgttaccaatgatgaactggagtatcatgatcatagtgagcatatccactaggacagagcaactggttgcacaatttgctttggttggggtgatgggcccatttttagatgcactgtcatcggatcattcatctatgaagcagttggcagcattgatggactctgatatatcaaaaaatcttcaaaccattgaacgcgctctagaaagagaagatgaagtagtgatgaccaaggatgtcatcaaggcatggatgcgttgccacgagcagaggatgagctcatttatgcaaggaggattgggctaccattggtcccaccgtcaggacttagtgatctctccctta

SEQ ID NO: 15138 - DNA, 1997 bp, Oryza sativa
ttgtatttcagaactcttatttatttatttacttttgtaaaaagagatccttaaagttaacattggagactaattgagtgctacaagtaggactactgaccgttttcctggatataaaacagcaaatttccatacttttcctgaagatattcaagcgcgagctctagcccccgaggatctaatgaggtccctggtagaaactgcctcaagagtaacaagcaaaaccatgttacagtctgcagatgttatgaaaagttcaatatattcagttcagagacagtgttgtcgtttatcacctctcgagtaggtgtgctattcttgctggctgacaaaaaaaaaagcacacatgaataaaatgattgagcttcataaaattttaagaacgtatgaataatgaaaagcatatcagtatgaaatttcctaccccagaacaaagaagaaatatcgtcagtgacatcctgtagcggcgcctttactgcgttactattatcgctcacataatttgaggtataatgattcaacccaatgaagtcgaacgcattagtaaccagctcagattcgtagtcagagaataatggaagacgggaaccggcggccttcttcatggtctctgggtaatctccaaacaccaaaggatgcaagatcctgcaatttggttgcatttagttgtgtcaggattcagagtctactaggaacctatgttttcaaaagaaaaactcaaagcatggacagcagagttcgctgtagtggctggtataacaagcttacaaccaaagctaggaaccaactctctccgtcccataaaaaacccaattctaggtttaaatatggacaagtcccataaaaaacccaatcctaagtttgaatctgggggatcagggtttttatgggacggaagaagtatttgtttcactcttgctatagtaaatacttcagaaatatgatataacatgacataccatccatacatgaaatcctttactctttcagtggcagcaatatcttcagttgactctgtgagtgggtagaaccacatggagtatatgttcatgccgacaacgcccttctgtgcagcctgaaacaatgaaaccaaaaacagagaaataaaaatcatttttcttgcttaatggagcgatacgcagatctcctacatgttcgaaaaaaaaatcattttcttgacttcataagaataattaagaatatacagtatacagggccattcaagaaaatattcagaagaagaaaattgctaatgataatgcacactcacttggtgcttttccctgtaaagtctaacagctgaagcatgagctagcagggtgtggtgtatgaacaagtatggctcaaccgtggaatttcctagtgtgcagttgcttctgccaaacggatacgagcaacgatttggcgggagatacccatcgtcatagccagattgagccatgacatttggctcaatggaagttgtccaatgcgcgactctgtcaccgaactcgcggaagcacacatcagcgtatgctgcgaagtcatccctgcaacacatttgcaaggaaggtgaagcctgtgaggataaaagtttctaatggttattgtcattcaagataatcttatcagcatggagtgaaagggaaattactgcttaatgcttacacaactttggggctaacccatccaccgtactcatcttgaaggctctgtggaagatctatatggtacagaacagcatgaatctgaatacctattcatgaatcaggagcagaaagcctaatctcagactcaggggtcaccagtcatgcattattgttgttaagaagatatttggttagtaacaactaatgcgaagttaagagtgatgtgcattaatgaatacaattgtttttttttcagaatttggataggtcaaaatgataggataatcaagatatactaacctgcttttactagctcatttatcatactattgtaaaactgcaagccttttggattaaccgctcctctcc

SEQ ID NO: 15139 - DNA, 3574 bp, Oryza sativa
aatatcccgcggaaaaattttgaggtcggaagagcgaagccgccatagaagaaatgggagaagaccacagcctcgtgtgtatcgggggtcggaaaagcctcaccgcacgctggccgccacccgatgatttccttggcagggagaacgccgtgcgccaccatctccttcaggttctcctccgtcacgtcggatggcgcccattggccttcaaagttttccttctcttccgccattgattttttccgaatgcgttgatttgattcgagggatggctagggagaggtgagggattgaggcagtggatcacgggaaggattttgatgaacttttcgaaggtggattcgagtggaatggtgaaccctagtttgccggtgcagctctgtactgtagcagggagtggggaaaatggcgagagttccggcggggaagatgaagtgtcgcttggatcttgggatttcttgttaagggtatcggaggtgcaaatgggcttaggcctgaacagtacctcagcccagtacttttgacagcgtggcccattgtgctccttagggacttaggcattttttgctttggcaatttatgcgcacaatagtgttgcccaatgctgataaaatcctttttacgcggtcatataattctttggaattattgcaatgcaaattaaaaggtgcccgacagaaaggtgttatgctgtttttgtaagcttttttaggctacaaaagctgtctgggttaacttagaatgacttgtttttaccatagtcatttccttggtatgttatatgcctgttttcattatggtaaatagtcaaagcctaggctattagacttattcattaccataatttttataatttttggtgggtaatctttagagttttctattcggatgcccgtcaagtgtgttcattcgtgaaccttttagagtgctaaccactcggattccttttattatggctaaaaagcagtcggctagaatgcctctttaggcgccgcgtatgcttttgtcatatgatgcacgattgtgctattattttgttctcaactatatgtttagtttgttaactaatcacatagttgggagctacacctaattaggtgcatctattcgatgcactatattctttatcttttcgccctttacagtctttgtcttcgttactcggcagatcttggcatgaaaggtttgaagcactcggattattatctttgagaaggctatgatggttgactgcaaaggtctcgggggctactgtggagattatggatatcccatatctacacgacgatggtatttggactgaatacaggataccaaatatagatagaatatcttatttgtgtctcgggtttgtttctcaacttgtacatcaaggaaataccttgagacttagtcggttacgactgtattttatctgtatctgcatatttcgttagggatatagattatcttttgtaacacggactccttcccatatataaggggggtccgggtgcctctaggggtacacatgttgattttctccaaatcatacaatcaataagacactcggcggattcatccccggacaggagtagggtattacttcttgaataagaaggcctgaacctgtataaatcctttgtctccaaacccatacacttctccagcttgatagccaccccctttttattattgccgaaatctagtttcgacagaaatttttttataattcgtatttttattgttgttagatgataaaacatgattaatattttgtgcgtgacttctctttttaatttttttcattattgttttaaataagacggacagtcaaacattgggcacggaaaccagagtttgtctttttttgggacggagggagtatatataatggattgcctgcatgtgtgtactaaaattttgtaaggcctggtttagttcccaactttttcttcaaacttctaacttttccatcacatcaaaatcttcctgtatacacaaacttccaacttttctgtcacatcgttccaattacaaataaacttccaattttggtgtgaactaaacataccttaagatcaaatctagctttcatttgtgtgaccatatgtgtgtcatatgccggatgagagcaaattcttttgcgtgttgcactggcgagagcaggcagaattgtttgtgcacacgggatcaacaataactagcatcatatccacacctgctgcgggaggacggcagcgcctacttcggcatgctatcgctcggcgcttctgcaagcgcccacttcactctctctcctattttctttctcctccatgtaggagtatgctgatgtggagcttcttatcgccaacctaattagctctattatacttgctcttagcttaagaaatggtaatatttagtatctttcagaggcatgttaggttctctttctgtaattaattcgttattagtcgcgtgctccgcgaggagaaaacccaaccaacgggatgatgacagacagtaaggagtaaggatagaagataaatatgtagattaagcgttttaggtaaaataaggtggtattaatatattattacttgagttttaattattataaacttaaaaatagattaatttgatattttagagcaactttcatatagaaagtttttgcacggaacgtactgtttagcactttgaaaaagcgtgccacgagaatctaaaattttatccaatttttgttggagaaaataacggtgcgtatagtgccgatttcttattgtttgggtgataaaaaaatagaaaaacaaattttaaattgtgtactcgaattttttcttcttgctcagatttttacacccagtactaataggcaaacacaatgttagaagttccagataaaaatgtaaggatggagcctctacaattaatctataattttgcaaaaaaaaaaaaagaagagaaagtgttaaatttgtgatactatcatacaatggcttcaatctcttttttaccgggatgaccaaagaaaggacatccaatggcattaagagagagggaataaacggttacaagaaaatttttcatcgacagttggctatcgaggaagggtatacaccagagtgcacacccgaaaccatgcgaatggcctcaatctcaggtttcgtgataattttaccaatgtacctattgacgacttccaactctgaaaattggtagatacatgatgatatgccactaaaacagaattgttcttgcaggagagcatacaggatggtgttcagagtagtagcacccatcactcaaagctgagcatggaaggctgtggagacagaaccatcatccaccttgatgacagcattgttcttcaagaagtccgagtaccatctagcagagcgcctgggctgccttgtcagttcttcgctgccaaatcgacggcaacaatgccgaaatgcgccttgtaatcgccaaacatctcgtactgatccatgaatgaccacacgcagtatcccttcacgttggcgccattcctgcgatcgatcggtcagtcattcaaaccaataagatcccagagtgagatcttgtgatttttcagtagaaaactctt

SEQ ID NO: 15140 - DNA, 1569 bp, Oryza sativa
acacaacacacgttttggtagttagaaatattgaagtaatcaggcaatctctacttagaacatattttgagaaaatgttgcaaggatagtaccatcttttgagaaaatgttgcgatggtagttttcaaagtgtgtacagatcggtcaaaaataagatctgcaaattaagtagttgaataccgcccatcacagcatgtttttcaagaaacatatcgatttcatttaacttcattacataaaaggcattgacctattaaatgacatgtaattgcatctgcccatcaacacaagtgacatgtcaacaacaaacacagcagtcaaaattcccatcattcaattccccaaaattagcaccttacactaaatttctatcatggcaaaaaaaaaaactaaatttccacaacatcctacaacactgaattccacagatccaacaccatgacagttttatcagggaccagaagtaactactaaaaggactacgcttagtattatctgttctaaattaacatagagaatcatttctaaaacaagaacacgccaatcatccaaaatactaagcatatagcacaaattaccgactctgcaaccgtggaatcatagcagatatacgcaaacttctttcacggctatctcattagtcagaactcagaacaacacatttcaagaaaagtgagatcaagattaataattccagactcaccgccttgcgcagcttcttgatgagcgccatgggcttcctcttcagacccctctggaacctgcaagatcacagaaccaacggatcacaccagatcacacccgcaaaaaaaaagagcattcccgtaagggcaaatcaaatcactggcacgatttcatcacagatgcgagatgtgtgggcagcaacacaacaccttctgcgggcgcgcgcggggaagagctggacgaggtcatcggtggacatgtcgaggagcgcgtcgaggtcgacgccgcggtagctgtacttgcggaacgtcctcttctttggctgtgcgccggcggcgacctccgtctcgacttcgacgtccgcctgcggaaaaacgacgcggtcaccgacggagacatgcacgggggatcaccaacggaggaaagttcgagagcgaggaactcaccatgatgggctcggagcgcgcgggaggagctcgccgacgtcgcggaagccgaagccgaaggcggagcctggcgggtagggtttaaaggggagagggcgagtcaggtgggtaggttatatagtgcgcgtggttgcgaagcccattctcgttgtactgatgggttgggctgaatgatagttgggctgtgtggagtttcggctgggactaatttgccctaggaataagttcatctgaggtatgtcaacgaatccgattatctataatctatgttacctggatacagcacaaaagtggcgtatcagtatcggatacgtgtatggatatggatacatattggatacacttcgatacgtatcccagattttcgcgattttcagttaaataaaaaaaagatacctcgccgatacgtcccaagcgttcctgaaagggttaattggat

SEQ ID NO: 15141 - DNA, 683 bp, Oryza sativa
acaagtttggttccaaattttttcttcaaacttccaacttttccattacatcaaagcacacacaaacttccaactttgacatgcatgctcactggagacatcgattagcagaaaacatcaacaggtggatctataaaggagacatccatgcataactaaaggtgacatgcccaatggagatatagattacttggaaaacaaacatacataggtctgatccatgcataattaaaggggcagctcaaggcaaggtgggtatgaaaagatggagggagagctacgcagttgtgctgtcaacagcttctaagcatggaagctctgccttggttctcttgtatgcgtttctagcagagttttgtccaagtttgaagcttgcgtaggtgatgatggataaacggattattctacccctgaaattcaataaagcatgaccaagactcaaatttaagttctactcctgaaactcaataaatcatcatcaagaccaagagttaaatttaaggtagcagcaagaaagtcgtagaaacagacggaagggaatcggtattgcaccagaaaagcaagcgaggactaggagcaagatcatctcccccaatgctttgcacccccgattccgcagcatccctttcctgctgcatcatcgccgaagcagatcccttcttcatgtggccgctgttctttgc

SEQ ID NO: 15142 - DNA, 779 bp, Oryza sativa
agatcttcttggcgctgtcagcctgtcacaaactcgcaatccaattgcacttccagcggttgagcaggttcaattcaacatgactttcatcaggagatggtaagttaggaacagattactgtcacaactcacaacagttattactactatcgcaacaaatgctagctgtccttatcctcatcgactggatacttcagaaacaagcataacagtagcattggagcaaaggacacagcatggctagaagtagatgctgctacctagagatatcatctcgaattcatggcatgaacaaacgtcgttcatgcagccatgcaggaataataagctcagaacaggattcaggacaaattcaggctatctacaagcttgccagcatcatcatattataataatcgctttaatagtcagcaaacttgtacagaatatccagatccaaatttccacaaactatatatcatcatcaggaattttaaaaagagaactcggaatcgatttcgcatgatattcgaggacacccaagccaaactgacgataacgatgactaacgctaatacctactacaacaccaggtgctggcccttatttgataacttgcgcctgcgagaattcttaggcagaagcagatgcagcagtggcaccgacgtgcttcacgatggtgttctggaggtcatcctccctggcgccaacgaccttgtcagcctcagcaccatccttgatgaataggaaggtcggcattgcctcgacattgtacttttcagcaacttcctgttggataa

SEQ ID NO: 15143 - DNA, 849 bp, Oryza sativa
cgattttgattcttcaaaatatagttttgcaaatttttacatgaatttaagtagaatttatgtgagtaatttggagttctggctatgatggcacttgcttaaattactacaagtatttacttgttgatataacgtgaacaaaaaataagtatggtgcactgattattctagaacaatgtagtacaattggagtttgaaatgattaagagacatcaccaaatgtactgataataccttcaagttgacactacagctcttggttaaaacttacaaataaatgcatatcattgcgatatttgttgttttagaaagcttcgacagccccccctcctttttttttgtgatggctctacatgcacacacctgtttcgttaacattttagcatatgtggaattcttctgcttgtctttagtcatagttgcttgcatgtcattgataattcatatgattgggtagttatcctttttttattttaagatagtgcaatataaaatactacattagctcactgtttgtctctttaataagtaataactctgttgtttttgctgatctattgtgaggggcttcaaggctccagctatgcagtcatgcatgtatttataccttttatttatttttgcagtccaagcggcaaaggggttgtagaaatgtccacggatgatgaatcagattgtgtggttatatgtcccccaaatgggaaagctggtcatacagaagttatgagtggcaggcatgatgaagattcttcaagagggcaagaaaccccttctactatagactcacatatgaatgggaatgtccaggatggagtgcctgcagatcaagatgtgctgaagctggttgat

SEQ ID NO: 15144 - DNA, 1406 bp, Oryza sativa
tcatattagtcttgatgagatcatctggatttctgcccaacttcctgagtgtggcatatggcatcaaattcacagcagctcctccatcgaccatcattttagaaattggcttcccattgacaaacccattgatatacaatggcttgagatgccaattttctatcccctctggcttctcaaagaccgcctgctctggtgacaaaactaacttagctgaagcttcctcaacatcatcaacatcggcttgcctagcttcaaattcggccggtagcataaaaaccatatttactgatgccgatgcaagagccttgcctttgagcaccctttttgccttttcggcttcgacctcatcggctgatacaactgtacttttaacacgccattcttgcttagtctttgttttcctcagccgatgattaatctcttgatgcaccctctgaaattgctccctgttcctcaacctttgaacccttctcttttgattcttggtgaaaatgcctgtaggtacaccactgtgtattcctattttcatctttatcttgataatgatcttgatttaccaggcccagcctttgatgaacaggtactctcttctgatttggccgattacctctattataggatcggcttgaactccctgtatcttcactgcatccagggcaattctcaatcgatggcaacctcataccttcattccagcaaaatctgaaaaactcacaatcccaatgagggtcaaaaccatcatctttttcatgatatttctcatgctgtttatcatactttctttggtatttgttgataatcctagtcgaattcatgtgaaaatttctattcatccccccatcggctgtccttctagatgtatgcaccttattaatagggaaaggattaccatcaaccttcatctgcttctttgaatcatcaaatttgatctttcccccttcaatggctgcctggatttgctgcctaaaaaccttgcaattattagttgaataggaactagaattatgccacttgcaataccttcttttgcccagctcttcggctgatgggatcacatgaccagccggaagctgaatttgtttttctcgaagcaataggtcgaaaatcttgtcatccttggtgatgtcgaagtcaaatttttcctcttttccagaacttttcacccattggcatggtattactttcttgctcttgacccattcggctgccgccacctcggaatcatcgtcttcatcatcagaaccatacatgtaaggatatacatgattaatctttttgaagttcttcttggccttagcaaacctctgctcatgaagagtcaccttttgtgtgagatgtgataaactctcaaaatcttgagccgaaaacttttctttgatcggtgctatcaacccctgaaaagc

SEQ ID NO: 15145 - DNA, 769 bp, Oryza sativa
tcttcaagccgaaagtcatcacaacccactcaacaagccgattgcaccaggacatcggaaggctgtcttatgaatgtcttcttcggtaatgaagatccgattgtaacctgcattgccatccataaaactcaaaatcttgtgtcctgaacggcatcaaccaactgatcggctactggcatcgggtactcatcctttggggtagctttatttaaatcccggaaatcaatgcacaccctaactttgtcgtttttcttgatgactggaactatattagaaatccactcagcatatcgacatggacgaataaacccagcatcatacaagcgtgcaacttcagccttaacagccacaagcatatcggctttacatctccttggtggctgctgatatggcctaaccccgagctttataggtagccgatgttcaacaatcgatcggctgagtcttggcatctcatgatattcccaagcaaagaaatctctgtattctttcaaaagttctattaacttggttctaaatccggaagataaattcttactgataaatgttggccttggtcgatctcctggacctatgtcaatttcctccaaatcatcagccgacataaaaccttgcccttgtttgtcatcgagatcatctactgcatccttggtgtagacatttgaaccctccacgacgcctcaaaataacaatttgggctctgcatcttcaatcggctgtatatcagaatcggacacttttagaaaatctccatcccaaacttatccag

SEQ ID NO: 15146 - DNA, 664 bp, Oryza sativa
ccattatcaagttttagtgggcaagtaattaattaaccaatcacgattaaccatcgtgaactatcattaagccatccttaaataatagtgagtcataagttatcccaatagtgtgctaatgtttctaagcatggctaagcaatcatatctaatatctagctcaaccaatatataaagctcaactagtcaagttataataacccaaggtatcaaggaataaagtaatcaatgcaaacaggccataacaaaggaatagattcacaccacccagtgacattcgaaaataaatgcacagttgaaataaatagagaatttaaatataggatcaacatgctcaaaggattgtgtttaggatctgtgtgacttgcattgcaataatcggtcttcaattaatcttctgaacactcccgacgcactcacgaaccttcgcaacgacggaaacgacaagctaacacgcaaaacgaagaaaaagactaataaaaaccaaataaacagtacatataaagtaaacaaacatgtagatcatgattttagatgaatttagcaacttgaaccactcaaaaccgagttacgatgatttagttatgaatttccgaagatttaatctattagaaaaacaggaaaaagaaaaacgatgatgacgtcatgatgacctcatcaatgg

SEQ ID NO: 15147 - DNA, 35354 bp, Oryza sativa
  unsure (1)..(35354): unsure at all n locations
attgggtgcgttcttggcaaaaaataacttcgtgtttcgcgtggcgaagttttgtcaattaatgccaatattggccaatattgccacaagtgggtgcgatgtttttcaccggaataaaaaagttcaggaagcaccaaaacaagatttttggaaatattggagtgtactgggtgcgtccgtgtctaaaattcactccgtgattcgcgcaacgaacttttgtcaattaatgccaatattggcctatgttggcacacatgagtgcgatgtttttccccataaagaaaaccttcaaaaagcaccaaaacatgatttttggacatattggagtgtattgggtgtgtccgcgtcgaaaaatcatttcgtgactcgcgcggcgaacttttgtcaattaatgccaatattgatatatattggcacacgtgggtgcaatgtttttcaccggaatgaaaaacttcaaaaagcaccaaaacatgatttttggacatattggagtttgttgggtgattccgtgtcgaaaaatcactccgtgactcgcgcggcgaacttttgtcaagtaatgtcaatattggcccgtgttggcacacgtgggtgcgatatttttcaccggaataaaaaacttcaaaaagcaccaaaacatgatttttggacttattggagtatgttgggtgagtccgtgtcggaaaatcactccgtgactcgcgcggcgaacttttgtcaattaatgccaatattggcctatattggcacatgtgggtgcgatgtttttcaccggaaggaaaaagttcaaaaagcatcgaaacatgatttttggacatattggagtgtattgtgtgcgtccgtgtcgaaaaatcactccgtgactcgcgcagccagcttttttcaattaatgccaaagttggcttatattggcccacgtgcgtgctcggagtacgtgcctagcccggatgaaggaagaagcaaactgtgcgatgtttttcataggaatgaaaaagttcaaaaagcactaaaacatgatttttggacatattggagtgtattgtgtgcatccgtgtcgaaaaataactccatgactcgcacgacgaacttttgtctattgatgccaatattggcatatattgcgacacgtgggtgcgatgtttttcaccggaatgaaaaatttcaaaaagctcgaaaacatgatttttggacttattgaactatgttgggtgtgttcatgtcgaaaaatcactccgtgactcgcgcaacgaacttttgtcaaataatgccaatattggcctatattggcacacgtgggtgcgatgtttttcaccggaatgaaaaagttcagaaagcacacaaacatgtttttggacatactatagagaattgggttcgtccgtgtcgaaaaatcactcgtgactcgcgcggtgaagttttgtcaattaatgccaatattggcctatattggcacacgtgggtgtgttgtttttcaccggaatgaaaaagttcaaaaagcaccaaaacatgatttttagacatattggagtgtcgaaacaagatttcggcaataataaaagggggtggctatcaagctagcaaagtggatgggtttggagacaaggaattttatacaggttcaggtcttcttattcaagaagtaataccctactcctgtccggggatgattccaccgagtatgttattgattatatatattggagaaaagaattgcgccccgagaggcacacggaccctccttatataggggaaggagtccgctttacaaaatacagtccatatcctaacggaatatgggattatagataaaatacaatcctaaccgactaagatctcgggtatttccttgacatacaagtaaaaaactaactcgagtcttcataaagatattctatctatatttggtaccatatatccgactaaattataactgtcatgtagatatgggatatccatattctccacagtagtcccgagaccttcgcagttgacaaaatagccttctcgaaacaaaaaacagcaatccgagtgcttcaattcaacttgctccagtttgccgagtgctaaaatcaaagactgcgaagggcgaaaataaaacatggtgcatcgagtagatgcacctaattaggtgtagcgcccgactatgtgattagttgaaaaactaaacacgtagtcaagaaccgagtggttttatcaacactccttgaacatatcaaggataaaaacatgaaagggccaagtgataaacactcaaaagatccaaaaatagacatatttgataggaatccgagtaagaaactcttaaaatgattcaccaaacatgataaaaaatcacgggaattaatgagtctaatagcctaggctgggacccttaccataaccaaaataagcatataacatgctaaaagaatgactattagtaaaccagtcatctcaaatcaacccaaacagcttttgcagcctaataaggcttacaaaaacggtataacacctttctgtcgggcaccttttgtttgcatcgttttaattccaaagaattatcaaaccgcattaaaaagggttttaacagcattggaccacatcattgtgagcacaaattgccaaagcaaaaagtgcctaagtccctaaggatcacaatgggccacgctggaaataaaattgggctgaagtactgtgccggcccaggcctgctagcactcccgataccctaatatcaccgaagtgaaaaacgtctcttcgtcatccccgccgagactctcgccattttccccatttcctgctacagtacaaactgcgccggccaagctagggttcagcaatccgctccaatccatcctcaaacactccacaaaatttctgccggcatccaccactccaattccccattcctttccagccgtatctcagaccaaatcaaaccatccagtccacattcatggcggaagagagagaaagcttcgagagccagtaggcgccctccgatgtgacggaagataatctctagctttatgtgaagctggttctaagtgacgacaaaggcgacactcctagaaagcttggagaccgagaggcaaccaataaactgccgaagcaggctactccaaggaagaaaacatccagtcgtcctgtgccaaaaatcaggaagaactctaggtgcaactcatattacgatctccgttgcattgatgcgcacccattgcgataatagtactgacaatcaaacttgcaggaaaccatctgatatagatctatctagaaaagactctgacccgaccaacatggaggcgggttcctcaaaagaaaccgggccgactgcaaaagatctcccgagtgataatctgcaggccagcgacaatgtagaacccagcgacgaacccctgactggaaaccagtcggccgaagccgaagctggagttaatcaggagcccccgactggaaacctgtcggacgcagggccaagccaagagattccagaagttgaaacccaagcagacaaccctcgcggacaagacgccagcaatgaccggagatctggatctactttaaaggcatctgaatccactcgtcctcgtccagaaatcattacgggtaaacactttgtctgaaaccatgtcgacccaaataactctgatcaatcgtctaacctttgtcagtagatacattaggaccaatgattggtgatgaagaagaaattccccgtatacaagcagccgaagattcgtgccctcccattctggtcaagtggtgggatgacaacttgcaacctcaaggaattataataaaccggcaaaaagaagacgaagaggtctgcctaatgaagaaggcactcaaccaagcgactcgcattgtaaatgtaagttccttgatgcctgacctcagccatcttgtttgccgtctggctcgagcgctgattaaactgctctgcagaggattcatcttaggaacgaggcgaaaaccgcaacccttgagaaactagttcctcatcttggaaccctcgaaaccaccaggagtcaactgcacgaggccagagaacttgccagaaagaatgaacacgatttgagggattggattgctgagctccaggaatccaattataaactgagtggctcatccaaaggttcgcgcaaactctgcccaactgatttgggctgttatctctgtaatcttgattaaccgaagttaatgtactgcaagctgccaagatatctgaactagagaagaagatccaaactatggaaaatgacaaggcagagctggcaagatagagggattcagctttaaaggaggttgaaggtaccaataatcaatacctcaaaagccattatcttctatatgctgattcattaatgtgaatctgttgatgcagaccgcaagatcaagtctcaagcacagtttgatgtcttagttgacaagatcaacaagcttgaaggagccagggataaagtcgctaatgatgctactccactcatccgggccatgttcttcaataacgccggttcgagtacacttgatgctgccaaaatcttcgacaagctgagagtcgctccagatacttatttcaagaacatcaaagaagctggaagtatgggagcaagtctggcgttggcgatgaccaaatccctttatccaagggttgatatggatgccattgatggctttgcagatgggacgagcgaagaagctgctcttgacctcattaacgatgcgcagaaagccgctgacaagattgctgctgatgtggttgaaagattccaagaagtcgaccttcggccgactgggtctgataagtctgatgatgaaaaaactgatactgattgatataacaatgattttgataattaatgatgatgaaggctcaatttgtacaatactgatgaatttatgctatgcttggtgttccatacttagcttttgatttcttaaaagcctttatctagccttattgagcctaaaacccgcaaaagctattaaaaaccttcagtcctcatcgactaagtcgaaagaccaaatagggcaatgataaatcaagtaagcaaattgaattgataaaaatcacactccattattatcatagtagcccccgactgaaaacttcaaggaaaaacttgagattagcagtcaaagaggaaagatacaaacgaaacgcctaagcataaaatcgacgaaggtgttcaatattccaagaattgttgatgagagtaccatcttcgcgcttgagtcgataagaacctggccaagtgacttcagcaattatgaacggtcctgcccataagggagataatttatgccgatcctgtgtggtttgaattttcctcagaaccaggtcgccgactaaaaaggctcacgatcgaacattccgattatgataacggcgcaacccttgcaaataccgagtcgactgaattaaagctgcttcacgggcttcttctaatcgattgatgtcgtctacttggccctcttcataacgctcctcgttgaagttccgaaatcgtagtgattcaaattccacttcactggcaacattgcttctgcaccataaaccaaaaagaacggcgactggccggtagcccgactgggagtagtgtgtaaagactaaagtacggacggcagctgattgacccacttgccagcatagggatgtagtcggtcgaaaactcgtgcttttatcccttgaagtatcatgccattagcacgctcgacttgtccgttactcatggggtgtgccacggaggcatagcaaatttttataccgaagtcttcacaaaagtctttaaatgctccgccagtgaattgagtgccattatcagtgatgatccgattaggtaccccaaaccgatgcacaatgttaatgaaaaaatctctagctttatctgccgtaatcgtgatgaccggtttagcctcaatccatttggagaatttgtcaatagccataaagagatgcgtgtaacccccgactgcccttttaaacaggccgaccatgtcaagcccccagaccgcaaacggccaggacaacgggatggtttgcaactcttgggctggtaggtgaatttgtctggcaaaaaattgacaaccctcgcacgtccgcacaatcttgtcagcatcagatacagctgtaggccagaaaaaaccttgccggtaagctttgccgacaatagtccatgcagcggcatggttaccacaaataccagaatgtatatccttcaacaattgtcttccttcttccaaagacacacagcgttgcagtattcctgatggatttttcttgtacatatcagtttcatgaataatgtaaagtctgctgcgccgggaaatctgctcggcttcatttttgtcttgaggaagttcttgtttgctcaaaaattttatgaacggttctctccagtcggcttcgatcatgcttacgccttgagtatccatggcttcaattgtctcttttctgggcacggttggttcgtaaagatgttcaacgaacacatctgaaggagcagcttcctgttttgaaccaaaattggccagcctgtcggctgcctcattgttatgtcggagaacatgggtgagctcgagtccatcgaatttgtcttccaacatgcgtacctcttgtcgataagcagtcatagtatcatctagataggaccactctttcatgacttgattaacaaccaactgagagtcccctcggacaattaatcggcgaatgcctagagagatggcaatccttaatccatggagtagcgcctcgtattccgccacgttatgggacgcagaaaaatgtatccacaatacgtagctcaatctttctcaagtcgggagattaaaacaaccccagctccagtgcctgtaagcctcttcgacccatcaaaatgcatagtccaatattccctcttttcctctggcatgtcttcttggcactcggtccactcggcaaggaaatcagctaaagcttgtgacttgatcgaagttcgtggtttgaacgatatgtccaaagacatcaattctaaggcccacttcgcaatccgtccgtttgcttcgcgattatgatgtatatccccgagtggaaacgatgtgaccaccgtgaccgagtgactttgaaagtagtgagataatttcatgacggtaattaagacaccatataataacttttgaacctgaggataccttgtcttggagtcggctaaaacctcactgacaaaataaattggtcgttggactttttgaatatggccttcctcttcacgctcaacaaccaggaccgtgctcacaacctgggaggtcgccgtcatatataacagtagcggctcttgtagatgcggcgaggccaaaactggtggagtggtgagaagtctcttgaagtcttcaaaggctttttgtgcttcgggtccccactgaaaattgtcagtcttcttcagcagcttgaaaaagggcatcccccgctcgccgagtcatgagacgaaccggctgagcgccgccatacaaccagtcagcttttggacgtctttttgggagcttggcggtttcatgttgaggatggcgttgattttctccgggttggcctgtatgcctctttgagataccataaatccgagcaacttccctgacggtactccgaagatgcacttttcagggtttagtttcatcctgaaagcacgaatgcttgtaaaagtttcctctaaatctgtgatcaggtcatccttctgcttggtcttgacaactacatcatcaacgtaagcttcaacattgcggccgatctgagtcgagaaacatctctgaatcatgcgttgataggttactcctgcgttcttccatccaaagggcatggtgatgtagcagtaggccccgaagggtgtaataaacgagatcttcaagcagtcggattctttcagtcggatctgatgatatcccgagtagcagtccaagaaactgagtaactcgcagccggccgttgagtcaaccacctggtcaatgcgaggtaacccaaaagggtctttggggcaagacttgttgaggtcggtgtaatcaacacacatgtgccattgccccgtctttttccgaactaggactgggttagccagccagtctggatgaaggacttccttgatgaagcccgctgctaacagcttggttaattcctccttgattgcatccttcctgtcctgtgcaaaacggtggagtcgttgcttgatgggtttggcgtcttccttaacatgtaaagagtgctcaatcacctctctaggaataccaggcatatcggatggtttccatgcaaagatatctttattattttgaagaaaggtgatgagcgcgctttcctatttacaatctaactcagcgcctattacagcaatcttatcaggatcagagggatctaagggaatctttttcgtcttaccattgctttctccgcttttgagcatcttggttgcgggcacttctccttcgcttgccatggtcgcagccagtcggatctcttctcggtcgagtgtaatctcgcgggtctgggccatctcgcaactttctttgtcacatgtgacggctttcttgatgttgcttcgtagtgatatgactcctcgaggaccaagcatcttcatcatcatgtaggtgtagtgtgggacggccatgaatttggctagggccggtcgtccaagtatagcatggtatgctgtctcgaaatcagcgacttcgaaacaaacattttctgtgcgaaaattctcccgagtgccgaaagtgaccggaagagtgatctagccgagtggtgtagctgataatccagggataacaccgtggaagggtgcattgctcggctttaattccgtgcgaggaatctgcatatcgtccagggtcttagcgaaaaggatgttgagtgcactgccaccatcaatgagagttcttcggagcttgacattgcgaaccactaggtatagtactagggggtaccgccccgggtggaccactcggtcgggatgatccgagcggtcaaacttgattgctatttctgaccaccgaaggtattggggcgtgttgggctgaaccgcattgatctcccgttctgttagcttctgctttctcttagattcataagccagaggtccgccgaagatgtgattgagttctttgcgatgatcttgaaaaccagtcgaggcatcgtcttcatcgtctttcttctttgatgtgccttgctctccgtctgaaggcttacgtgcattcttgacgtattgctccgcaaattgtttgtagacgaagcagtctttggccacgtggttggagttaggatgatgcggacattgggagttcattatcttgtcgaatgtgttgacgcggggacgttgtcgggaagatggagaggttgttgccacaagttcttcgggcttacgcttgcgatccttgcggttgttacttccactccctcctgcggtcggcgtgtccttctttggcttccaagtggtgcccgactgcttggacgctgtaatagcatcttcggctttggcatactcgttggctttttcaaacatttgcttgaccgtcttgggaggtttgcatccgaacttgccgactaggtcctcgtggcgaatgcctttagtaaaggcagcaatgatgacgtcgtcggtgatgtcggagatcttgttgcgttgctcggagaagcgccggatgtaatcttgaagggatcctctagacttctgaacgacgttgtagagatcaaactgtgtgccggggcgttcaaaggtgccctggaagttggcgatgaagtgatcacgaagttctgcccatgatccgattgtgccacggggtagtccgtggagccaggatcgggcggaatccgctagagccacaggcagatagtttgccatggccttgctgtctcctcctgctgcgcggattgcgagaccatagacggtgagccaagactcagggttggtggtgccatcatatttctcaattccagtcggcttaaagccggctggccaatccactcgacgcagatcgcttgtgaaggcagcaactccgtccacatcgttgtcgtaacgatctggtgaatggtggcctcttgctggacggcgctagttgatggtgtcgcgaagatcgatggggcgccttcgatgtggggagtgtggtcgttcaactcgacgctccctataccgttcgggaggtgaacgaacagaccgttcatcatgtcctctgctcctgtgactagatccggcactggcaatgctgaggcatggctggtgatagtcttgagatcgaagatgagggactcggctaccagtcaaggtgcgggtgcttgcggagttggctggacccgaggaagcgatcatggtcttcgtctggttcaagatgttgacaacatgatcagcttggttgagtgcgtcttccttgaggagggtgtcgaggagagtgattgctgcaaccgcgttctgctggggggtgcgaaagaccgctgttccgtcgacgtcttgttgcccaatgagctctctcgctcgcctcccggattccaaggtgcgttgccgtcgatcttcagcctcctttgcaatccgttcgcgatcttgttgctcacgctatagtcgttctcgctcctgtcgctgtcgctcttcctccagtcggcgacgttcagcttcttgccgtgcgcgatcttggtccgcttctcgggctcggcgctgttcctccgtttcgttgtcagccatgaatacaccgaagaagaggggcgtgtagttatcctcatagctgtcgtcgaagttgtcgaggtcgtcgtggtcgtcgtagtcgaggatctcggttggtcgagaactgacgccgggggagctgaggtagccatccaaatcttccgtcgagactgtcccaagaagttggagtataacgccaacctccctggatctagactggatcagggccgatgccggagctcgcctagatctctgagtgggagatgttttgactgtgaagacggcgtccaagtcatcaggaagtttcatcaagattgaaggataggacccgtcgtcttgatctggtcgcggaggagtagattggatctcgtccgagtggtttgaagccgactcggaagatatgatcttggagtaggcctcggccgagttcggaataccgaacggcacggggacctggtctctccctgactggttcgaatccgagtcaaggagagagatcttgctgaagtcgttggtgatgaagttgaggctgccgaaccggaacgcctgcccgggagggaaggcgaagtcgtcgatgccagaaatggaacccatcgcacttagtcggcaaaaacttgacgctgcccctacctggcgcgccaactgtcgaaacaagatttcggcaataataaaagggggtggctatcaagctaggaaagtggatgggtttggagacaaggaattttatacaggttcaggccttcttattcaagaagtaataccctactcctgtccggggatgattccgccgagtatgttattgattgtatatattggaaaaaagaattgcgccccgagaggcacacggaccctccttatataggggaaggagtccgctttacaaaatacagtccatatcctaacggaatatgggattatagataaaatacaatcctaaccgactaagatctcgggtatttccttgacatacaagtaaaaaacaaacccgagtcttcataaagatattctatctatatttggtaccgtatatccgactaaattataactgtcatgtagatatgggatatccatattctccacatggagtgtactgggtgcgtccgtgtcgaaaattcactctgtgattcgcgcagcgaacttttgtcacttaatgccaatattggcctatattagcatacatgggtgcgatgaattttagcggaataaaaaagttcagaaagcaccaaaacatgtttttggacatactgtagagaattgggtgcgtccgtgtcgaaaaatcactccgtgactcgcgcggcaaagttttgtcaattaatgccaatattggcctatgttggcacacgtgggtgcggagttttacaccggaaagaataacttcaaaaagcaccaaaacatgatttttggacatattggaatatgctgggtgagtccgtgtcgaaaaatcactccgtgactcgcgcggcgaacttttgtcaattaatgccaatatagatatatattggcacacgtaggtgcaatgtttttcaccggaatgaaaaacttcaaaaagcaccaaaacatgatttttggacttattggagtatattgggtgcgtccgtgtagaaaaattaatttgtgactcgcgcggcgaacttttatcaactaatgccaatatctttggacatatttgagtatgttgggtgagttggtgtcgaaaaatcgctccgtgactcgcgcgacgaacttttgtcaaataacgccaatattggcctatattggcacacgtgggtgcgatgtttttcaccggaatgaaaaagttcagaaagcacacaaacatgtttttggacatactgtagataattgggtgtgtccgtgtcgaaaaattactccatgactcacgcggcgaagttttgtcaactaataccaatattggcctatgttggacacgtgggtgcgatgtttttcaccggaatgaaaaacttgaaaaagcacgaaaacgtgattttttggacatattggagtatgttgggttagtccgtgtcgaaaaatcactccgtgactcgcgtggcgaacttttgtcaattagtgccactattggcctatattggcacacgtgggtgagttctttttcaccggaatgaaaaagttaaaaaaaaaaccaaaacatgatttttggacatattggagtgtacagggtgcgtccgtgtcgaaaaatcactctgtgactcgcgcggcgaacttttgtcaattaataccgatattggcctatattggcacacgtgggtgcaatgtttttcaccggaaagaaaaacttccaaaagcaccaaaacatgatttttggacatattggagtatgttgggtgagtccgtgtcgaaaaatcactccgtaactcgcgcggcgaacttttgtcaattattgccaatatagacatctattggcacacgtgggtgcaatgtttttcaccggaatgaaaaatttcaaaaagcaccaaaacatgatttttggacatattggagtatattgggtgcgtccgtgtagaaaaatcaatttgtcactcgcgcggcgaacttttatcaattgatgccaatattgccacacgtgggtttcaccgtaatgaaaaagatcaaaaagcaccaaaacatgatttttcgacatattggagtgtattgggtgcgtccgcttcgaaaaatcactccgtgactcgcgcggcgaacttttgtcaattaatgccaatatagatatatactggcacacgtgggtgcaatgtttttcaccggaatgaaaaacttgaaaaagcaccaaaaaatgattcttggacatattggagtctgttgggtgagtctgtatcgaaaaatcactccgtgactcgcgcggtgaacttttgtcaattaatgccaatactggcccatattggcacacgtgggtgcgatgtttttcaccgaaatgaaagacttcaaaaagcaccaaaatatgatttttgggcaaattggagtatgttgggttagtccgtgacgaaaaattactccgtgactcacgcggcgaagttttgtcaattaataccaaaattggcctatgttggcacacgtgggtgtgatgtttttcaccggaatgaaaaacttgaaaaagcaccaaaacgtgatttttggacatattggagtatgttgggtgagtccgtgtcgaaaaataactccgtaactcgcgcggcgaacttttgtcaattaatgccagtattggcctatattgccagacgtgggtgagttgtttttcaccggaatgaaaaagttcaaaaagcaccaaaaacatgatttttggacatattggagtgtacagggtgcgtccgtctcgaaaaatcactctgtgactcgcgcggtgaagttttgtcaattaatgccaatattggcctatattcgcacacgtgggtgcgctgttttttcccggaatgaaaaagttcaaaaagcaccaaaacatgattttaggacttattggagtttactaggtgcatcagtgtcgaaaattcactccgtgattcgcgcaacgaacttttgtcacttaatgccaatattggcctatattagcatacgtgggtgcgatgtattttaccggaatgaaaacgttcagaaagcaccaaaacatgtttttggacatacttgtagagaattgggtgtgtccgtgtcgaaaaatcactccgtgaatcgcgcggcgaacttttgtaaattaatgccaatattggcctatgttggcacacgtgggtgcgatgtttttcaccggaatgaaaaagttcaaaaagcaccaaaacaagatttttggacatattggagtatcttgggtgagtgtcacaccctgagatttttctcccaagcctaaattgaatttataaatggtctcaacaaaataccgctgcaaaagcaagagagaaaccctaaaataattgatgcaaataataatcggaactggcatgtgggattttttcctgagttctacatgtcgaaatacgctaacaagattttagtggaattttaagagctctagaaataattttaatcaattaaaaatgaccacaagcaatatttaattccctagaaattcttttccttatttttctttctttttccctcttttcttttcggaatggtccgccggcccattctctcctccctccccttcccgctgggctggccgcccgagcccctcctctctcccggggtcgccgataggtggggcccacctgtcgagtcctcccccaacctccagccgccgccgcaccctcactaccgcgttttccgggccacgtcggccttgcccgcgcgtgcgcccacgtctcccgcgcccactccctctctctcccgcccgcgcccgcgctcgagacggccaggattcgattttcaaatcccgcctctctctcctctcccactaccccacgtcggctggcgattcccgcctctcctagccacgttcgagctccctctcccctatttaagcatccccactctcccctctctctttttctccatttcgcgagctctcccgtgccctctatcgccctagcgctgtcgccctcctttccgccgccgccgccaccgctccggtcgctgctagccgccgctagccgctgcgccgagccgcgtcgtcgacgccgtcacgttcgccgtcgtgcaggtcaccccgtccgcccctctcccgtcggattccgcctccggaacccactccgcgccttgcgccggtgagcaccgccatggccaccgccttcggccggcgtcctcgccctcttccatcttcctctctctctaacccctttcatcgtgttcgctaggtggttccagagctcgtcccgttgccgtcatcgccctccgtcgctcgccgtcatcaatcgccgtcggtgagacacctcctccccttcctccctctctctcccacgccgcttagtcgccgcgctgccgcctagctgcttagccgccgctagcatcacccgcgccgtcgcgccgccgccgcttgccgtcggtcaccgctgtctgccgccgccgccctgcggtagcgccgctgtgcaccgtggccatcgggccggcttgggccgcccgtgtgtgccggccgcgtgctccccgccgccgtccgatctactctcgggtagatcggggccgtcggttcggccacccgcgtggcgtgccatgtggccgccacgtgtgcgccacgtcggcgccacgtcagcgccacgtcgtgtgcctcccccttctccggtccgtggactcggtccactgtggaccgccacccgagtcactgccatgtggggcccacatgttggcgccgcccctctctcctagggtctatttattgcgcaataaatcaattaaggatttttctgtttatagtaaaagcacagtgaatcttctaaaattcatatctaattcatccgagctccgtttaagcccattcaagtctcagtaaatcaagaaaaatgagtagaatccattaaaaatggttttgttctctgtttcagtagtcttattgcctgtttgtattgtttgctttgtatgtcgcttagattccggctctcccgacgctccggtgtactttgaaatagtcgccgaggttcctccagcagcagagcaaggcaagtcatgcttgtcacttgaagatgttgatcctatattgcaaatgttctattgttttccttcaaatattgcattgtttcataatgatactatgggatgtttacctactgttacagccatgctatttctgtaccatgctcctttgttagcttgggatataaacatgactagagattggactagggattgcttagccatgcttagttcaactagcacacaatgggggaaatcacattaatgcatagatatcagattctagtaatgacgttggttaatgccaccgctccggtgttggttaattaaaatatatcaaatggtgggctgtgggtgcatggttttgttggtcgcgcccatggcatttaaggaccggttcgcgggatgccctggaagaacttatcatacttaccacaagccagcgtgtgcaacggctgggcttgtagtgtagttttcctctagttgacgcatccaggaaagggtgggcgtgatggagcagggcgggccctgtgacggcctctgtcgcttccggattcacctaggcacgagaggggactgcccgttgcccgctggggacggggtgaaacctgaggtgtggtgtgcttggctagagggggttatgcgaagagtcctgtcacggcctctttccggtatgtcgtggtggcatgtcggcgcacggaaacgtgtcgtggggctgtgttttgtgggtacagttgtacacctctgatcagagtaaaactatttgaatagccttgcccgcggttatgggcggtcaaccagattcaccgtgattagtctcaccctagtttaatatgatggaactgattagttcaggtggttggttgggcctgttgcaacgtggtgtagcgttggacagtggatggctaatattgattaattattacacctgatttcctgctttcaactactgtttataaatgctcgttttacgcaaaagaacctctctagctatcctttggtaatatcctgcatcataccccctgttccggtatgacttgctgagtgtggtggttatactcagtcttgctctattttccccaaaccccagagtttgagtatgcgttagatggtggtttctccgaggaataggcttcgttcgtgccgtcgaggatgcctgtggactggtgttcccgctgcagtccaagtcaaggcttagctccagttatcttttatttttccgctacatttatgtaagacttttataatttttgtaagacgtggatctgtatgtcaactttgtcgtttgtgtaccccccggccggtcctggatggggattttaatgcacattctgcttggaattctattcgggaatttctgggcgtgacaacttggtatcagagccaaccttgaccgtaggacaagccaaatgggaaaaaacctaagagccctctgaatccttttcattgcatatgttctttgcaattggatttgttccgggaaaattgggatctgttcttgtggttcaagggaaaaatcttggtcgctcgtttaagtgagatttgtcaaattaggtcagtctagggtttgatgggaggaatgcattaggtcctaactcaggaatatgggttgcaaggtattaatgctcttattattattattagtatgtatctaatttctcattattttatcgctatgtaagtccgtcttatttattcgccctcatgcaaaaatggtctatgcacaaaactctgctctcaattgttcattttaattgagtcttttactactttatttaaattggatttgagcatgcattgatcctacccctttgtcttctctagatggccgaccacccacccaaccaccacggagaaggcatggatgattttgtggcagagttggctcgcatgaccctggtggtgggctacctgttaacaaccgaatttggtaacatcagcatcatgaaagaagattagatcgaagcaaaattggaggcggagatcgagttcggaaacagggcaggaatcgctggagtccaaatcggctacgattaggatcggctgggtctgagtcagactaggtaagccgatacagctgattccgacaatgcagcttgatgtatgatatcgggttggattgaggtgcttcaaggtgattgccgcacatggatagagtcctgagaaggcaattgtatctattaattagggtgttttatgtaatctccttagagatacgattgggcaaaagtctgccacaaagacttatgctatcttagagtttgctagagatagtagtcgtgtccgttatgtacatatcttgtaattcagagtatcataaagctgcatcggtttcgatcttcaacaagaggtaaaacttgttatgacgacttgtgttctcgggattagtgcttccatctttatgatactctgatctcgtttatgtaattcgtcgagttatcatatatcttacataatctccggcaatactgctatctaatctacaatcggctaacatctgtctgtagaaggcagccgattaggttagatatcgatgttgacttagattgtataaggtatctaccactctatgaaacttctagcggcttgattgtctagatattgttcttcttttcatacttaatgctgcatcagttgagtttgatctattaagtcgtgcttagaatatcaatctctagcctgccttctggttgccgattagggtagcatcggagtttcagccgaccttatctgatttaactatatttgctctatatgcttcattgacatgttaaatctgcccattatgtcaagatattgctgtatctaagtatcttaggcctttgtttgatatattatacctgttttaatatcctgatatagagtagtatcagagtattagccgatacatgctagatctatctgatcggctatgctataaacatatatagccctgttattaatatatacttcgatctaagtgatttataatgtcttggcatggcggccgatctatcccaatcacttgatttaagtatatatcgatataagaactatatattggaaatatctacagccgatcgaatagatttggttctttattgtctatttacaactgccgatcaattcacatatgacatcggctcaaagataaatgatatgtcatcggcacctagccgatcggctatcatttatagatttaaccgcggtttctttgcctttatttcttgttaattacaggatcaaatcaactggcatgctagtacacccgaaggcgagctttggacctgcactggagttaagcagatctcccaggcctcgtgttttctctcaacactaccccaacgtgccggagtactcgaccgttcctccactcagtggcgagcttccccaccattttcgtctggaggttcatggctatgtgggcacctgcctcgctaatacggtggttgaggcatctggaggctccgcagatcacgcttgtcaggaggcagcatatctgatgatggctagacttcgtgatcgccacaactacatcttctacaacacggcgtaccgcttccaccctcgccgagcaagtggcgacgacgccagcaccttccgcccgacagccggcgagaacaacaccaccttcggccacatgtgcgccgtgatgaggggaatggacaggatgcactctgacctgcacaaggcatccaaggccttgaatgatgggaagcttgtgaggatcatagctctaaaggatgagatagcacgcctgaagaaggagaacgctcaattgaagggtcttccagcgccaggaggagttcggatccgcaccacgccccgcaagtctacgactgctcccgtgcgcattcagcttgcacccaagaacccacctcttcccgcagctcctcccgcagcacccgtagctccagctccagccccagctcctgtgccagtgtcagctcccgcgtccgctctctccttcgctccagcgtcagccgccaggggtccagccagtggcaacggaggttggttgcctactactcctagtggcagccgcgaccatagcagcagcagttccagtggctcagagctgggcagcggtgagacgtatctgccagactccaggagccgctcagaggggcctggcgacgagcaggaggacgccttcgactccaccgactgcaggagccgttccgagcattaggctcattttcccttagtttatcgactgtttagtaattgcctgttagtttgtgtgtttaggattgttcgcttgtgggtcagtcgacagtcgatatcatgtgcctatgatatggctgtcttaataaggatttgcttgctgttttaagtgttttaattcagatcaaaacaattgcagtttaaattctgtcacgtcctgatttttcgctttctgttcttctcgcctatttgcgaaatttcacatttggtttattcgtctaaaatagcttaatgaaaatttcgttaaatcaaacggttttaaagtgattaattaattaattatgttgttcgctttgtgattcttaattggagttagttggatttaatttgtatttcggaagtggagctcaatccctaattcaaattccatccaaatccaatattccttttcaaatcctaaatccttcccaaaaatttcaaatactttatatttggaattttccagagaagtccctgtctttttccctttttccttcctctctgtttctctattctgcccttattcttctttctttttctttttcccccaccttcttctacctccagctctctctctccttcttgagctgcaggcccggggaggccaagccccgagcccacgtgccgccgcggcccggcctcctcctcctctctatgtcgccggcccaagccgccgccgaccgagcccgcgccggccgcgccgcaagcccacacggccgacgccaaatcccgcaagccgcgccaccaaattcggagccgccgcttttccaaagcttgcaccgtgcgccctaaccctagctactccctcccctataaataccatcggccaccgcccctttttccccctttttccaaagccgccgccatctccaccgtgagcagccgccgccaccgttgcttcgtgccgccgtcgggagccgcgccgtcgtcgtcaccatctccttcccgtgccgccgccgctggtaaagccccgaggctgagccctctctccctttcgagccgccgtttctctctccacctcaactccggcgtccgcctctcatcgccgtgcgccatctccacgccgtcccggagctcggtgctacgccaccgcgttggcctccacctcctctgcctccaccactatttgctgcagccgccatgcgccatcgccgacgaaagccgccgatgccgccgcgctggagccgccggtcctgccatggccagagcacgcccaggccgtgtgatggagcagctgctgcttgccttctcccctgtgacaccgacgtgtgggacctgccatccaaaatcctcaaataaatctaagccgtccaaatccctagatcaaatcccagcagttggatctacataatcccttctttcgccacgtcagccctatatccatccatgtcagtgccacctcatcgccttgtgtcgccacgtgtcgttccacgtcatcgagtccacatacaccgagtccacccatacactatgccaatgacagtgggcccacatatattttttcctatccaaaattaattcaatttccgaaattaaatatccagagaatattcttggaatattcctttttcttttatcctcggattttccccgaattcaaacttcaggaggccataacttttccgtttgaactccgattcgatccattcttcctcctaaattcttctaaaatcgagctttacctcctgatttaattggttatttcatttgatgttatttagttattttttctttgtgtttatttgtttttcgtttgcaatcgtgtagacgttggagcggaagagcagtttgcttcagaagacgctgtgcaaggacagtactaggatcaaggcaagtgcactctttgaacatattgaacccatttgtgaaatgttttgttttgaatacatgcattgttttgtttataaaccatcgatgggtagcgtgacctaattgttattattatcctacctttgataattattgattgcccatgattccttgtcaccctagtctttgtgaattgaacattgggctgaactcatggtagatcgtggcacaaaagaagagagaattccgagccctccaccagggcaacaggacagtgtctgagtatctccatgagttcaatcatctagcgcgatatgcaccggaggatgtccgcactgacgtagagaagcaggagaagttcctagcaggcctggatgacgagctgaccaaccagttgatctctagagactacgccaactttgagaactaggttgacaaggcaatccgtcaggaggatcagcgcaacaaaatggacaggaacagaaaggcagcgtagttccggtccaaccaaggaaaccaccagcgatcgcgcttcactccaggacagcagggtggacctactgttggcaactttttgtgacaagttgacaagcacgatcgcagcacctaaagccttgcggtgatcctagagtcgccaaccacctcgatctagcaaagagctaaacctagatgggttttgataactaaaccggctagcggagccgatttctagataactacccatcttgtgggcaaaacggaaggttttcaggacaaacctacaaagaggtgtcgcactctcgcagcggcggtggacggtttacggcgcaaaccgacaaagatggacaaactaagagaaaattaaaagcaatatgaaaaacgattcgattgattgattgtagattgattttttacaatgaaccggccatgtcccttatataggtgttggtcttgccctatacaggccctcctccaagtccaactgcggggtagaaaccaaaggaaacccaaaacatgccttcccgagcaaggaaccttgagacccgacgaaacacagtcggactagaacctgccggtcagaccggccacacaccgccggtctgaccggctctcaaccggcggtctgaccggccaagacacggcggtcagaccggcccactcggaggaaaccggtagacttccaaattttggcaatctttcctattttaatcctaggtgccaaatttgggtgtaaacatatgcccccctgcctttttgatgaacaacgtgaatctaaaagcatagaacatgttttggtcttaggacgataaatcaattaccagccatagtacctcctaagcgtcttgccaaacgctcgggaagtatttcttcaagtatttcccgttgattgctcgctgaaaacgctccccttgaagtgtctccaaaaaatatgcgttccctcgaacaatgccgcatacttgataaggaccctcccaactaggagaccactaactgaactccttggatcgagtacccaatggcaaaattgtcttccaaaccaagtctccaacttgaaacaactttgctttcacccttttgttttacgccttggccactctcttcttctctttctctatttattccaatgctttcaagcggttgtcgatgacttcatcaagattgtctcccatcaacgtcttgtaatcttcatttgacaaatcatcttgcttgatataacgaagagaaccaagatttacctccaccggtaaaacggcttcttgaccataaaccaactcaaaaggagtgactttagtggcaccatgtttagaaatcctatgcgcccacaatgcttcggaaagcatctcatgccacctctttgggtgttcctcaatcttcttcttcactaacttcaacaatgtcttattactcgactcggcttgtccattagcctgagcgtagtaaggagaagaactcaacaatttaataccataagattcggtaaaactcttcacttccttagacatagaagaagcaccttggtccgtagttaatgtttgtggaataccgaatctatggataatatgcttcaaaataaagtcaattacctctgtatgagtcatattcttcaaaggcacgaagcccacttggtgaagtaatccgtagcaactagcagaaacctatgcccctttgatgacgaaggataaatttgaccaatgaaatccaaagcccatcctcggaatgaccatggtttgattatgggattcaacacggcggcgggcgccaattgaacattgccgaaccgttgacaagcctcgcgtcctctataatatttgaagcaattatcaatcatcttcggccaatagaacccagctctcctaagcaaccaattcatcttgtgggccgattgatgagttccacaaattccttcatgtacctctcccatagccactttagattgatcttcatctaagcacttcaacaagacaccatctatatttcggcgatacaaatctccatcaagcaatgtatatttgaatgcttgccgccgaattttgcgatcaaccttcaaatatcgaattttgcgtaggatctttcaaatatcgaatcaaaggaattctccaatattcttctgttccctgggcacaaatgtctgaattcacagttaattcagcctctaaattgattgaaacgtgccccccagcattctgcccagaaccggtcagaccgaccacgcagggccggtcagaccgctctgggtcgccggtcagaccggcagcatgcggccggtcagaccgcccctggttaccggtcagaccggcagtgcaatgccggtcagaccatccctggtctccagttttgccaatttcgcacaaagatttaaaatcaagcaccggctcttctaatatcagaaataatcccttcttcacattatagccagatgcttgttgtgccaagtcatttgctctagaattatcatgcctaacaatatatctaatagaaaaattatcaaaattggcaataatatctaaacatgaattgaggtacctatttagtgatccgtccaagcatttgtagactccggtgacttgttgcaccaccaattccgaatcaccaaaagcttccatgtatttagctccaaccatcaccataacttgtaagccaaacaataaagcattgtattcgacttgcttatttgtacaataatactccaaacgaacagatgcttcataacacatgccattaggtgaaaagaaaactacccctatgccttgaccttctttgcaagaagaaccatcaaaataaatcttccaaggataacttcaactaagcaaacctctccctcataagcaatatctgtatgatggtctactataaaaccacatacaatttggcctttcatagatttcaatggttcataagccaaatcatattctatcaaaacatatgcccacttgccaattctcccacttagaattggcctttgcaacatgtgtttaataacatcggcttgacaagtaactatgcatgtactatataacaaataatgcctcaatttggtacaagcatagtataagcatagacaaagtctctctataaaaacatacctcgttttggcatctaaaagacggcggctcaaatatgtaatgatatattccttgccatcttcctcttgtgtcaaaacggcaccaataactttgtcttcggaggcaatatataaccgaaaaggctttccagctttaggcgctcgtacaacgggtggagtagacaaatatctcttcaactcttcaaacgcctcttgttgttttgcccccaagtaacatcggcttcttttttcaagcgaagtataggaacaaaagcatcgattttacccgctaggttagaaataaaccttctcaaataattcactttacctagcaacttttgggcctccttcttgcatgtcggcgctttgaaatcacgaatcttctctatcttcttaggatcaatctcaactcctctctcatacaccatgaatcctaagaacttccccgccgacacaccaaaagcacatttaagtgggttcatcttcaaaccataccggcgcatcctctcaaaagctaacctcaaatcggccatgtgtccttccataccatccgatttgacaacaatatcatcaatatagatctctaggataatacctaataaatcatgaaagattaaattcattgtcctttgatatgttgcaccggcattcttcaacccaaaagtcatgacaacccactcaaataaaccaacaaatcctgggcacctaaaagccatcttgtacatatcctcttccgccataaagatttgattgtagccggcattaccatctagaaagctaatcaccttatgacccgaggcatcattaatcatcatgtcggctataggcataggatactcatctttgggagtagctttatttagatctctaaaatatatgcaaactccaatcttaccactccccttcttctccactaggactctgctagagacccactccacataacgacatggcctaataaaccctgccttcaacaaccgatcaatctcctctttgactcggtcatatagcaaaggattaaaacgacgaggtggttgcttataaggcctaaaacctggtttaattggaagccgatgctcaacgagctcacggctaagacctggcatctcatgatattcccatgcagagcaatcaacatactctttaagtagctcgattatcttaaccttataatcggctcatatttttgtttacaaaagtcagccttggtttggttccatcacctatgtccacttcctccaatggatcggccgatgtaaacccttgtccaagcttctctacttcatcaaaatcttcaatggtttcgccaatatcgttctttgtagaccgatattcttgcaccctcttttgtaaccactctaaattagcctctttactcattatacaaatttatatggcttagccgtgctacactagccggctttacagaaataggtacaaatttgccatcggagatactaataaaatcatagctagaaagttccctccctgataagcattggatattcccatgacgccactcaaaagtagcatcggccattgcaacctcggccgatgtatccgcttgaacaatttcaacatcatcgccgtcccattgaattaaacattgatgcaaggtagaaggcacacaacaattggcatgaatcaaacaacgacccaaaataacattgtagttaccttgcacatcgacgatgaagaaagcggttggtagcgtcttgtttcccacggtgaacttcgccgaaaagataccctttgcctctgttggttcaccattgaagccattgagaatcatgttggtcttcttcaactcatcatcctcacgccccaacttcttgaacaatgaatacggcatcaagttcacggcggcacctctatccactagcatcgtagagaccggcttcccaccaacatggcctttgagatagagaggcttcatgtgacggtttgactcatcgggcttctcaaaaaccgcgtctttaggacctaatgagaattgagcaacctcggcttcatccatagcacaaaactccataggcaacatacataccatgttgatatccatgtcttcttttggagatgattcacctttatcaaccgattgctcctccctctcctctacaacaactggcttttccttctctatggatttacgcctccataccagtggcggtcgcaactcattgaaccttttatctctttgttcttcagcttttttctctcttatctcttgagcccgaagacgttgcaaccttctcttttgagtagccgtcaaatccttaggcatccacctaggattcggctctgttctaggaggtaaataatgtcccctattaatcttgtttgaagacgatgaagccttcatatcgccctttgcaattcccctgtcaaaccggcgctggagcctgatcagaccggacgtagaccaccggtcagaccggccagacatgccggtcagaccgacacttgacgcacggtcagaccggcccgaggcatcggtcggaccactgtcgggtcggcggtcagactgacctgatgacccggtcagaccggccgcatggctgcggtcagaccggccagaaggcctggtcagaccggccgactgcgaggagttggttttggcttcggattttttgtttgaggatactccaactccatctccagaaggtattggcacatcatgagaccccactttgatggtaattacttctgaagtccttgcctccaccttgacgcgctttccttccctcttttcattattagcccgattcttaccataaaaccgcctattgtttggtgaagagaaacgctcatgaattggcctcctcggtcctccccatccttggttaaattgcattggaggcatatgattgaaaatttgcggcgttgccccccatggcatgaagtaaggataaggataacccggcggcgacattcgataagaaccccatgacatgtcttgtggatgatgatatggaggtgaatgcgaccgtcttggtgaatgaccaaatcgctccctaggaggtgatcttggtcttttccccttgttgtgaaccctctcaccaccttgcttctcatacttctccaaaagcataccaaaagtcactttggtcttcctaggggctttagaagttgaagcgccactcttattctccttccaaacactaacttccggtttctttgtcactatcatcttaggccttggctcgccaatgaccactccttttcctttagtagattctgcttgctccggccgaattaacacctttttatcattgaaattaattgtattcaccgaaaaaggatcatgatcaagcttcatcttggagccatcagtgaacttcaatcgtccttcatctatggccgattgaacctgtcgtcgaaacacattgcaatcattagtagaatgagaatgagaatcatgccatttacaatatgctcggcgtttaaactcttcttgagatggtatgacatggcctttaggtaatctaatttgtttttcttgtaaaagataatcaaaaatcttatcacacttggccacatcaaaactatatttaacctcactttgccgatctttgcgaggagtcggcattaggttggagcaaacaaaaggcttgtttttgttagtccatgaccattcagcaacatatatatcatgatcaccctcctcctcactatcactagcctcagggtaatcaatcacattaacattaggctttttgtcataagatctgacaagttttttattatccttaactcggctttcttgagccagagccctttgcatgagttgactaacatcaagaaattgttggccatctagtctttctctaagaggagcaattaaaccattaaaagcaagatcagccaaatctctattagttatattcaaggtataacatcggtttctaacatctctaaatctcttaatataatcaatgacagattcattatatttttgcttaaccgatgttaaatcacataacctaagctcagtttctccagtatagaaataatcatgaaatttttcttctaattgagcccaagtatgaatagaatttgctggtaaagaagtaaaccatgtaaaagcattaccggacaaagataaagaaaacaagcgcagattaaaagtatcactattagcctcaccacattgcaccaaaaaattgacctacatgctcccatgtggtcttactatcctcaccactaaacttggtaaattcgggaactctataattacggggaaacggcacattatcataataatcaggatacggctttttgtaaaccctagcacaatacccagtttcaatcccgaatctattcctaataatctcactaattatgtcctccatattattaagcccatgttgatttggcggtggatttggtggcctaataggttgtgtttgttccgcaatatgattatattggccttgtctagtatcgggaggataccccctagcaacatcattataagcattaggaacatgtgggggaacttggagattatttgcagcagtagatataggaggatcaaatgttctaagatgatacaaataactagcattagtcatcggatcgatcccctgtatcggtataattgtgccgttctgatcggccgtttggccggtcagaccgacggctaagtcgtggtttgaccggccgtcaggcccggtcagaccggccgtgtgcgccgctccatcggttttactacccgtttgatctataggaggttggttagcagtggtagaggctttatcctttgacatgtaatcggccataagagggccgaatttaacccttaaaaactcatcaaatttaccctcaaaagttgcatctaacttatctttaaaagcaatcatagatgaatctattgtagatgctacttgttgttggatagattgtgttacctcatcattacttaccaagtcgggggcgagcttaggacgtggcccgggcttaataatcacgccttgacgagtcctagtgcttgccctcatcaacgcctcccgtgtgagctcgttgatgtactcctccatagctttgcggtcctctccttcggaatcctccaatgtgaccggtatcacattagatggctccacctccgtcttggatggcggcttcgtcatggtgaagtcgaagttgagttgacgatgaacggatctccttcccagtggagtcgccaaaaatcgtgttggcaactttttgtgacaagttgacaagcacgatcgcagcacctaaagccttgcggtgatcctagagtcgctaaccacctcgatctagcaaagagctaaacctagatgggttttggtaactaaaccggctagcggagccgatttctagataactacccgtctcgtgggcaaaacggaaggttttcaggacaaacctacaaagaggtgtcgcacactcgcagcggcggcagacggtttacggcgcaaaccgacaaagatggacaaactaagagaaaattaaaagcaatatgaaaaacgattcaactgattgattgtagatcgattttttacaatgaaccggccatgtcccttatataggggttggtcttgctgatgaaccctgagttcctctcgacactcaaggctgttgttggcccgatcttttggtgagttgtgataactacgatttgggagaaacgttgacaatccgactacaaccgtacgagacgttgtgttgcgccttagcgatcgatacacctctctgtgggttgttgatcttgccggtgcagatcaaccctatacctgcaagcaaatagaagaaacaagcaagaacaagataaaagcaatctgatattgcaaataggaatttaatacaaatgataagttggggttccgaagaacaagcagacggacggtctagccgacacgcgcgctgcaagcaagtagcaatggcttgcatcaaaaccctgaaggggtaactagctatatataggggtgggaggacgacctaggggtgcctagggtcgtactccaccagcttggggcgcaccccacatgggccccacctggaccggggtcccaaatgaagaagttacaagcccacaggttcatgacaggtgacgcagcaccttgtttcttcatctgtggatgacttcgatggaatttggcgatgatgccaaatccgttggaaagaggactccgagagctttccatcaagtactcatgggccgaaaaggaggtcgtatgcagattcggcggccatttgaagtcagcagtgtagcaggtggccgaatctgattccagcacttggaggacttgatctggatattatcttgttcatccatgatgtgagcaatggttgtatccatagtagccatggtcacatcacttgccctctacaggccctcctccacatccaactcgggttagaaaccaaagganacccaaaacatgccttcccgagcaagcaaacctcgagacctgacgaaacacagtcgaactcagacctgccggtcagaccggccacacaccgccggtctgaccggctctcaaccggcggtctgaccggccaagacatggctgtcagaccggcccactcggaggaaaccggtagacttccaattttcggcaatctttcctattttaatcctaggtgccaaatttgggtgtaaacacctaccaccatgatcgtccgccaacatcgccctttcaactcgagcagcttccaccagggcgctagtggcagccagaaccaccagggaggtcagcccaaccgcagtgcagctccacgcccaccattggcaccagcacagtcagctccatcagcccaagccaagaaggagactggagcaaagccaggatcctgcttcaactgtggcgagcatggccactttgctgacaaatgcccgaagccaaggcgtgccgggccaaggtttgcccaggctcgtgtcaaccacgcgtccgcagaagaggcgcaagtagcaccagaggtcgtactgggtacgtttcctgttaactcaatccctacaacagtacttttcgattctggtgcaacgcattcgttcattggaaagaagtttgttgggatacatgggttaataagggaagaacttagtacaccaatgcgggttcataccctagggaatagctccacttcggttcaattcagcccttctataacaatagaaatccaaagatcaccatttctagccaacctcattcttctcgaatccaaagacctagatatcaatcttgggatggattggctaaccaagttcaagggtgtcattgattgtgtgaatcgcacagtcaccttgaccaatgagaagggagaaacagtagtgtacaaatctccagtctcaccaaagcagggggtctccttgaatcagattgaggtggaaattccagtggtcaccgaggagaagagttcgaggaagttggaagatatccccatagtctgcaagtatccagaagtgttccccgaggacctcactaccatgccacccaagagagagattgaattccggattgatttggcaccgggaactgctccaatttacataagaccgtacagaatggcagccaacgagctagcagaggtcaagaagcaggttgatgagcagctgcagaaagggtacattcgaccgagtacttcactttggggtgctccagtcatttttgtggagaagaaggacaagacgaagagaatgtgtgtcgattatcgcacactcaatgaggtcactttcaagaacaaatacccgttgccgcggattgatgatctgttcaatcagctgaaaggagccaaggtgttttccataatagacctgcgatcaggctacaaccagttgaggatttgggaagaggatattcccaagtcagcctttaccacttggtatgggttgtatgagtgcacggttatatcttttggacttaccaatgcacctgcattcttcatgaacctgatgaacaaagtgttcatggaatttctcgataagtttgttgtggtattcattgacgacatacttatctattcaaagtctgaagaagaacatgagcaacatctccttctagtactcgagaagttgaaggagcaccagttatatgccaagttcagtaagtgtgacttctggttgtcggaagtcaaatttctgggtcacgtcattacagctcagggcgtggcagtcgatccaccgaatgtggagtcagttaccaaatggaccccacctaagaccgtgtcatagattcggagttttcttcgacttgcaggttattaccgtcggttcattgaaaatttctccaggatcgctagacccatgactcagttgcttaagaaagatgagaaatttaaatggacggccgagtgtgacaagagttttgaggagctcaagaagagattagtgtctgctccagttctgattctgcccgaccaaacaaaggacttccaagtctattgcgacgcgtcccgccacgggcttggatgtgttctaatgcaaaacggcaaagtggtcgcttatgcctcgcggcagttgcgtccacatgaagggaactatccaacacatgacctggaattggcagcggtggttcatgctttgaaaatctggaggcaatatctgattggcaaccactgcgaagtatatatagatcacaagagtctgaaatatatcttcacccaacctgatctaaatctccgacagcgaagatggttggagttaatcaaagattatgacatgagcattcactaccatccaggcaaagccaatgtggtggcagatgcattaagcaggaagagctactacaatgctttatgcaccgaaggcatgtgtaaggaattgcagcaagagcttgaacgtctcaacatgggaatcgtagaacacgggttcgtagctgctctagaggcacgtcctacgctcgtggatcaagtcagagcagctcaagtaaatgatcctgagatagctgaactgaaaaagaatatgtgggttggaaaagcccgggatttccttgaagatgaacatggcacaatctgcatgggagaaagattgtgtgtgcctgatgacaaagagctaaaagatctgatactcactgaggctcatcaaactcaatactccattcatcggggtagtaccaagatgtaccaagatctcaaagaaaatttttggtgggccagcatgaggagggaaatagctgaattcgtcgcgctctgcgatgtttgtcagcgagttaaagcagaacatcagaggcccgcaggattgttacaacctcttcagatcccggaatggaaatgggaagaaattgggatagatttcataacaggtctgccaggacatcatcgggccacgattcaatctgggtggtcgtggatcgacttaccaaagttgctcatttcattcctgtgcatactacatatacaggcaaaaggttggcagagctctatctctcgagaatcatgtgtctgcatggagtacccaaaaagatagtatctgatcgagggagccaattcacttcaaagttctggcagaaattgcaagaggaattgggaacccggctgaacttcagcacagcctaccatccgcagaccgatggtcagaccgagcgggtcaatcaaatattggaggatatgttaagggcttgtgcgcttgattttagtggagcatgggacaa

SEQ ID NO: 15148 - DNA, 7437 bp, Oryza sativa
ttagcattcaaagaaagagctgataacacatttcaagacaatacttaacaggtcgaacctaaccgatgccgtgttaagcgtgaaaagaaacataagatctaagcaaatagatgaaaactcattcaagatggtagatacaccgcataatctaggctgacatcgacatctaaacctatcggccgttttcgatgatagaggctggccgatggggttagatgacgagatcaatctagattatgcggtatatatgataattcagcgattcacgtagacaggattagagtgtcatagcgatgtaagcactaatcccaacaacgcaaactgtcataacaagctttaccttttcgtcgaagatcgaacctgatgtagcccaacttgaaagcaaaaactcgtcgaaacaataaaaatagaaaagggtggtgatgcaccaaagtattattgaactgtcgtcccttgattacatggtgtcaggtcatattaatacccgaagtacataatgtgtccttgccggacacgcctcttgtctctaatataatttaaaatacgaatgagtcccctaggtgggctcttaccaaacatatctctaaggaaactgaaaaaatatcctaattaatagatacaattgcccctttttaggactccaatccttgtgtggcaatggctatgaagtgctttggctaaccctgatgaccaacgtgggaccatcattttcgagactggttgcatcggcttgattccgcggatttggcgctagccaatatgcgcagccaatattgcctgtagccgatcatgtggcagctgatgctgttcttagccaatgcgtattctaccttctcaaatggaatctcgccaaatcggctttgactctagctttgaatccggctcatggcattaccaaatttggtcgttaacacatgccccccaactattggaatagccatgcccgcagttattgggcggtcaaccagctcattgtgattagtcccacaataataatttgacttatagaactggagttgtttaggtggttttggttgggcgtgttgcaccgtggatttagcgttagatagtgatgatttaatactgcttaattatatattgtttttactatttcaaaatatgatttataaatgctgcttttaccgcaaatatccaatgctatttttatggtggttggtactcagtcttgctttatttcctccccacccccttcgaagcagagattggttcgggtggtgagttctttgaggaccgagcttgttctgggcgtcgaggattgcctgtgttttatggagtgttggtaattcttacgatcacagataaaatccgcaagcacacggatataccgatgtagcacttcccctacggagtattccaaagggtatcaaatcaagggaacatgtgtggtcagttcttcttccggttcatccaaggacaccaagcaaaggataggctaggatagagaggattcactggtaagaaacagtgtctagggaaagcttaagtttaatcctaaagcaatacttcaggcactggtaactcactgttcccagatgtcgctctattacgtacccgaacagggaggacttaagtgatctcgagggctgtcaccacctctacacctacctcaaacgtacaatgggatacgcagcaattactggataacaattacctaaacaccacgtctaagcaattaatatctacttcagtgtttataactcaccaaagcaatcactatatttcagttgattatagtgaacaataatcccgtatgctatttaggttaattcttataagataaatctaagttactcaagaagaatattatattgaaatcagagtaatgaacagaatacaagaaatgagagaagattagtgacaactccagaattcttccgacttcttctactctactctcttcctattctagtatacaatatagtacaatagagcctcttataattcagctcaagcttggaagtgtgtgtgagagtgaaggagtgaagctccttatatagaggtaggtatgatggttacacaatgcgaattgtcggaaatgccccgcaaccatcatcaggagatgatcaggactgtccacgccaaaccccagcctgaatggctgagattttggttcggccgaaccaaggggttcgggcaaacctgtgctgggcccacctggcctggccttcggcccatctcctccccttgtcctcctttatccatttctcggagttttgggctaagtctttgatattttgatgaagttcacaacccatccttgtatagataaattttcccctcactttagtctagatttccctccaacttcggggtttgacacctgcatacaaatatacaccaacacttgtggaatatgtgacattaagcacctatcactatgttggatgttttattgtctgaactttatgcagatgttggtggtatagaatcggtgtttaacagccgccaacatggaggaagcttcacgttggtcgtgaagattaagtctagtttatttgtttttccgctgcgtatgttagttttattttgttatttttgtaagacgtggatctgtctatcaaattgttgtttgtgtactctggctggtcctggacggagatttaatacacattctacttaaaattcgggttaacgaatttctgggcgtgacaagttggtattagagccggccttgatcgtaggataagccaagtggaaacactaagagccctatgattttctcatctgctctttccttttgtgaggtcgagtggtccagtgagtctagtaaggatagagtgagtcagtgagtagtcggagtttgcataaaagtgtaggtgaagtgtggtcagtcgtctgcatggttcatgaaatagagatcagtaagtgtcttttctttaaaaaatattacaaatataatgttttaatgttattcaccggaatgaaaaagaccaaaaagcaacaaaacataatttttagatatattggagtgtattgggtgcgtctgtgtcgaaaaatcagtttgtgacacgcgcggcgaacttttgacaattagtgccaatattggcttatattaccacacgtgggtgcaatttttctcaccggaatgaaaaagttcaaaaaccaccaaaacatgatttttggacacattggagtatattggatacgtctgtgtcgaaaaatcactctgtgactcatgcggtgaacttttgtcaattaatgccaggcctatattggcacacgtgggtgcgatgtttttcaccagaatgaaaaagattaaaaagcatcaaaacatgatttttcgacatactgtagagtattgggtgcgtccatctcgaaaagtcactgcgtgactcgcgtggcgaacatttatcaattaatgccaatattggcatgtattgccacacatgggtgcgttgtttttcataggaatgaaaaagttcaaaaagcaccaaaacataatttttgaacatattggagtgtattggatgagtccgtgtcgaaaaatcactccgtgactcacgcggcaaagttttgtcaattaattccaatattagtctatattggcacacgtgggtgcgatgtttttcactagaatgaaaaagttcaaaaagcaccaaaaaatgatttttggacataatggagtgtattgggtgcgtccgtgtcgaaaaatcactctgatactcgtgcagcgaacttttgtcaattaatgccaatattggcctatattagcacacgtgggtgcgatttatttcaccggaatgaaaagttcggaaagcaccaaaacatggtttttggacatactgtagattattgggtgcgtccatgtcgaaaaattactacgtaactcgcgcggtgacaatattggcctatattggtacacgtgtgtgcgagaaaaacttcaaaaatcaccaaaacatgatttttggacatattggagtatgttgggtgagtctgtgtcgaaaaatcactccgtgattcgcgcggcttatttttctcaattaatgcaaatattggcacacgtgggtgcgatgtttttcaccgaaatgaaaaagttcaaaaatcaccaaaacttgatttttggacatattggagtatgttgggtgaatccgtgtcgaaaactcacaccgtgactcgcgcggtgaacttttgtcaattaatgccaatattggcctatattggcacacgtgggtgcgatgtttttcacttgaatgaaaaagttcaaaatgcaccaaaacataatttttgaacatattggagtgtattgggtgcgtccgtgtcgaaaaatcactccgtgcctcgcgcggtgaacttttgtcatttaatgccaatattggcctatattggcacaagtgggtgcgatatttttcaccggaatgaaaaagttgaaaaagcacccaaaaaaatgatttttggacaaactggagtgtattcggtgcatccgtgtcgaaaaatcactccgtgactcgcgcatcgaacttttgtcaattaatgccaatattggcctatattagcacacgtgggtgcgatgtatttcaccggaatgaaaaagtttagaaagcaccgaaacatgtttttggacatactgtagagaattggatgagtccgtgtcgaaaaaacactccgtaactcgcgcagccagcttttgtcatttaatgccaaagttggcatatattgccacacgtgggtgtgatgtttttcactagaatgaaagagtccaaaaagcaccgaaacatgatttttggacatatagaagtgtattgggtgcgtccgtgtcgaaaaatcactccgtgactcgcgcagccagcttttgtcaattaatgccaaagttggcttatattggcccacgtgggtgcgatgtttttcaccggaatgaaaaatttcaaaaagcaccaaaacatgatttttggacatactggagtgtattgggtgcgtccgtgtcaaaaaataactccgtgacttgcgtagcaaacttttgtcaattaattccaatattggcctatgttggcgcacgtaggtgcgatgtttttcaccggaatgaaaaacctcaaaaatcaccaaaacatgatttttggacatattggagtctgttgggtgagtctgtgtcgaaaaatcactccgtgactggcgcagcgaacttttatcaattaatgccaatattggcccatattggcacacgtgggtgcgatgtttttcaccggaatgaaaagcttcagaaagcaccgaaacatggttttggacatactgtagagtattggatccgtccgtgtcaaaaaatcactccgtgactttcgcggtgaatttttgtcaattaatgcaaatattggcctatattggcatacgtgggtgcgatgtttttcacgagaataaaaaacatcaaaaagcaccaaaacatgattttaggacctattggagtgtgttgggtgcatctgtgtcgaaaaatcaccccgtgtctcgcgcggcgagcttttgtccattgatgccaaagttggccaatattggcccacgtgggtgcaatgtttttcaccagaatgaaagagttcaaaagcaccaaaacatgattttttgatatattggagtgtattgggtgcgtccatatggaaaattcactccgtgactcgcgcggcgagcttttgtcaatcaatgccaaagttggcctatattggagtggatatgtttttcaccggaatgaaaaagttcaaaaagcaccaaaacatgatttttggatatattggagtggatatggtgcgtctgtgttgaaaaatcactccgtaactcgcgcgatgaacttttgtaaattaatgcgaatattggcctatattgtcacacgtgggtgcgatgtttttcaccggaaccaaaaagctcagaatgcaccaaaacatggtttttgaacatactgtagagtattgggagcgtccgtattcaaaaatcactccgtgactcgcacggggaacctttgtcaattaatgctaatattggcccatattggcacacgtgggtgcgatgtttttcaccggaatgaaaaacttcaaaaagcaccaaaacatgatttttggacatattatagtatcttgggagagaccatgtcgaaaaattacttcgtgacttgcgtggggaattttgtcaattaatgccaatattgtcctgtattggcacacgtgggtgcgatgtctttcaccggaatgaaaaagttaagaaagcaccaaaacatgttttttggacattctgtagagtattgggtgagtccgtgtcaaaaaatcactccgtgaatcacgcagcgaacttttgtcaattaatgccaatattggcccatattggcacacgtgggtgcgatgtttttcaccggaatgaaaaacttcagaaggcaccaaaacatggtttttggacatactatagagtattgtatgcatccgtgttgaaaaatcactctgtgactttcgcggtgaatttttgtcaattaatgccaatattggcctatattggcacacgtgggtgcgatgtttttcaccggaataaaaaacatcaaaaagcaccaaaacatgattctaggacttattggagtgtattgggtgcatccatgtcgaaaattcaccccgtgtctcacgcggcgagcttttatccattgatgccaatgttggccaatattggcccacgtgggtgcgatgttttttacccgaatgaaagagttcacaagcatgaaaaaatgatttttggatatattggagtgtattgggtgcgtccgtgtggaaaaaatcactccgtgactcgcgcggggagcttttcttaattaatgccaaagttggcctatattggcacacgtgggtgcgatgttttttaccgaaataaaaaacttcaaaaagcatcaaaacatgatttttgcatattggagtgtattgggtgcgttcgtggcaaaaaataacttcgtgattccgcggcgaagttttgtcaattaatgccaatattggcctatattggcacacgtaggtgcgatgtttttcaccggaatgaaaaacttcagaaagcaccaaaacatgatttttggacttattgaagtatgttgggtgagttcgtgtcaaaaaatcactccgtgactcgcgtgacgaacttttgtcaattaataccaatattggcctatattggcacacgtgggtgcgatgtttttcaccgcaatggaaaagttcagaaagcacacaaacatgtttttggacatactgtagagagttgggtgcgttcgtgtcgaaaaatcattccgtgactcgcgcgacgaacttttgcaaattaatgccaatatagatatatattggcacacgtgggtgtaatgtttttcaccagaatgaaaacttcaaaaagcaccaaaacttgattttttgacatattggagtctgtttggtgagtctgtgtcgaaaaatcactctgtgactcgcgcgcgaagttttg

SEQ ID NO: 15149 - DNA, 2820 bp, Oryza sativa
accttgatgtatacaggtaatatataaactattaacatagtactctcttattatatcttcccttgggataaaataaatacgataccttggaatattcccgggtgaaatgctacaatggtatatccatgcgcttgcggatcacatatgtaaccataatataccaaggttatttctagtgctattgctgggaattatatttccagtagtgtcgctaataaataccatcagttatgtacttgtccacgtccaaagtttggttcacctttaataatttgaggatttttgtttataaagcccatagtagatggtttttgatttgaagtctgggcactagtactttgacgattggggcattgtcgagcaaaatgtccagtcttcccacaaacaaagcatggtgaatcttctattctcatgcctggtctttgaattggtggcataccaggtctagtattaggtaaagatggctgaaaagagtaagtcttccgaatctgaaatggatttttagtaggtacttgtcattgcagatttatccttcttttccgaaatccttcaatcatcttttgatcattttctagtctaactactttgttgactagactttgaaagttttcatgatcctggccgatcatcggtcctcgtagttcatcacgcagtccttcaataagtctttcaatgttttccttctcatcttgaatatctgaagcagcatatcgggcaagttgtgtaaatttatttaagtattcttggactgtcatgaatcctttcctcaatctccgaaattcattctttttcattctaattattgcattaggtatgaaagtatttttaaaagctgtacggaattctttccaggtaataatatgggcagggtcgtctattgatgcttgataagcttcccaccattcattggctagtccttctaatcgatgggtttcaaaggttaccttctcttgttcatcagttctgaccaaggctaatttcttttctattgcccgtagccaatcttcggcatccataggttcttctgtttttgaaaaagttggtggtctgaccctcataaattcagcatggttaccttgtcctttattcccttgattttgagcaatggcttctaataattgagtttgttttgccattacttctactaaagtagtaggatctggctggggaatttctcctccttcaggattgccatcattcggattcatttggaatttctgctgtcttttcaaaggggagtcaacatccttaattatacatagaaaatattatacatgatgcatacaaaagtagcaaaagagaaaacaaaagaaaaagccaaaagaaaacaagaaagaggtaatttcacacaagtggttagtgaggagtactaactaacttatactaatgcgtttatttatctataagacccctagttatacacattctatctataacttctagtcatcaagccaccctcccgtgccttctgcaggattaggaaataaagacgtaggtgcaaactgtgaaaaaccagcattatatgttgtagctatatccattgtattggtggtagggcatgagtagggaatcccatcgtcatggtcttcacaagtcttaggatgaacagtgatatgttcctgtgtttcaaaaatccgttcttcaggatcttcttcttcttgagtctcaacccaaacaggaggaacattcaaatcattaatatgaaacattcgggtccctcttgttgtttctggttcttggctagcttcacttatgtccatagctgagggtgttgcttcggcttcagcttcatcatcagagtggataggatacaacggtgatggtgatggtggaaggccttgtaaaactccttcacccatatcttgaggattgggcccctgtggctcatccccatgtactggtgataaatgtccaccatcatcctcatcatcgtcatcgctatctagtccgggtacttgatgaagacaaaatgatgctccagcgacacaaatatggagtatggagttttgtttctccttctcatcatatagattttgtagcactcggtatttgtatcttatatcggcttccttgcgttcagcttcctctagacgttggcgctgcatgtccatatgctcaagggcttgctcatacatatcgtctgcagcttccatccacagagacatgcatgctttcattggttgctcattgtagtctatattctggatagtgcaataatcctcgccaggttcccgcataggatgataacaatagcgagaatgttggagtttgtcttgatagatatgattcaggcgtagaaaagcctccctagatgcatcatataaggctgctcgtattgtatcccgcctatgacgagtcctgaaatagtacatgtctgtttctccccttggtggattgatctttatagtcatgtcatactcccagcgatctcccttttggtaaggatgtgaatagaattccggtacttcagctatttttagctttaacattaacttgatcaactggtcagcacaatcattgttatgtatagggatcgttgtctcaaaacgctcatgcctttctgccattgacctgaaatacacaaatgaaatatatagtgtgtgttcgcaagttaaatctaccccccttaaaacaataagcttgaaataaattcaaacttaactgggttagtaatccttaaggttcatcctatagtcaaacatatgctctgataccagttctgtcgggtcccaaaactaatgacttggatccgaccatgattaatgtatcaagccctggattagtaaataattcatacatataatacagctggttcttcat

SEQ ID NO: 15150 - DNA, 581 bp, Oryza sativa
ataaaaacccgcgtttacgacagactcatgtcacatgacaaaaaatgggttgaaaaactccaatcagtactattggcggtacgcaccacaccgacaacatccagcaaggaaaacaccctttttcctcgtgtacgggtctaaaaccatgctctctggcgagttacgacatcaaagtacacgagtacagaagcattccgacgaggaacagcgagacattgatgtaaaccttctcgaggagcatcgtgagcgagttgctgttcgagcagctagctatcaacaagccctccgctgttatcacgagaagcgtatccgagcacgcatactttcgatcggcgactatgtcctctgacgagttcaaacccaagcagggcaaaacaaactctcaccaaaatgggaaggaccctacacgatcacacaagtcttgcggccaggcgcattcaaaatcgcagacggcgacggtcgcgaattagcaaattcgtggaacattgaccaactacgtaaattctatgtatgagtcaataacaccgtacctgtaagcacccttacagtatcaataaagcctatttctaggtttcatacca

SEQ ID NO: 15151 - DNA, 551 bp, Oryza sativa
tacatgatcttgctcaacttgttgcagaaggggaattccaggcaactaatggtaaattccctatctcagttgaggcttgtcacttgtatatctctcattctgatcatgctcgtgattcaacagtatctttaagcattacatgatcacacatatttacatacatgtatacaaagatgtacacatacaaaaacatttcgagccatgccccaccccgagggaaaaagaattgctgagcacacaaaactggctatctacatgaacatgattgatgagcaaaactagcctagggttagagcattattggaagctatacagatgccacggccacaacacgtgctagcgttggtaaactgccggatcagccgtccacaactccagtacaaagagaacacaagaacgtcttgtggaaacaactgaagcttcgtccgcatacaagcagttctccctcactcacttgttaccctggagtacgaaaagttgcttcagcaagatgggataaaatcagattacaagcacctagaaaacgagagtaactgaagtattacatgaac

SEQ ID NO: 15152 - DNA, 11947 bp, Oryza sativa
gagtcattctaatagtcaactcacaatcaaagctaggttgacttggttacatccaaattagttacgggaggggagggatgaattatgaatagattagttgtgtagaacacctgggccgtgatttgcagatgggtcgcccatcagccatcccctaggtaagggactcaaaatgaacttattcctccccagaacatcaaacaaatctttcttccctccctgtgcgtgcagaatctttggcccatgacgtgatgccactcccgtcaccgaattccacggtcaagtcgctgccgtttttgtcaccactccacccgcaaaatctctacgcatcctcccgatgatcgatcgctatccccaacagtctcacacacaccaatgctccagtgcagcagctgccacagtagcagtagcatggccttgctctgctactatacaaccatacaagccatgctctgcaatgttcatctatccatccatgcgatagataacatctagtatctatctgctcgatggatggacacgtggtgatcactgcgtagggtttatttggggagcttaagattctaagaagcagctggttggtaaccagtttctgagaatatgaaaaaagctaggttttccttgcatctggcttctagttcattttctggattctacaactacaacttcttagaatctagaccaaaagctaaactatttgggaaagcttccgattctgggagaagctgcagcagctagaagctcccccaaacatacccgtacagtgccatgtggtggcacattggatgcaacgtgccatggcgaagcggagcaggtgtgagactgaaactattgtccgagagcgttcttgctcgccggtcgggcctcgattgggcaatcggacagcgcgtgcttcatcttcaattgtggcctctcacttgcttcctgcacatggcatggcctagctgcagtagcagcatgcagcatgcaggaggcagccaggtcgtcctcatcaaactgttcatctcctcctgcttccgtgctccgatgccgctaaaatctgccggtttctgcattgcttttgcacaggtttttcttcagtgttgttcatcgatccagctctgtgcccggcaggcaaaatcttgccacaatctctgcacttttgctgtgtttctatacttttgcaaaatttttgtcttggggatttggagaggtgtgcaaaatttttgtcttggggatttggagaggtggcagtgtagcaatgtgatgacaatgcattcatgtcgtggagaggagtctgttgacctgctgaattttcataacaaaactgagctgttgtcttattgaaaaaccggcatgtgttatatactactcgtatttataaacttgtactcggaagaaattattagcactgttgcatataaaaactccagcctccaattcagtttcccggtgtgatatcctttcacatctgttcaaaccagcaaaaattcagaatgaccaatccatcattacgaagcatttagcatgagcaccgcctgcaagaagaaaaaaaaaccaaaaaagaaaatcaaatttgcagattaggctgcacatgccagtgcaggctaatccattcacgacgatgatctacgccgcctttgcttactaatttttcctcctggacatgtgattgacacagatataagttgattcctgacacaaatgattccaacttccatttccaagtagtagtagtaggaatcaaacaatgtgataatgcaagagttagttgcttttaagcacaagttaagctggtgctctaaaatcttcccaggtatcatcatcgtcatcaacaacaacatcgtccccgtgagctcagccacagtgtggcgcagttgtcagctgtactggccaagatttctgcacatgggagctgctacctcctgtcaattgatgatccatgctttggccggcccacggatttcgtttttttttgtgtggcaatttaacatcctcatatgctagatttttcttaggccaatatggtctctctctctctctctctctctctctctctctctctctctctctctctctctctctctctctttgagcaatgaaaaagatttgatggggatatttgatgaaagcttaactgattactattaaatttataatgatcattgtgcgtcttctttctgctggaaggtattgaaacatttatagctttctctctctcttttgttgatgagtacgcaccaatttctgagatagtaacagtgaagaacaagcaacaaaatgtgagtgtgagcttaaccaagtgtgaaaaattttcatgtcaatctctctcacaatggtggttggtgaaaggctgaaaggggggcaaatgcgatgatagtccacagtagcactatcatccctgtcagttttcactcatttgtcaacttgttttcgctgaattttggcagctggaacattcacattaagacgttgatacctcgatcaatcagagcataatcatgccgtacagaagacattcacagatcaaatacgggcaagtaatctgatcagcttatcatctcgtacggcaatgcattcggacaaaaacgcgtaactcacggaacggatcaaacaaggtcagaaattccggctgcaattctcctctttactccactctgcaccacgatccaagaaacttagtacaagttggtaccaatcagtcaatcaaactgtgtggtttgatctgaagaagacaagctgacgacgacgatcagcttaccactgtgccacgctgccagtgctctgaattcagaaaacacagcaatctaacacagcaagaatgctgtgtactctgagaatggctgatcttggaaatgtggcacatgaaaatcaaccgaatcagcaaaagaatccaggggagaaatgcaaatgcaaggacattgctgattaattccctcggatcttggatgaagcatggcaaagttcattcagttcaacagattttgcattagcaagttcaaccatttttcacatgagattagccttgcggcttacatgtatcatcgacaactcatcatatccctagcaaaaaaaacaagagtaaatactgcattaccactagctagctacagaagctagagcttagatctagatggaaagaagctcaaatggagaagaacacaaaaaaaaagaagagggaaaaaataatatcccctaattcccaccaaacagcaggtgctaaaaaaatttgagctgcaggagaaaatgcggcgaaatccccgtcctacccccaccaacccattcggaggtggagttaaccctccctatgtacacacacccacacaggggtaggtcagtaaaatgccagcagctaaagcaattgggcgctgcggctgctgctgcggatttaccgtttcaccctggggcaaatgacaactatgccctcgatgggtaaagcgtaaataccgcgagcgagaagggcaaaacggggagacggacggggaaggggaagaaggggggggtctctagtagtagaccaggccgccgccgtcttcgtcgtcgtcgtcgccgtcgccggcggcggcggcggagaggcggaggaggagctggtggaagtcggcgacggggcaggggatgcggagcgcgcccgggtggccgtagccgtactcctgggcggcccgccggagcagcgccgcgaacgccggctggccgaggaggtccgtccgcacggcgtagcgctccacgggcccgccctcctcgccgacgcacaccggcacgtgcccctccgggacgcgcgcgccgcaccccagccgcctcgcgccggcgagggaggaggaggaggacgcggacagcttcgccgtccggtcagcccggagcggctggtacgcggcggcggcgcaggcgtcggccgcggcgacgcgggagaggcgcctgaggagacgcttcatgatggctgcttcacgtcgaggcttggcaatggcggcgccggcggcggaagcggaggcggcggaggtggtgggttcttggagaggcggaggagggtacagttgagaggacgcaaggtgtttgtactggggtggtggtggccatggctccttcttatataacggaagatatgggagttatgagttgccaaagtctttttgtgattttttttttggctattcctttcctcctctcctctctctctctctctctctccgggcctttacaaattcttttgtccagaatgggttgtaggattattaattttgtgcacctgctttggggacaacttcagattacccaatgatgacatattctgttcaccgttcgtgggaaatatgtataaccgctagttacgcacacgtgaagattattgtatataattaaatcgctaacgactaataaatatattttattggattagtatctcttgaaatcaaccgttgactttattcttcaccattgctctaatatccctacatcaagcaattaagcaattaaatatacctaatggttttttcagcaagaattttgtttcaataaaaacctaatcaattattttttttaggtggtagaggatttattggtttggctttgtaaaaatgcacataaaccttgcccataacattgatagcatattcaagctatcaagacacatccaatcttcaggtcaaattgacatatccaatcttcttccatttattttcttaagtaatgaatataaatctgacatttatattcacaagtggatatacacagccaaaagataaaaaaaataaaaaattggattggactaactcgatagttatgtcatcatgtatctactaatgcgtcgtaatctagttgacatttaaggtttttaacatatggagtatatgagttgtctcgagtatgtcagatttgatagaattcaaaattgaagggaccgaaaaccagcactagtagatgctcatcctatccgttgaaatttgtaaagcctagcatgtatatgtgtttcccacaaataaaagaaaaatgccgattgatacaaacctgggggacgatgggcgtgtgaggttagcaaaacatgcagggaaagaacgtggctagggggaggaggtacaagtgcgcgtaccgtacgagtacccggaaggtacaagcggcaataagccggtgaggtgtgggcccggtcgggccggtgccttaactagcacccggtttttctccggctggaccctgaccgaccggccagtcaggctccgggtcgggtcgggtcgggaccgcttcgcgtcatccgtgagtgagaacgtgccaggcggccgcatccttccgtaacaccggtcgtacggtgtgcgacgacgaggaggtgggagaattggtgggggtcactgctgcagtggggcccaccctactgacctggcacatggaagagagagagtgagtgagtgagtgagcacttgacttcgtcgacttctccttttggtcggaaatgcccacgaccagtgatgagtcaccttgtgaaaactttgttggacagtaataaaataacaaaagataccctaaccgtaatttggataatctttcgtttgttgttcttattttatttatctcattacatgtatgtatatattatcccatcgtttggcctaaagctaatagataaaaataagtaattctttatccctataatatttttagcgatttaaaatccaacgctgaaaagaaatcacgataaaaagaaaccctcaaaacaacacctaagttaaattttaacacaatgaaacgttccgttttttaattaacccacatgcataaaagccgtcgatgatgatcgacttgtttcacctgtgtttcggatgcagttgagcacacactaccagttataccaccaggctgaactagctagtgccttttttgtatggacttttgtgtggagaaatcatgaatggaggccaccgtcgtctgtacgtagtgcacgcgtgaaaactaaacacagcctagcgccagtgttaacccatcatcacacgcttacacgcgtggagtgcatgcgtaggacgtgcccaattaattaattaacctaattatacatagtatcaagtatatataaaacagcatattccctatagctagtatctgttcaccgtctcaccgaagatatatgtgctagctatatagcttcactagggcactataccaaacccggccacacaggacatgaagtttgcacggtgaacgattgatatactatctcatcccctaaatgtttgacgctattgacttttttaaacatgtttgaccgttcgtcttattcaaaaacttttgtgaaatatgtaaaactatatgtatatataaaagtatatttaacaataaatcaaatggtagtaaaagaattaataattacttaaattttttgaataaaatgaacggtcaaacatatttaaaaaagtcaacggtgtcaaacattttgggatggagggagtacaaccatatactccctccatttataagtatttgacgtcgttgacttttttaaacatgtttgattattcgtcttattaaaaaaatatataattattaattctttttctatcatttgattcattgtaaaatatactttcatgtatactacatatagctttacatatttcacaaaaaaattttaataaaatgaacggtcaaacatgtgcttaaaaagtcaacggtgtcaaacatttagaaacggagggagtatataattaagcggcatttgcacacacttcgcacgaaatactagtgcacaagatatagttcatgaggccattcctaacccaagacactagacatagtttccataaactccacataatcaagaaactagtactagacaccactctttcaatgccaaattttttattcatagtaattaatgatccttaaattaaataaacagtaaatctcagattaaatttgtgaaaataggatggacgttgttcccaatagcgtccaagacttggacacactttcgaagagcgtccaaaggtggacgctgttctgggcggcgtccaacctgctgcacctcatcctgctcggtttggatgctcttcggtgctctccccaaccatttgccacggcacgcgaagaaacgccatcaccggcttccctctcctcgggcccaatgtttggattggtgatcgatcttgataaatttgtttgcaggttggaaaaaccggccgctaatgatgtgttatggatgccttggtcattcaatatatcaaaactatccgaaaactagacattgctgtttattttgctttattctgtaaaattatttgtgtgctcaacatttgtacttacagtgctctactttcaaatattagtgaattccattcataccactacctagttaattgtcacaatctgctaaaaaatactgctgcaacatttgactagattgaaaggatatcgcttcattttttatgtggtcagaacttattgtattctgatatgtggtggtatcatttgaatatttttttgaatcgtctgagccaacgcaattgctgaacccgtagcatatatgtattcttctgtgcagccttctagacgctaataggagtaacaagctagagcaaatgactgcatcacattgacaaaattgataacgtgtacagtctgttagagaaagggatgaaggcaaagctatttgcacttcaatagctaaatacaggggcgcagaaaataattaaggacgcaaaacgtcaatcgccgatctttttttttcggtgatagatgaatggagaggaaactcactgacttctagtagccagcagcgtagacttcggcacccagagaccctaaatgcgcgatccattctggctggacacatgacgcgtgcgaaccaggttatggacgttgttacaagcaacgtcccgacctggacgcacatagctacagcgtccaatcctggacgttagagtcaagagcgtccttcctatataggtaaatcccatcccataattactaaatatttaatttaggcataactaattatcacaaataaaaaaatcggcttccaatgcaaacaccactatttcatacttaactttaatgctacttatctcacatggtgtcttgatgttgtgtagaaaccatgtccatgcaagacatggtttccttctcttttctcatttattcacttgccatatcatttttcattctaggtggcagcttatttaatgctatagatcgacatcataatagtcattgggttgggaatggcctgatgcacatatgcatgtttctcgatcgatggaacatttatactgcaaaggcgaaatcgatgcatgcaaatcagcaaaaaatgtcatcggagtatcaagtagagtggcgaatggtaatcatattctccacgttttggaggccttctctttttctacaaatgggcaggcattgtgtttgggggcatatcactagattcgagctatgccaattggactacgcatatgtgtgtcgtgaatgcatacaggagattaattgctgattgacatgtggtcgatcgaagagactaattaacgaagaagatttgcattgccatgtggtgtgactatgagacgtacacacactctctctcaacttttgtgagaacgaaacgggatggtttattttccttagttttgactcatttggcggcggcaggtcgatcgtacggccattgcatagcattggcacgttttcttcttggattcctcttgtttgccggtttggattaattgattaggtttggcagagagtgagagagaggggtaagctagcttagcttagggcacccataatggttatctatacgctctctacaaaatatctatgtcagcatatttttctatttggaaggtattaaatgaagagagagagcaaaactatctactaacttagagatagtctatagagaaaaacgaggcaatgtatgagagagctatagataccacctaggccccactgctggaaaggctcggcttcaaaaccctgtagacatactattaaggtgatttactattaatcgagtttattgctgagatatacatgttatatagagagtaccttactttaccattgcgggtgctcttagcttgacgtcgtacatgccatatgccctcctaatttccatgcaattgcggcgacgaaattaagtggtcatgcatgctggatggatgcatgagcacatggcgtgccgcgacgacaggagtggggctttgattgctagctgatcgatcgatcgatagaccatcaatcggcgacaaatatggcgtcgtacgtcgatctgattcggcaacagtacgttcgaatcgaactccatcatcatcgatcgtcgttgcccacgcaaaaactgtgcagtagctaagctaaaacctagcttaattaaatgtccagttgtaggacgactttactccctccgtcgtaaaatataaaaaatataaaattggatgaaacatttctaccataaatctagacaatctgttcatgcatatacgtgttattaggaaatgtcctattctatctatatattttgagatggggaaatgagtagtattacaaatcaaagctagcaacacggtgtaaccagttaaacgtgtaagctaataaggagaatattaagtggcatagtgtttgcttgtcaatttgctcataaacaattaaattaaatggcgcgtgacagcatacatgcatggatggatcatctcgaaaactaaacaacatgcatatgcatgcagatcgacattgagtaacctccagacaaaagctattgacgggaagacttttgcgcgggtaaagcaagtccgagcatcatgtggcgccggatgcatgttgaagttgaccagttgacctcataggccaagctaggcccaacaacatcgtgcagtcgtcctcgttggtccatgagctgcaacattgtactccttctgtcccataatataagtgattttgagtttttgcctactttgtttgaccactcgtcttattcaaaaaatttgtgcaaatataaaaaataaaaagttgcgctcaaagtactttggataataaagtaagtcaaaaaaagtaaataataattctaattttttttaaataagacgagtggtcaaacggtgcaagcaaaaactcaaaatcccttatattatgggacagggggagtagtaggtacgttctctgtatatatttgtctaggctttaaatatataaaaaacagtgaaaatgctttaacaccgtaaaatatactccctccgtattttaatgaatgacgccgttgatttgttaactaacatttgaccattcgttttattcacaatttttgtgcaaatatgaaaataattatgtcatgcttaaagaacatttgatgacgaatcaagtcacaatgaaataaatggtagctacataattttttttaataagacgaatggtcaaacgttggataaaaagtcaacggcgccatacattaaaatatggaggtagtatatattttacactataagcactattaatagcatatataagcatactctatacatcccataatattgcaatttggaaccggattggatattttaaaatacaacgaatctagacataagacatgtatttgtctgtttatcttgtctaagcatttttaaagataaaattaatcatgtaaaagtctatggtatcatagagtaaattacagatgtactcactccgtcccataatataagggattttgacattttgtttacattatttgatcacccgcattattcaaaaaatttgtgcaaaaataaaaaaatgaaaagttgtgcttaaagttctttggataataaagtaagttataaaataataataataattctaatttttttaataaaataaatgatcaaacagtacaagtaaaatattaaaattccttatattagataacagagggagcagtacatgcttacgcataaacacatgcccttcgatattaacgaaagaaaagatactataaccacgatgagggtaattcagtaaagtcacatgaaacagtaatactccctccgtcaaaaaaaaaaaaagacaaaccctggattttcgtatccaattttaacggtccgtcttatataaaaattttttataattcgtatttttattattgttaaatgataaaacatgattaatattttatgcgtgacttgtctttttaatatttttcatatttttttcaaataagacaccgtcgggcacagaaaacagagttttttttttttttttttttacggagggagtagagatcacgatgagcactgagccgtggcatactgtgcccatgtccgtacagacgccggtgtccgtcgctgggttttaactgcaccaacatctaccgactccccttcccactttgtcccgggtcgacgcggtgggacccacctcttgccggcctttaaacagcagacgactatggcaggtgggtccagatgccactccccgaccgtcggtccgtgccatcctgccctctagtacacgcaatttggagtataatttgattctgaatttcgaaatcagaccgaatttgacagaccgtccctctgcaaggtttgaatttttcagacgcatggcggcacagttacctacccctactccgtggatcggttcgtaggcttggagaattttgaggccgtcacgggcgcagatagagaagaaaaaacatcgtgtggcgcctgaatctgattcattttgcgtccatgaatccatgatgcatccacgtgttgtgccgttttggagagaagttgtcgcaggctggagctgaagccatctatgtgagcgcaagtagtatgatctccaatatgttgcccttaaaaataccatattggattaagtgatgaggtggataagagaagtgaggagagatataatgagccacccctaaatcaagaggcaactttcacataaattttaagaaaaatatgatagtattagagatattgatttttgtgtaatagaggtgatatattgtatgagttaactcttagttcatgagtgaataaaa

SEQ ID NO: 15153 - DNA, 25711 bp, Oryza sativa
atagggagcactactaatactaataccataatttagggttaggaagcttatgcctcaatagaaattctgaagttgaataaaaactcatcttggaaaccatattctagaaatagactatttcctcacacttcaagtcttacacactaccttgcagggccagaccgcctgtaaattctagtatacatttctgcataaaatacaagacctaaaaggacaaggagtttgactgcatatttatcatagtatataaactaacttcctgtgaagttacagatcaatatgataatttggtacgcactaagcagttgatagcctcaatcaattaattaaaaataatatataaatgtaagttcagtatcatgcacatatcaacagccttaacttgtacattgatttagctaaattcacaactattatttacacccgaggtagccaactcatgtttattaactgccacactagcctcatatgtcaaatacttcagccaggaacagccattaaggatagcatatacacaaacaaaaggaacaacatgtttactgtttaatcaagttgtaactacaatgagaaaatcagtccaactttaggggtaagatataatgtgcaagtcagaggaacccatgtatgccatgacaaacctcatttgcgtctttgcaaatttcgttctcgttcttctttggccaattgaccctccagcatctgattgcatcaagttaaatacaatacatgagggcttttataatcattcttattcatcacgaagcttatgatagcaacacactgatacacaaacctttctttaccaagacgacgagcaagttcctcagccagagcctgccctggaggatcagcatctgttgccagtattatcctagacgcctgtttccatggcaaataaaggaattaaaatgatacctgtgtatctcagctacacagttctataaacaaattattctgagataataaaatgcccaccgggtcaagatattctttgcaattccacagatattggtacttcttatcctagctttacagggaacataagcaactgttaggtcgcagattagctaaaactgtaccagagatcaacactcaaactgaagaatataatagtgacaagaagacataagttgtcgtgaatcttgagggacaaaaactttggcaacagcagaaagtagcgctaacctgatctttatctgggagcttgctggatactttcggtggtgcaccatctggtacactgacacaattacggtagccagcttcttccattgagagcttatcaatttcaccctcaacctgccatgtcagtaaggagaacaaacaactaaaaatctgggaatatgaaaacattggcacaaatcttcaggagcaatatgcaaaaagaatatcaagtaacagattttgaacatacaatgataatatctcgtgctcgctttatatcgtccagaccatataaaattttctctgtgtttgcttcctggtatataagtgcaaaaataagaacaaaagaaatatagcataagctcatacaccctaaaaacgagtagcaccacaaacctgtgaaaatttcttagagacttccctgtatttgcagccaacgaggaccccatcacgcctgtaggtgaaagcaataactatctgcaaacaaaatgtacttacaatgctaacacaaagatgttgtatccaaagcagatctacggaaatgcatccatctataccttattactccagttacgctgcattacgctgtttctccgaagtgtttctggcgatatcattctctctgagaagtatgttacaagctgccaaaatgtgattgttttgtagaacacccatgtgcaaaaacttctattaggattcatcaaagaagaatgggaaaagaataaaaacaacaagaaacttttgatgatatttgtacagtaattggtaatattccagcctaaaaaacaatttcttacctcatcgcaaagtggctcaagatggaggtcctcctcacaaatttttctgtaaaccttattgactgccagattagcttcaccatcctggtccgtttcacattctgtattattttttgcttgtgatagtttgagaactccatcaggctgcagagagaacaatagtgatatcaggacattttattaacttcaatctttattcctatatttatttggtaaaggcacctcgacaaaacccttccaaccacaattagctctaaaacattgccatgcagcatttttcctgaagaacaaaaataggagaaacatcagatgagacaggccgtactacatctgaagaagtaaaagttgaagaagggtaaatataaaatctcacccatccattcggatcataacactgaggctcggctcctcagtagatcccccattgcactagtgaacatatggaaagtaatactcatcattgctgtctgatagctcagcatgtaaagtaaatggatcaccaaaggatcatgagcaggtgagcatgctataagtagaaactagtgggttttatgaaccagccaccaaaacgatgatactttatgatacaggggtaggctaatcaaatcagatactagtagaaaacaatggatttgatgccacaatgtctctcatttctcttgatgtcttaaaccacaaaacaattgcttcttatctagctagacacttctagcctcatctttccgcttaagcttatgcttatcagccaaaatttgaattttcaaccttaaatttgaagttgattttggggtttttttcatcaaagtttattcttcagcctttgcttttagatcgctaagaacacgtatataaaagttttattcacaaattatttttcgtttgcaaatatgccatttggcttattccacgaataagccaaacgatggggctcttcatgtaaaaaagggaaacatgaccaataattagagtaattaaaaagaaacgcacaatacctttgggcacatcattcgttgataagtaccaagcctccattgctttggacttattccttctttcttcagtctctcaattaactgtcctagtcgctgctcgcaaccctttttgtagttttccgttgaatgaactgttatccaaagagacacgacatcaacggaaagtatcaccgctactacatccaattgttatagatcacttgcaaatgctcaaactatgacatgtacgccgcctaagaagaacaagtgggcaccagaactgcgaaaacaaggcagacataatgccttggacgaacagttcactcaaactgtcacaaaacagtaaaagcgctccaaattaatgtgacaatttcaactaaaggagtttgaaagagtagaatcaatcaatcaaaacgatttacccagcacgattgattgaaatcctcaaggagttcctggcgataagaagttaagaacacagcatttgggaggattaacagctaaacgcctaaaagtacagtagtaacgagccacgaaattaatcggagacacgccattgagaagcgtattcccagagaccgatctcctagtaaaacatggcgaaaacagtatcgcgcatgttcggagctcgaaagcgagttgttccataccactcctggagcgaacggcgacggggctggcgggccgcggcgcgggttcagtcctgacgcagcaggccacctcgtgcctcccccgccggctcgcggcggagaaggcgtggagcagccggatacggtggccccccgcggcgagggcggcggcggggaggcggcggcgcgcggcgaggaggaggccggagtccccgccggcggcagcggaggcggccatgaggaggagcgactggagggaggggcgcggtggcatcacgaggtctagggtttcgccgcgcggggcatgcggggcgcggagcagaggaggcgagaggggaggggagaggggcttggggaagaagaagaagaagaaggaggagggaggagaggatggagtttggattgggtcgcggaggtttagggttttacacatcggacatgtgggccccaccacctagagatagatagaaagagattgggttttggaatagagctgtcaaaaaagctctcaagctgctcagaaaatctcagagctctcaagctgctcgagcttgattcgttacaagcttgaatactagataagccaagcttaagcctaggctgaggctcgcaagcctagcaagctcgagctcgaatagtttggcagagcttgattagcataagatgcattatatttaggaatatgttcttatggatcaatgtatacttatcactatgcttgacctgcttaagtcttaagacctcatcaatgcttctcaataaaacaattatccggctgctagtaatagtactactattcctattagatgtagtagctagcttttgttaattgcaacgtttcaaagccataaattcatgagaaaagctgcataggcttcattcaaaacgagtagcacccattaattttgactaccgataatttgcattaatatcttttatacaagagtaagttctttgaagttccaccaagtcaagctgtcaagctcaagtaggctcgaagctcgctcgagctcactcccaagctcgatcagtatccaggctcggctcgttgacagccctattttgaaaggttacattcttttctctaaaccctaaacctagaattgattgaatgatgattaagattttcatggtacgctttttaaactgtggaatggtatgtttcgtatgaaaactttctatatgaaagttgctctaaaatatcatattaatctattttttaagtttataataaataaaactcaattaatcattcattaataccaccttattttatataaaaaaaaacttaatcttcatcttcagaagaaaaaaacacaaccgaagataaaaaaaggacaggatttgaaacgtaggtgaaagcggatgatgtagttcgaaaaatagagttgcacggatacgtgagaaattcatagtacaaagttgtttttgaatttacaccaaaaggaaagtttgatttgtattttgaacttgtgctactctctctgttctaaaatatagggatcagagtatatctaagttcatagtaaagcgttcatgaaaaagtttatagtaatatatcccattcaaacaaaatctttttatattttaggagtaagggagtataaacgaaacgccaattcagaaactttatccccaaaaagattaaaaaaaagaaaagctaaatcgcgcgtgggcccaagtagtagtcctcctcctaactcaggctaaatctgggccacttctaggcccagtttaagccttagcccagccaagcccaacaacaacctcccaggcccaatttttgtcgtgcctatatattgctgttgaactcttatttgccttcttgatccggtaccaatttgaatcaccaatcccattgaattcaaagtctcctgctgtttctttgttgaccaaatgacaaataccatacctgcgaccgaaggtgaaagtacattttacgggaccatccgtgatcgatccttcatctagcagctagttgctgtaactttcccaagtcctcgtcgtcgtcttctcccagctaagcaattaagatgtctaaagctgtaggtttaaaacctgtaaaagttgcaatcaatcaagctcgagaaatcttggccgatcgataaatgtactgtacagaacgtatagctaatttctgccgtctcgatcgtcgctttggctggagtagtagctagactttgatgatgcacatccctggttttccaagagcaaatagagtacatctggtcaataggaaacgtgctgtcatgtagccactctattgattcaaagatcatggccgcggacgtcgtacacgagagcggagtcgtcgatctggtcgtccatgctgaccatgtatgtagcagtacggttgcttcctcgttccaaattactttatcatttttaacttcatcttagttagtcagacatttctaacttcgagtctcaaattctaaaaattcacctagtttaacaccgtagatttatacatgtttttggattttctgaacgtacatattgttaaaatatataatttcaatcggtgatactgcgtcaataaatttgcacgttgtatattaaataaatgtcgatcgacgatgtatctatactttcagtaaagttatagtccaataaatctaaatctcaacatgcatgtcacatcgtcacccactagtaacaattgcatatctaaccttgtacaagcatataacatcatctataatttatttaattatacaaatcaacatgcaagcgtatccaatcatcacccctcacattatttgcacgatattttaacaaatttatctattattttataatatttaacatatatttatcaatatatttcacattaaagtacgggtatcatttgttcgttttacgataagtattgataaactctaatgttttattattatttttccttttactcatagtttgactgtcgagaaaaatgtattaatcaagatgaagtatgttcgcgttgcatggttggcgtacgtgttgacaagcatgcatgcatgaatcgatggatataaactactattgtactagtagtggtcaaacaccaacttgtttgtgtctgacaagaaagggaagagaaaaacaatagcgtgttcaaacatcgtcaaaggccaggcgtctcggttatacagacaacttgttgagaacacggacggaacgcccagctgattattcagaactacatgcaattggcaacttgtgcatggctgcatcatgcatatgcttcgcacaatagatgtgcatggagatggtgacttgtaagagggagaacgcgtcatgctgtcatgcatgcatgttgatttgattcagtcctgaatcatgaactcctcacataaacgtattccgatataaaattgatggtaatgattataagattttaactgaatcttgtcctaaagaattcaaacacttatgatcaaagggtacatgataattaaatgtttgaactataatacggagtatattcatatttttgtggtgggcgcagtcgaatttcgagctattcttttatagtttctaatcttacttcatgtattattgtattttcttcgcattgtttgttgtggatgacactgatcgatatatcatataccaaagtctggtgtggaattgaattaaaaaaaaactacaagcctttgctattcaaaatatatcccaaactttaactggcttgctcttcttgcatgcacatatttatttttcaaaatgcaataacacaatgcagctagataggaaaagaatgttgttttcagctttcttttcgtactttcttcaaaaaaatacatatatttatttttaccctcaatttacccaggccaatcccaacccaatacactagatatagtttccataaactccacatcatcaagaaactagtactccactagacactacttttctaatacaaacaccactatccatacttaaaaatttaatgctacttatctcacatgatgtattggatgttatgtagaaactatgtttatgcaaaatatggtttccttctctttcctcatttattcacttgccacatcatttttcattctaggtggtagcctatttaatgctatagacaccatcctagttattgagttggaaatgaccccatactcgttatacgtacgaaaatccattaatgacagcaaaatcaatagaatagaaatgcatgctgaataattcatgaattattattccaatggacatttctgacaggatcatatcgattgcaatcagcacataatattaataaccataggtaagacatggatgaataccaaaggagaaattaaagaccacttgagaagtcaccgagtctatatctcgatcgatttggcattcatcagcactaactaagctactgaatagttaatcaacatcctactataatttttcagaaactcaattgaagagaagtcgatcgagatctctcatctctcatctcatctgcttaatttgctcaattaattcatcaattaatcgagctgagatcgcggttaataacaacggattaattagctcttggcggcggcggtggcggcgtggaggacttgctggaaatggctgacgtcgcagggcacacggaggatgccctcctgcttgtacccgaactcctgcgccgccttctccagcagcgccgcgaacgccgggtgccgcagcgcctccacccgcaccacgaaccgctagccgccgccgccgccgccatcgccgtcgccgccgttgtcccccaccatcaccggcacgcacccgcgcggcacgccgtcgccgccgccgccgccgcccgcgcggtccgagaagctcagcctcctcatcagcccgcgcttcacggccgccgccgcgccgccgccgccgccgtcgccgccgccgccgccgccaacgcggtcagagaagctcatcctccgcatcagctccctcatcgtcgacacgttaagcttgtggggttaccaaccggcaccgattagggtttctgtgttaattagagaggattatttcatgcatgcgtttgctcatcatcatcaaggatcggggcgccatttataaggaagagagatccatgggatggaatggaatggagtggcttacattctatcagaacggctgccacttgttgctagtagcatgagcgtgtggaataatgatttcactgatcagtgacatagacaagctagagagagagatgtggcatggaggtaataatggattaattaagcaggaattgaatggagagagaagacgtttactagtctgtgcatatggttggcgttggtcctggggttaaccttatgaagttggggttcaaaaatgttggctatcatatatgagcatctttgaaagttaagaccgtggaatttagtgattagatgaatgcaataagtagtggcagtaattaattatttaattaacctatgtaattgagatactcccttacggcgggcaatgcaaaaaatacttgataattatattatatcaaataaaaaattgatgtctgatattagttatacggatttaacgtggaaaaccctcttatactaaccacccctccctaaaaaatcacaataatttacgatgactgagaactcaacagaacttacgacacacttcaatttacgaatctctactaataaatatcaattgattagattcctcgcgaaatttcaatttcaactagctagccagatcagctaatcaacaaattcactctctcaactgcactgattataaaataatcccggatatccctaaatttggattgttccacacctaaaccccatgcagcagctaaaagatgattatatggcacattatttaattcaaaccaggaaattcttcttcttccttccggtggtctcagggtcgaaccatttaatttgtctggttttggaacgtgcaagctggtattccatggtgggcttgaaattgttgctgagtgcgacagtggaagggcagagcgaggatactagctacccctgttgacaaacacacacgcaaaatcgcttttaatttttgtattatcagacgaaccaacaaatcagccagttaacattacattatttggaaacagaagatgaataagcctgaagaccggagtaatatttctagatgacatgatgatgcatgatttggaaatttgctaatctattctaaaacaagatgtagctagctatatatagctagttaggtgttagaattttatatgcggaccaaccggcccatagcctagaaacgtaatgctacgtatgcatgataagtggcttagcatatttacatgcatgatttaatttagaggctggttctgtttgatcgtgctctgagaattttcacctagctatagctagatacactctcaggcgttcgatcgatttcgaaggccagggcatcatccaaacacaatatgcaaacagaaccaggcctttggaccgaccatagtattaattaatcgcttcattttctttatttaatttatttattattgttatctttttttttcaaaactaatggctaatagataaatgatttgtgataattattcgaggatagaaacgaaggaattaatattataaagttaaaaatagattaattcaaactatcttttaagaagtatacttttctaaaaaaaatcgtaccatttagaatctcgggaagcatgtgcatttatcacatcgctccattcgtcgaaagagaacaacatgtggccatatatacgcatgagcgcacacgagtgcaaatatgacttcatatatagcgcaattaaacatatatactaaagcaaaatatatactagaatttgaatcctagctactcccccgtcccaaaaaaaggcaaaccctgggttttcgtgtccaactttggctgtccgtcttatatgaaatttttttataattcgtattttcattgttgttaaatgataaaacatgattaatattttatgcgtgacttgtctttttaatttttttcataattttttcaaataagacggacggtcaaacgttgggcatggaaacggagggagtagtttttaaaaaataacacggaccacaagtatcggtcggagtggtccactagctagctagtttgatctgaaacaaggcacgtactccctccgtaaaaaaaaaaaaaagacaaaccacacaatcagtaggctcgatcgctttcgagtggatcaaccctccgaccaacccgcgcacggacgtcggcgtcagatcacggcgcgtgcgacttgactaacgaccttaacctgatgagcgtggtcgccgcgttcaacaactttgcaagctagctagccgcgatgcatccaggaacaagccggtagggcggggcacaggacgcgcctagtactacggctactactgcaggctgctacgtacaacgtacgcaatgcaattctctcaagactgcagcagcttaatcctatcttactataaaattatcccccactaactacttaagcttaacatgcaaagatgccacatcattatccactaacaataatcacatttaaacatcatgcaaacatgctatatctttatatatttttttaatttaagagcttttcaaatacaaacatgttaaattatcatctaacgtaattcacagaatatttcaatgtatatttgttatgttttatgatatcctatatacttatatagttcatcctcacttagttagtgtttaaatgattaatctatggtacaaattatctttctcctttttccctctaattaagtcatatcacatcaattgtttttagcctttagatgattaatctacggtcaaactatctctctacctttcttcttccataaagtcataccaccttattttttacgtttgaatcaccattccacatactatttaaatttaaattatcataaaccacattaatttacttaatctgatgttatctagctatcttacacgttatttttttaattgttatcatactaaattcccgcagcaatgcgcggggtttcacttagttatcctataagtaaaactcatttaattttgatcaaaagtttataaaaaaagtttgtcataagtaacactagattagttttattaattaattagatcccaattgaatatatatatcatatttttatatatttgttttgcatgtagaaaataatgccatgtttttgtttttctgatcagacgtgaagaggtttgacttcaaataaattagacatcaaacatctaattacaacatgaaacaaacggagtgtgtactacttatctagtagcttatactatacttctatctctgttccaatttaagggcaattatcagttttcgtgttcaacgtttaaccgtccgttttatttaaagttttttttaaaaaaatagtcacacataaagtattattcatgttttatcatctaataacaataaaaatactaatcataatttttttcaaataagacagacgatcaaacgttgttaaaccttgtaaaactacaacctttttgtaacggaggtagtaagatttttatttttagttttgcaaccctgccagcgtaatcaactctagctaatacggccagactcggacttcttcatatataaacagtagatttagccatgttacaatactactagtgtcttcaaattaagcataattgaagcacataattatggggttgtcaatttaatctttataaatatatgtactatgtattaatacatttttagataatagaaatggttacatttccggtctctgtcaacaatcacacacacagccaatatatgagtttagcgttgaagaaaaaggaaaaacaaaattgagtgatggaacaagcccccatccatccaaaacagaacagaagttcattagttaccaatttcatgagggctagcaattccatgagtgtacatatatagtaccactgcgcatggtatcctactacttttgatagcatcaaataccaagtacgaagctaattggtagacatgaagataacccagcaattttttattataaaaaattatatcatttcggtaataccaaattgaccatatagtacactaaccacaaataaaatcgattttttttggacctggccggtattaccataaaccaatttccaaataaatacatacgctggcgattgtttaactcgtggcttagatacaccattagaccggtaattcatattcgctagcttgtgggcaccgcaagtggtccccttcaactacatacgaggtgtcttcatgtgtccctgtacgtatatatatacgtctttgtcttcgtgcaccaccatacgtacgctaattcgaagcttcctttcatcttcacatggagaacgaaaactgctagctagtctgctacaattgattttttccacgccattcgttttctcgagatgtcgttttaggggcagtttaatttatccttttttttctatctagtaggagtatatgcgcatggaaaaatcctaatcagtgaacgctctctagcatgaactccgcataaaaaacgatcaaacatatcaacagcttaatttgcattttctttagttccttttctatttttttccttattatattatatagttttatgttggaattgaacaggtgcatcggttttctggagaaaggaacactcaccgcttctttatcagagtttgagaagaaagagaaaaacacctcactcaatattgaataattttgtttcagatataaacatgctatctttaagagaagtttgcgatatgataggaagtttttattgaattttctaattgaaatatctttttatatttttcgaaagtttttttgttacaacgcaacgcagcagctgtaagtctgtaaccagtgctttgttattggctacttttttacggagatattttttttgttgatattggttacttaatttgatcatctttttgagttgacagctacattaattagcacagctgtacgtaccggtactgcttgcaaatggacatcaataaattaattaatattactgcttaaaagaccatgcctagtttgtaataatttccatatgcaatatacaagaattgaccgtagaccaacgggtgtgtattattttcttatcaagccgtagctgacaaccaatcgaaaagaccatgacgagtctacgatgatgtcactctcttctctaaggttaatttccaacaagatgattaggtgaatgataatcgtcttagccatccatccattttactgtttccttctagaaaccacatgagtggccactgtacaattctttttccacatgacaggatgcatgccaattttgactcagcctgcggtgaacaaaatccacatttcctgatgctagtaaaagttcttgaaaataatgatatcttcgttgaatcgaatcgaatcaaagacttttgtttgtccttttcaatctgcacgcttgcaagactggaatttagtacagctggttgcagcaaagataaattaatcaagctaagtacgtagagaaaacatttggccaattgtgcttagtttttgttgtcagggcacaaattagattagctagcttagaagagatcgaccgatcgaagtggcatggtcagtaaaaacaggcttaatttgcattttatctttctgaaacttcagtggtcaagctttttaactgactgcagtacgcctgcctggcctttttttccgaattcgttgaagggtgacctcatgatttatcacatctttgtccatggtgacatgacttcttgaaggaaaaataataatataagtgccttctattgtaggtgcgcatcaacttcgtaaatactttcactctttttaatcaagtgttccgttcagtctttttccagttggtaattaactatgatcaattcattcaaagtagttcttggtgtgtttgaagtgtgattatgtgaaaatgcctctctctttttcttttctttttttttgcagaaaggtggcatgacttgcatcaaggaaaggtgttaagaattccattggcttatgcaagatcgtgtagaaaaggtggcagaaaagtgatttccatggttatacaagataacaagattgtgtaggaggaacttctgcacacagttttgtggtagtcttggtgatgcttaatttggaaatgttttgcaattgctcgtgttattctgttctattaccatatacaaactagctaggcccaaatagagcatgtcaaactccttttttctttaatctcgatgcgttccaactgactccaatattgatctataatattatatgaagcggtgttttacttttagaatcagttgacaagggtattttattccaatattatccgtgacttaacatgaattgatttaattgttagaatatgtgtggttttttttagcatgtcaactatttttatttcttaagggtagctgggtatttgtcccaccacactcttttattttatttaagtaaaaactaattggttgtgtgcattgtggtagagaccggggatcaaataaatcttcattagataaaaacttcttgtctatatgtgttagttacttgggcctaggtcaatattttgcatggattttaggaactagatatcttagatgtcttagttacacagcagcttctgaaagttgttccctatagatcaaagatcacaaattctcaataatcaatagctagccttgcttgaattgtcagtaacatcgaatgcaaaatctaattaagtactaaaacaaaggacataataattaatcgaacaccgtgtggtaggattgacacgacatgcacgagagtacattggcaagcagaaaaaaaaagaatgatgaaaatacgaaaggttaaagaactaaattgaaaaaaaaaactggcgccacaaagatggaaatttgatcatctcaagagggaattcctctcaagaggcacaatgtcgttcctttcaaattacaagtctaataagcccacctgcacaggaagcccatgggcctttcctcctgggccgttttctttccagatttagacacgtccatctaaagtcaagcccacacgcttttagcataacaagcaacatattagcccacaaagtttgcacaattgacgccaatactttatacacatcaataacaacgtgggtgaacttcttcatctatacaacgtgggtgaactcctgaagggagttaagatgccccctattgtgtaacaaagataaaatttcccaattcaaaattaaaaaaatcgagtatatgtcagtctccggctgtggtcgttagcagccgtcgcttcctttggagaattgttgggagtgtagagtggctctgccccattctgctgttttggagtagacttaccgtcgtatcgactttttttttccttttccttccttgttttgttatcattattttcttccttttttggcataggccggtctagttgagtgcatcgtgtaacaaaaactctattcttctaatatattgacgtgcaatctttttgcgcgttcgcgaaaaaaaaatgtcagtctatatacactcgatttttttttaaagtgaatctgtggtaataaaaataacggattggctataattatggcgatagatttttgtcataaacacagtcgaattttcagcattaagattgacacgaagattcgtgctcacagggcatcagcacacacgctttgctgtttttttctgatcgttttattcaaagattaccgaatctgactgttttattcaaagatttatgttgcatgatgattagatactcctatacaaatttacacaatagtttacatcccatttacacaccacttacatatgtaattttaggatttacatacgtaattttaagatttacatatgtaattttggaacttacattgtaaatacactaaaattatttatgtaatttagagacttacaatgtaaatacatacagactattttttagtgaaaaatatggcgcaataaatatagctagtcccaaacttaatccagagacgcttcacgcttgcatgcagccgtcgaggagaaagatctaggtcgacgtcgtcacggcgtgcatgcgacttgtcggacttgacttgggcgcgttggcctgcaaccacgcgcatatgtacgtcgaggagaaaaatctagccagctggacgtgcgtacgtagtgcgtgtacactacggcgctactactacttctcccaagactgcattgccctttgctatctgctaaagctttgcttctaaaatactcccgctcgacaaaattcgacggctaagttgaaatttcgaacgaatcgatagttaggacaattttctggtttaaaattgggtacttttaatttcttaccgaggcagatgagatgatcatccctcgaggtgacataccctctcgtttcttgtatgtcacctaataattaagtaataaaaaatttgaagaaaatggtaactattttttatttttgttacaacttatatacatcaaattttagcttctatgtgtgtggagtaatatatctcatgctaatctaccttatcatttaaaaatcatttttttaaaagtaataagtacttagatgactggcaagaaatgagaagatttgaatcccctcaagggatgaagaatatttttccaattcttgtacaaatgaagtcgattctttcacaaatgaagtcgagtttgcacaagctaacatgtgtgaattcttttatttttttacttagactttttgttagagtttgcatgagttttcactaaggcctcgtttgattcatagggaacaatagagaaaaaaacataggaacaagaatcctacggaatttggtactattcatccctttgatttgtaggaattaaacatagaaaaagcatgaaaatatttcctatgaccatgatttcaagagaattccataggaaaattaacatccaccttgagctcatttttcttttcctatgggtaggatcgaggcaaaatactattggaagataaggtttaaccctaataaaaccattcaaattttgattgctattgacttaatactcaacattcctatgtttttcctttataccaatcaaatatcattcctacaattttcttatgtttttcaatcatctgttttgcatatgatttcctatactattactgagtttttcttattcctacattttttcaatcctatgattcatatgagctctaagattgagttttcaccttgcaccgcatatttagggtgggtacagtagtgggagtacaccagctcagctactggagtactggagtgagtacaccagctcagctagctctgtcagatgctcatgagatttctctgtttccagtactaaggcctctcacagtgcggtgagttggattggtgtttcacagtgccagcttagaaaaacgcagacgtggagggtgtcgccgtgcccctgcaaagcacctcgcccccacgcagagcgccgcacttcctcctctcggcgagtccgcgcgcgccgtcgcgaggcgaagttccgcgcgctgtggagcacgtgtccgtgacgagcgcgtgccctcgcggcgaacgggaggtgcaatccccgattcgccctcccaaaatcccctcccgccacaacattatttctcccgccatagatcggattggaagagaaaaggcaataaaatcttggagattggaagaaagaaaagatcggattcgacaagatgaaaaagaaaagcaaagcaaattcatcacagcaaattcatcacggcaaaatcatcccagcaaaatcacgacgacgacgacgagccggcaaccacgactccacctccccggccgcgcgcgcaccgacgaggagaggagtcctcccacgcgcgtcggtcgccgcggcgtcggcgcctcacctccccggtgtcccgcttgccgcccaggcgtccgccgcgagggaggagagcacaacgaagaggaggaagaaggtgaaggggaggagaaacgagcggcgcggccgcgcgggcgacgacgaggcgcacggcgacgaggaccacgccgttggccgccacctccaagccagagggctcgagcggactgggccacgcgctgtgttgagttgtgatccaaattcatttgcacttaataaaggctagcttctgccgtagcggatcatcatcccttttagggttccactatatatatacctcttgtaagccgccgtgcggcgatgtaacctcacctcagatatagtgaagatattttgctggctggcgcccgtggttttttctctcctgttttgggagggttttccacgttaaatcttgtgtcttttgtgattgatctattgttctttatcgtttgttcgcctatcgtttcctaacacgctggcctccggccgccacgcctgggcggacgtagacccccaccctctcggcctggatctggggcgtggtcgtgtgggagcggaggagtaagggcggggcgaggggaggagaaggagtcggagtgcgggaaggaggtgggggaggaggcgtgcgacggaggaaacaaagagaatcgaggaggagaaaggggtgtcgagaccgagcgctggagggcaggtttggaattatttccttcacctgcccgtgccctcattttggcagggtacatgcactgtggactcggttacctctcccactacatttatccaattaaactactgtggactcggttacctcccccactgtatacaactaggggtacttgcactgtagaataggccgtctttaggccaattttttgggttaggggtacgggccccatagcttgtattgtgaatggaccaagctgtcgcgttggcattctgccacgtcatcaccgggccacgtgcatgcgtccgttatcctccagcatggacgtacacgtacgttggatactccctaaaataaaccaatcttcaggggtgaaataatagtttattttaaaacggacgaagtacgtgtatttgtacacgatatgtatatatagctaaaataataggttgttcgttactttgcgttggaaagttctccacatcaacacgaaaaatggaatagctcattagagcataattaattaaatactagcttaaaaaacttaaaaaatataatacttcatccgttttataatataagtcattctagcattttttatatttatattgatgttaatgaatctagacatatatatctatttagattcattaacattaatatgaatgttggaaatgctaaaatgacttacattgtgaaacaaaggaaataataagcttttttcaaacaacgtttctattttttttaaaaaaaatagtattatttatcaatttaagaagcgtgcacgttgaagaaaaagtgtaaaaatgatgaaacgaactcagtcaagtgtagaatggtctgatggctatgacatgcatgttccgtccttgttacaccggccagctaattaactagagcttgctgggtagacaagtgacaacagcaatgtctgggaaagtcatttcaaccctcgaggggatatcggctcatttcatgcattccacctaaatagtcataaaaaaatatgaaaaaaaaggcaacatagattaatataaaatatatcactctacaaacatacaagtttaaattcaacttctacaagttgtaacaaaaataacaaatatagttgcgaatgtatgataactattttcagtttaatttgttatttatgttgcaacttgtagaagttgaatttggtctatatttgtagagtgatttatttcgtattaatctatgttatcttttttaaaaaaaattttgataactatttatatgacatgcaaacaatgaggggatgttccctcgggcgatgaaccacatccgcaatgtcttactcaaaacaaaaggggaggagaaactgcaatgtcaatcctactaattggcttcaaaaagatggacaatattacacatgcaccaataacgctcaactaaggttttgtgtggctgataaatagcctgatatatttacaccgaccaaagggtcaaattaatcaagcagatgcatatgatacatatgatcgatctttgagcaaacgatatatgcatggatcaatccagcggcagatcttaaaaaaaaacgattcgttggtgttataacgtatttattagtgttatagcatacttgttatgcttggatcatagtgttataatatatgaataaacagtttcgttatagctaggttttgctaaaagtcatcggtatcgccaccgaccattacactgtaaatccaccctgtatcgatcgattgagtctccatcgatccaactatatatagcaacatgtgcagttttcggtcaccactaggtagatcgatcatccctataatcatcattgtacgacgttgcgtgttcgacggctggattaattggtttgaataatttttggtagttaattatctgactacattttcccaattcttaccaataaagtcgagtttgcacaagctacatgtgtgaattcttttttttatatcttagatacacttttttgtcagagtttacatgagttttcaccaaaattgagtttccaccttccaccgcatatttagggtgtattcagtagtaggagtttggaactctccccgaagcaccgcatatttagggtgtattcaatagtaggagtttggaactctccccgaagcacacaaaatggagtgttgtatcagcgcatctatatactaatataaaaaggagtttgcccctcccaatcctattggtgaaatcattccatctatctcatccgttcatcctcatcccatctaatctcatccgtccgctgtacaccgtagctagtatatctcctctagcgattttgcccgatctcatcccaccagcaatttcggtccccatgcggtggctgcgcggcgcaaatccccgcgcggtgactccgcctactcactctgcgccttgctccccgcgcgcatcctcgctctacgcctcctctcctcactatggtccagcgacagtttaccgccggaccaacaacctcacgtcctcgttccgcgcaacgccggacctccttcatccttgcaacggaccaacgacaacgcaccatcgcaccgccagaccagagccgaggcactaccgcaccgccagaccggcaccgaggcaccatcgcgcagctgcccaccgctagaccagcgcacgccatctcatccccttcagccggggactgccccagacggtggggtagtggttccccctaccgccggagccgttgcggcgcacgccacgccggcgccgagtttgttcgacattctgtcaaactttcttcgagatgcttaggaactggtgatttggggactacttcaaggtggaggccattgggttagcctgggatcatctcactcaggttttcttttttttggatccttttagattccctttttattctcatgcaattgtggccgtgctgtgtgaatctaatgtctcttctaattgggactggaatcatgagttggttgggttggcattaaactgttttgagctagcgaagtcttgataaataatacttcctccgtttcacgatataagtcattctattatttcacatatttatatttatattaatgaatctagacatatatatctatctagattcattaacatcaatgtaaacgtgagaaatgctagaatgacttacattgtgaaacggagggagtagaagagttgttacttgtaagagatgtcttattttctgatcttgtcgagtacaaataatagataagagacaaacaatagatgagttgttgtgctcgacaatttgggaagatgtctgagtacaacacacctagctttatcccctataaatacgtttataccccccagcctgaaaagttaaccatgcaggcatcaaatcacacagcactaactcatcaagagctctacatatacatactaattaaacctaaatacgtagcctgatcagtttaggtttgtcaaacgccatggatatggagatgggtaaattgcttcatcgcccatggaaatggagcttaaactcgccgctactgctgctgctcatcgtccccgtgatgatccacgtacagctgaagctacgtcgtcgtcgcaagaacgccgccgccggcacgaggctgccgccggggccatggcggctccccgtcatcggcagcctgcaccacctcgccatgaacccgaaggcggtgcaccgcgcgctggccgacctcgcgcggcggtgcggcggcggcggcggcgtcatgtacctccgcctcggcgagctccccgtcgtggtggcctcgtcgcgggacgccgcccgggaggtcctgaggacgcacgacgccgcgttcgccacccgcgccatgagcgtcacggtgagggactccatcggcgacacggtggggatactcttctcgccgtacggcgagcggtggcgccgcctccgcgggatctgcagcctcgagctcctcaacgcgaggcgggtgcgctcgttccgccccatccgggaggagcaggtcgcccgcctcgttggcgccatcgccgccgccgccgccgctcccggcggcgatcagccgccgccggtgaacgtgagctggcagatcgccggggcgcttaccgacctgacgctgcgcgccatcatgggggagtgcggcttccgatggcgggaggagttcctggagacgctgggcgaggcgcagaggaaggcgagcaggttcggcgtcgccgacctgttcccgtcgtcgaggctcctccgcgccgtcgggagcacggcggtgcgcgacgtgagggcgttgaacgccaagctgttcgagctggtggaccgcgccatcgagcagcaccgggaggcggcggcgacgactgcggctggcggcgaccacgacgacggcggcgacgacgacgcgcgtgacgacaacgagtgcttgctgaatactctcatgagaatccagaaggaaggtggtggcactctctccatgtcaacagtcaaagccgttattcttgtaagttctttttttttatctaagactttaatttaattttcttttaaagagtcacatggattttttttatctatgactttaatataattttgttttaaagggtcactgggattttttacaaaaatatattcttactagctattccctagtgatccatccatccaaagtctcttatattttcagatggacagagcatatatatgaagcaaatataaaatattatgtgaaaactatttgcaatattaatctatcagtacaattttatactctaaacacagttgtcatttaattagggttgctatagcacggaatcctatccaaatagtatactctcacgtatatatcatatcttaatacctccctggtatcacctgatactcataggtatcaaatttggtacctaaccggtatcacctaatatccataagtgccaagtacggtaccacataggcctcgcctagtaccaacaagtatattataactcagataccatctgaacctctggttttgtcgccaccttcgtcgagccccttcacattgcttgcagtcaccattgccatcgatcccctccacctcgcttataaccgagtaggatttcggcaatttcttaactcgtagagatatttttccgtaatttgaggcgaattcctaacaacgtatacggaaaccaaccgtacacgtgaaggtataccttatcggtattttccataagtcgtaggatagagggtatgccttatccgtaaccctgacaaggacctttgccaccgaaccaatagccttggatgagctcctccaatctgtcgacgaactcctccactgccatgaaacctcatgtgtggcgcttgctcccccaatctccacaaggtccaccactgagcccacccggtggctcctaggcgcttccccaccagtgccaccacaacccgaaatgttccccttcgcgagtagattcagctggtccgctcccaccgtcttattgtcgagtacaccggatttaaaaggatgtaggcggaaaggagtaaattggttggaggggatgagggcaatgggagtcagggcaagggaagaaggttgattacgatggtggacaaagatgagagatcaaagggctccaacagccaggggaaggaggagttacggcagcaatgttgcactatgggaggatggaggcgaccgcacttgcagcgctcgagatgccgaggggaatagaggatatataagcaagtgggatgggatcccgttaaatagcgtttttgtaattcaattattgacacaaatccataaatcttgatattttgaaatcagaacatgctaaacaatcagtaggagggtaataatattctttgcttatttacatatcatgtggtatttaaaaggggccgataggcgagccatgcatagcacgactgatggtagtacgattggttataattcttggacctctaatgccagttgtcatagttactccctttggtcataagataaataatgtcttggactgatataaccagtcaaaactttgattattatactttgaaaagtacatagttttataacataaaaaatagtatatatgtatatcactcttgaaaagtgcttttttaatctcataaacatagtatcctttttaataaacttattctaatacaaaattattgtcaaaatcgcacttcaaagatcgttaaaaaagtcaaacttattctaataccaaaagaattatatatttgtgcatgaatggccgtctcgtgctttcatgtcttcaatgcacaaaagtggatgaaattaatccatctaaccttgcaatatgctaacgtaccctccttaatttcaacatgtgctaacatatacgcatgacatgcattggccaggacatgtttgcaggtggaagcgaaacaacatcaacaatacttgaatgggccatgtcagagcttgtgaagaatcctcaagtgatgcagaaggcgcaagcacagatacgacttgctttgcaaggaagatctagaataacagaagatgacttgataaatttaagttacccaaagaatataatcaaggaaacactaagactgcatcctgtagcacccctacttatgccaaaagagtgtcaagagtcatgcaaaatattaggatataacattccaaaagggtcaatcatgttggtgaatgtatgggccatcggtagagaccacagataatgggatgatgcggaagtatttttgccaaagcgttttgagga

SEQ ID NO: 15154 - DNA, 863 bp, Oryza sativa
ccggctgacgatgcaccccgttttatgtctataattctcaacaaatgcaactcctatgaacaatgaagcaaattgttcttattgcaagcgctattggtttacatgtttattactgagtatacattgtctagaaatatgttcattactaagcaacatcagcgtagaagtcttgaattgtgatccggacagcaattgggattcttgcagtgtggtgctcattgtaccaagttaggctgccgaatgtgtagcctccctgcactttccacagaggtgtaatgcaaatcttgaaggcatgcactttcttgctagcattgaagactaggacaggcggttcgatagtcatcttcactccaaggggggattctatagaggattggtaaaccgcatccacctccccgacattagtgactgctcgtcgtacgtttattggatgccttaggtctggtatagatatagaaggcagattcaggtgataggctggcaatgtcgtaatgttacagatctcatatttcttgatctgacaagcgaagaatttgttgtaatcctttggatcgatgtcataaattaggccaggatcagcagctccaataggatttatgttccctcctccataatcgaaagggtcagcaactttccgaggaagcgcttctgctaatatcggcgtgtcatattcgtcctttgttgatgcttttgcatgcaaaaaagagtaattcatggttgagtggatttacctatatagttgtttcatgtggatagcacactcaagtaatttacctgtggtgacaattgctgatttgagagcagcatgagaccaatgaggatgtagagccttaagcaatgcgggtaccgagctcgaattcgcc

SEQ ID NO: 15155 - DNA, 676 bp, Oryza sativa
gtattcacactccactatgattgatggaactgatggtttgggtgttgctgatttggaagttggtgacattgaaacaaccactgattgcacaaacacatcaaatatatgtataagttttatgagtctattagtatatgttctttaggttatttttttttgtactagtcttgtatctgacattctgaattgctgacaaatacatgtatgaaattttaggttttttgctgtgccaaaggaataagatgaagtttctgaaatttgatatccactgacaccctgctgaaatcaaacatggcactattattatagcagcaaccgctgactgctcactcaaacacatcaaatcctcaaacctcagctgcgatgctagctcatgtagcttgagaccgtgtgttctgcatgcagagtactcgagcatattgtaattttggtgcagtactacagtggcatggaaacaatgtgccggcgtcccttagtcatggctctgcccagccaacccgacgaagtggtcatatgcttagtgtgtaaaaattttattgttcgcagtgtttgtgtagtttagcttgtaattcaatgtgataatcgtcagtaaaaactttatctatcgatgtattattgcggtgaaagtttgacctcaatcttttcaccccaataaaatagagtaaataaattactc

SEQ ID NO: 15156 - DNA, 589 bp, Oryza sativa
ctaataaccgccgggaacactttccagcgcacggtccagggcgcacttagcaaccagcttggcaacaatgtcgaggcttacgttgacgacatcgttgtcaagaccaagacaagtgactcattgattgacgacctgcgggaaacgttcgacaacctccgacgatatcgcctcatgctcaattcagagaagtgcacattcggagtaccgtcgggcaagctactcggattccttgtttctggtagaggaatagaggcaaatcccgagaagatcaaagcaatcgagaacatgaagtcgcccacaagactcaaggaggtacaaaagctaaccggatacatggcagcattaagcagattcgtcactaggatgggagaacgaggacagcctttcttcgctttgttgaagaaacaagacaaatttgtatggacacgggaagccgaagaggcatttattgcactcaagcgctacctatcaaacccacctgtactcgttgcttcccaacctaatgaagaattattctttatattgccgtacgccatattccgttagcactgtcattgtagtcgagagagagaaagtacatcgaccagtt

SEQ ID NO: 15157 - DNA, 14247 bp, Oryza sativa
tcgagcgactaacaatatgacagagtacgagggactccttgccggactcagagtggcagctggactggggatccgccgcctcttggtattaggcgactcccagctagtcgttaaccaggtctgtaaggagtaccggtgctctgacccacagatggacgcctacgtacgccaagtgcggcgtatggagcgccatttcgatgggatagaacttcggcatgtacccagaagggataacatagttgccgatgaactctcaaggctcgcgtcctcgcgagcccagaccccaccgggcgcctttgaagaaaggcttacccagccgtcggcgcgacccgaccccttaggggagacggatgcgcctgaccggcccccgaggcccgtcggagtccaggcctcgggacccgaagggagcgctccaagctcccttagattgattgcctggatctctgagatccaaacatacctcacagataagactctacctgaggaccgcgaagggagtgaacgtgtacaacgcatttccaaacgctacgtgctggtagaagggaccctctatcggcgcgcggctaacggaatcctcctgaaatgcattcctcaggaacaaggcgttgagcttcttgctgacatccatgagggcgagtgcggagcccattccgcctcgcgtaccctggttggcaaggcctttcgtcaaggattttattggccgacagctctcaatgacgcagtcgatctggtccggcgatgcagagcgtgtcagttccacgccaagcaaatccatcagccggcccaggccctgcagatcataccactgtcatggccatttgctgtctgggggcttgatatcctgggaccgttcaaacgggccccgggcgggtttgagtatctgtatgttgcgatcgacaagttcactaagtggcccgaggcttatccggttgtcaagatcgataagcactctgctctcaaattcattaagggcatcacggcccgttttggagtacctaaccgtattattacggataatggcacccaattcactagtgaactcttcggcgactactgcgaagacatgggcatcaagctctgcttcgcctcacctgcccaccccagaagcaatggccaagtggagcgcgccaatgcagaaatcctcaaaggccttaaaaccaagaccttcaatattctcaagaagcacggcgattcatggatcgaggagttgccagcggtgctctgggcaaaccgaaccacaccaagccgagcgaccggggaaacgcctttcttcctcgtctacggcgcagaagcggttctcccatccgagctcaccctgaggtctcctcgggccaccatgtactgcgaggctgatcaagatcagcttcgcagagatgacctctactacttagaagagcgaaggcggcgcgcggccctccgagccgcgcgctaccagcagagcttgcggcgctaccatcagcgccacgtccgggcccgatcactctgcgtcgacgacctcgtcctacgccgcgtccaaacgcgtgctggattgagcaagctctcaccaatgtgggagggtccgtatcgagtgatcggtgtcccccggccgggctcggtacggctggccacgggcgacggcacggagctgccaaacccgtggaacatcgaacaccttcgtcgcttctacccctgaaagggggggggtcgggtgtcaggttttggctcgggccaaccccgcacccccctcgggtgtgcaggattggccgggggctaccacacatgcacatatatccctttttcctttatttcagcatttcaataaaagcagtttcaattttctaaaggttgtgtctgtgccgttttttccttttgaagaatcttgacttgaaataatgtcactcgtgctcaaccttgccctcgggggctcggttcggtcagctaaaatcgccaaacggggcccagaaccgagccgtgccccggggcgtggtgaactccgggggggaatcggcaaaaacccacaattgggtcacccataaccctcggtcaccacgttcccggcctggccagtctcgacatgcggatctccccaggcactagccccgacccgcgcttttcgaggactgggacttgggcatgggcccttatttcaagctaagacgcaaaaagaccacggcacagatcatcctcatctcacatatagcaaaataaaactaacacaaaaattttttcatcatttctcattgcagattaagttaaattgtacaaaaaagaggcatgaaggccttagaagaaagaacaagaaaaaagttaagattggcgggggcctgggggctcattcaaatgcgcccgggtcgccggcctcgtcgccaccgtcgtcctcgccgctggcgtcgccctcctcgtcggagctgggggcgaacgcgagccgaggggccgagccctcgaagccgttgacgatgtggtcagcagcatccccgacgcgcgcgcgcgcgtcgtcctcggtcccgggagggaactcctccagcgccatccagggagagaaattggggtcccgggcctggtaactcgctagcacgagttcaaccgccccccgggcgaggtccctcgaggatgacttgatggtcttctcgagctcctcggggagtcgttcgaggacccaggccatcctgttgaggtgcggagcgaggccttccagattggtggggggcaccgtcgtctggcctctccagaggcctgcttgacgaccggcgcgcttcatgcgggagaccgcatcccaaagcatgtcgggcccaatctcgcccgccaagcgaagggcctcggcctccccggtggaggagtccagcgctcgctgcatttccgcgacggtgtgttcggcagctgcgaggcgggcggctaagtcgctttcgcccgcggccgccccgccgataggcgcccttgcgtccagctccttttcccgcgcctcgaggtcagcagcccgctgctccagtgtggctctctcggcgcggacgcattcgagattgcggcgcgcctgctcctcctgcgccgcctcgcgaagggacaggctgtccgccagccgtttggtcgtggcctcagcctcctcgagagctcgctcccactcagcgagtgcgtcctcgcggaggcggagcgcgcactcctcctcggcgcaggcggcctcatgcgccgccagcgtcgcctctcggagaccagcggcggcctcgcggtccgtcaagcccctctccacggcgccggcgtgttcttccagcgccatggcacgggcctcaagggcctcctcgcgccgctgaaacgccgcttcagtctccgttacccgccgctctcgggcagcggcggagtcaaggaccccttgggcggcgtcgagctttttcttcagctccgcctcccagcttgcgtgctgaaggcggagagtgtcttgcgcctcgatcatcgcggtggtggagatgagggcggccgcccgctcctcctccacctcacgggcgatctccgccagcgccgctttccgggcttcaagctccgagacatgacggcggtgagccttacggcccacctccaccatggcgtccaccgagcgccgcccctcctcaacacgcgcccatgcggcctcgagctccgctcgttctgcacgcagggcctccacttgggtgttgaacccatccagcactgcggtgtttgcggcggccagggcctgcagaaggggctcggcgctcagcggggcgacagaagatgaggagaagagccgccttggagaaaaggcgacgcggcttggccccccggaggatgcgctgggctcggggatgtcccccgggcccgtttggtcctgggcgtcgcccggtgaggtaggcccaggcgatgcgcccgcggcctcgtcgcgagccgcctcggaggatgtcgcctgagggccgcccaagggagtaggcccaagtgacgcgccagcagcagctgtcgcctcagcctggcgagcccgggcggcctcctcccgggcagcttcttcggcttggcgagcccgggcggcctcctcccgagcagcttcctccgcttggcgaacccgggcggcctcttcagcttcccgaaggcgggctgcggcttcacgccggtcagactctcgcctccgctcctctgcggccgctggatcttcggcctcggactggccggatttggggtggcgggaggaatgcgacgggacatcgctgaagcagaagaaaaaaccaaaagacgaacaaaatgagtaagaaaaaacttctctttgggagaaaggtggttgcaatgagagtgagacgaacctgcgagggggtcggttgaatgaccaccttggaggagaaatcaggttcccccggcatggttccgtctcccccgtcttgcggagccgtttcttcttgcgctccccctcgggctgcgacgtcggcgcggccccctccgggcgccgactgctggcacgcgccgccccgccccctcggggaggagatgggggaggtgttcctcccagcttcctcttcccctgggcgtcggcagggcggctgctccccgagcccccggcgcggggcccagaagcacgaccccctcctggggcagattgttcccctcggcggcgctcgcccgcgccgtcgtggcccttaggggctctctcctctgaggccccgacccccatcataatggttagaatggaggcgcggtcgggatcgctgcagagggggaggatctcctgaggaatgcgagacgcctccgcggagctaagattcagcaccctttggaccacgatcttgaagtcctcgggagcccaatcccatctggctccctggtgggtccgcatgtagtcttcaggcccagtgtactcccaggcgttccgggcgcgccgttggagcggcgcaatccggcgacggaggtaatcgccgtacaccatggccccggtgagcccctgggatcgcaggcccgccaggcggtcgaggacggcgtcgtagtcctcccccagatctaccggtgcccgccagctggagacctgcgccgggggctggcttggaagtcggaggcgcgcttcgttggcgaggggggtgtagaaccagtcgctcttccagtcgtcccacttcttgcgaaggacgcaggggatgtagcggttcaacaccggcccccgcggctggaagtagcagccgccaaccaccgacggcggtgacaccgactgcacggtgaagaaccaccggaacagctgaagagaggggcgcaccccgatgaacatctcgcacagatgcgcgaagatggccaatgtcatcaccgcattaggggtgaggtgcgccatctggaggtcatagaactccaggacatccatgaagaaatgagaaaatggcgggaccagcccagccatcgcaaaggggaggaagaagatggaccgccccgggtagtctggtgccgggcgcccctcgcccagcatcactatctcccgaccggtggcggactccggcatgaagcggcgcggcagtccggcgtgcctctcattcacgatgcgggaaggcggtagtacactgccgtcgagcagagcagagccccgtgccatggcggcggaggaagagatgattgagaacgagcgcgtgtggcgaaagtagggcgtagcagagaaagagttagagctcaggtggcgaaggcaagaggaacaatggcgaaaggaaggaagcaaatccttttctcgatgcttttatacccttgccatcgctgggcctgactcctcgtttctcgcgcccactacctcgctccctcgtatctcgctatctcgctccctcgtttcccgtgcccacgcttccactaatcccattcgcccgcttgcggcgcattgagtggatatgcggttgtggcaatcgaaatggattgtatcgtgcgcgcgttaattacgctcgccgaccgaagcggcgttaccatatctccgggcgagacaaatctgctcacccagattcgcgcgctgctcaagtggcgtggcagtcttgaatagaccgcccattatggacaaccaaagttaccaataccaatgtgcatggattgagaccgttgggtattttgcccaactacggagaccggtcccacctgtcaccaggctttaggggtggcgtcacacctgaccgcttcccttgggaagggaaattgctctggcataacgccgggggctactgtcggtgatatgggaccgggagtatcatgaccagaggcttgaggcagacgcaatcgcccacgtggcctggcaccttcggggacgtcgggcccgagggtgaggtgtccgccctcctcctgatttcccccgaggggggggggtctggttgcgcttgccccggccccgagggccgaggcaccccgaccccttaaggaagtctgcgccacatacatgggataagtgatcacagctgtgctcacctaacagcatttattgcagtctggtcaagcgtgtcacgctgcatgcaacgcagtacagcgcgtttctttatccggtctgtgaccagtcacagaccggtcagatcacgggttaggtggcgactggcggtctgacgcacgccttgccccatcccgtcaagacgaaagcctctaggcactcgtctcaagctggagctagcgtgttatctcttagagatggcacgttagccctggtcagatttataccaggcttcatcctaaccattacaggcaaggtgttacacgaagaagggcaaacatgcacgttgttaagctgacgcgtggtggacaagaatgaccggtctggcactggtcgcgtcagcaacgggcagccacgatcccacgttgcgcctgtctccgccgggagtggaggtaggtgtgggctgtcccatcggagtgtcattcggacagcaaccataccaatctccgtccataaagagaagaaaagtccagtttggaaagggaagggtgcatgtggtatccccttgaagtataaaaggaggaccttgcccatagagagggggggattcttttcgagatttagagcttagaacgggggatttttggtcctttcggaaggctgagaggaaaggaagtcgatcctttgtaacttgtccatacacaaatccacaaaaacacaggagtagggtattacgcttcgcagcggcccgaacctgtatacatcgtcgtgtctcgtgtgtcttgcgggcagacgatctttccagatacagagggagagcgagagcttgagatttcaccctaagcccccggccgaaccggcaaaggggggcctgcgcggtctcccggtgaggagccacgagctccgtcaccatcacatcaaaattttcctacacacataaacttttaacttttccgtcacatcattccaatttcaatcaaacttctaattttagcgtgaactaatcacaaccaaacacctgttttcttggtctttttttgataggaaaccatgcagggaaatacactgaccgacacatgtaggaaaggaaatttgtcaaatctatacctaataaaaaaattcttaaggcttccgtcattatttttggtccgtcgccgatttcccacacgcgcacggcggtttttttctgtccgtttttttttcgcgcggttttttttgtccgtcagggtttttttcgcacgcggttttctgtgggcccatccaccttttttttgcgcacacgctctttttagtgagtccgcctttttttcaatgcacgcgtttttttagctgtccgtctccagttcccgcatgcggtatttttgggcccattgcccaggaattacaaattcagtccagcacataaattacatagaacccaaacataagaattacatgaccgattaggatacaaacaacttctcaacctatatatagaataaaactgaaagcacaaacaagactaatatatgcacccagaatttggtgtggaactaagcaatctctgctcggcgctactcatatacccagatatttttttgaaactgagcaattcatgttcggtgtgagactcaatctgcttttactgcatttataacgataaaaggtaattctttagaccttaatgatgtatacattatttatgacatataacgaacaattaacataaatcagtcaatcttaagagggaaaaaatacatggaaataaaactaccaagctcagcaaggtaacaccagattgatcggatctcataccttatttaagaggcaaccatcttttattagtaattctgaagaaaaaaccatccatcttctattagctaaaaaaaaggggagtagctatatttatggcgccatatttttcaccaaaaaatagtcggtgtgtatttacatcgtaagtttataaattacatatgcaattttattgtatttacaatgtaagtcacaaacttacatatgtaagtctcaaaattacatatgtaagtctcgaaattgcatatatgtaattaatatataatcatctctcatcatgatgtatgtgtggaaataatcttcaacctcacggaagcacagttgggaggcctcaggcctgtgcggttgtgtggcatagcgcataggcatgcaaaccgactgtaatcaatggaattttatggtgccagaaatttagcaaatccaaaaaaaaattatcacaccaaactattaaccaaaataataccactattacttcattatatttttatttgctacacttatttctgatttcggatgtatagtctgccaaacaatttcccttaactacgcgcgcacacaaaagaagacctacgtataaagtttaaatgtttggcctatagcttggtgttttgtgtacataactgttgcttgagttcccctattacttcctagggccataacgtgaaaggtatttcaaatagcataagtaaagcataaaaaaaaacttaacagtatttgcatatagagaacacataaaagaatattatggaacattagtaaaacaaaacaataacgaataacttgcctagaaaatcaagtggaacctctatcgcatatcagaacaaaagtttctttagatcaagcatcatggcatagcaaactaagacatgaaatttttggtactacattggtacatgtcagaattgagtgtttccaaacagatgaccaatgaagcatgcacatcgcaaccaaaacagagcaggaaacaaccatgtgatcagatattacattggaagagaaaaaaaaattggttgcagtagtatggctgtagtttgcacaaaattgataactgaccttgctcaggcaagctatctcaacattgagatagaataatccccaccaaaagaattggtgtattaattgattccatcgaagtccaacacatatataaacacatcctgcggctcatttaaatgaacaaaatcagctgaaaaaacataagtgaatgattaaattatttttgcttctcaccgttgttttcgagaagatacatcatgcttttgttgttgataatgtttatgtacagcttcatcttccaagctagatgcgccatctggatcatcgtccccattcttagatcccaatacacgaagacagagacacaaagctgtatgcgcaaaatgcctgacgaaaagaaggaatacttaagaaacgtcatgacgcctataagcgaaaaaaggattcaaatgtccttccaaatgttaaggacgcacattgcattaattatgaaggtgatcagcaaagctcatcgcatgctaaatctaataaagttaaacaatatatgcttcaagtttttttactaacagataatttgacccctctaccagaccagtttcaccatcatatgtagtcacaatgtactcatgacttcagagagaagcaaaaaatcacttctaatttttaattttgtgatgaaaatatactatggatttaacgaataaattatatctataacttctagctcattacaaagaataactcattatataagaatgctgaccaggttagatcatactgtacttgcatcaaatacccagattattttctaaaaggaagataactttgagttaggataaaactaaaacacattacattttggaacggtgggagtatcagagtgaaaatgtaatgctgagaatcacaaaaaataatacttgaaacaaataaatgacagtggattcaactctcaatttagtttaagcaaaggaaaatatgtaacatgggatgtaaatgatattataaacaacataaaagcatgatcacaaaactgttgtccagcaattccacatttcaaaacacaagctcagataagaaccgtattctaatttctaagcaaccggattactactatacaagatgatcccaaaatttcacatcaacaacatgatatattgtcttaaaaaataaagcacctgggaggcagtggctggaactgacggcgagtcaaggacgtcggtcgttggcaagcacggcgcgggccaactctcctcgaactcagccggccgcagcctggcctcgaaagaaattcagtataatgcggacattgtttctcccgtaaggcttgcctatcagcatagctccagtgagccggatgatgtttctgaagatctgaagaaatgtagattaatacacaactagattatctgcagtgtatgtagcttggacactatgactacataaggagtgttgtcaaacacggttctccaccagaagaagcagagacaaatctgatgagctaatggaatgtggtgaaccccataaggacttaaaaagaagttgcatcctcaaatgcgatgtgcttagcaaccaacaccgggtcccctgacttatcggtgaaagcacaaaccaaaagatagcaccaagtatcctggatagaagagaaaatcaaaagaggatgcagaggaaagtgtctggatgattgggttgaggactcacattggcgtcgttggactggtagatggtgacctcctcctacggcggcgctgtcagatcgagatggatgaggaacgcgccagcgccatcagtcgctaggataagggatgccggatccagatgctcgacggaggtcttggcgaccacctctcgccaccttcgcctccatctcatcgaccgcccacttcttcattcttcacccaccggaccatgcgcctccccttcatatcccttcctctagcgcctcccaccgccgccgccgccgccccttatcgcagccatcgaagacggcgtgggggagaaggaggcagcaggggcgggggcggcgtaggggccgcgcgtgcagaggcggcggcggtagggaggccacgaccacggtagaaccgccggatcttgaccctcccgttaacaccggcggcggatctgcgtgagcggggcacggagagacaacgggatctgagcgggagaggaacaggtcgccggatccaacccctcccgtcgcagctgatgacggatctgtgcgagaggggaccggaaagacgccgcatcgaattcgccgtcgccgtcccctagcatccgcgccgcccatacacccatcttaccgatctgcgttgccaggccagttagccgccaccagaattgccgtctccgaccccgatctacacctggacgccccccctccttgcccccgtcagccggcttgaagagtaacgagagagagagagtgggagagagagagaacgagagagtgagagtgagaggataaggatctctaaatttctctccaaggtaatgtacaacaaccatctttcttttcttttcttgaaaaaaattacggtcaaattgtgctaatccatggattcaaattgtacaacaaccatctttcttttcttttcttgaaaaaaattacggtcaaattacggtcaaaaagaaaaagggaagaacatgctcgcgaagctccggcccctcatggcgacggcggcggcggcggcggcggcggcggcgaagccagctccggctttgtcgttttccacggcggcggcggagggagacgaacacgcgcactacaaccacaccgacgcgtgccaccacctccggtggacagccaagtaacggctcccccccatcacttcctccatcgtctagggcttatctgcggcttggggcttgattggtagtaactgttttggttttggttgggcactgcggctgcggcagggagagctacgagtacatgtacgcgcggccgtggagcagggtggtcgacttctacgccgagctcgtgcgcaccggcgccggggcagcggggctcgccgatttgtttgggaaggatgaggtgagaaggaatgatattattattttttaaataattatccatgtgaaaccctgaggtagtggttcttcgcattcggtaaattggaaggggaaaatgtgttagtgttagttgcaattcctcttagtgtgccaaatgttggtactttccccatctaagtagtacacattgttttagagaaattgaaatcttttgggtgaagacatttttttcttggaggatagattaagattttggaatttgtcggtgcaggcctgtttctagaattatccatgtgaaaccctgaggtagtggttcttcgcattcagtaaatgggaaggggaaaatgtgttagtattagttgcaatttctcttagtgagccaaatgttggtattttccccatctaagtagtacacatcgttttagagaaattgaaatcttttgggtgaacacattttttcttggaggatagagtagattttggaatttgtcggtgcaggtccgtttctagtacttttagtttgtttcagtaagatttatcggatttttcttcaacagaatggttacagccttgatacgaatggagaagattacacagcaccatcagaaaatcaaacatcaactaaatcatccaaagatcgaggaggacgatgggaaagagtaaccttcaagattgtcctttcatatcatggggggtcatttgatggttggcagaagcagcctggcctcaacactgttcaagggtaaggataaataagaatggagttatgtcatttctatagacatatctggcacttttattcttcacttcctttgcatctcaagacagatgacaggataaaaccatttgttgcactctgtatttcttgcaggttagtagaaaaacatcttggccagtttgttgacgagaagaaagctaaacagcttgaagcaagatcattgccattagaaggctgtgctgttgttgctgggcgcacagacaaaggggtgactgcccttcagcaagtttgctcattttgttagttgcacctgagaacacactattgttttccagtggtccttcaactaattatccacttttatgaacatgtcatattacaaactattccctttgttccaaaatttagctacctttccacctctcaaccaatcgcaccaatccccatttagtttctccacctacttcctcatctcaaccaatcacaacatccatcatgtttacctttttctttaatatctgtggccaactctaaaataccttatattttgggatggagggtctacttctcaagaagagcttatgtgcagttattttgtagagtttttttttttttggttgaaaattttgctttgtttacagaagcatttgaacaagtaatttgcttctgattataaaatcattaacacaacaatttgtcaataccaaatacaccactgttttcctatcaaagaagtaatagcctggagatatagcagtgcagaactctggcctacgtgcaatgaactgctaaccttcttatttgactaactccaccaatgcatgccattcatttcatttgatatgacatgaagaactcatttgcacaaataaatagacaatccttgtgtacttatgtgagaaattaactctaatggaatgctgagatacaccatgggactagatacattacttctcctgatagctgacatgtgtatttacttctaatttccttagatacatggaggaaggatgtaaagtctagtgatataaaggatgcaataaacaaggctgcacctgataaactaagacctttgcatgtgtcacaggtatttttcttttgctttttcagaatatatgactgcacttgatatgtatgctgcattgctgctagtggtagaattgtccatttttcatgtaaagttcttagaatgtcaagacatccaccatgggtgatgctacgcttgttattaactgatggcataatttgcaggtctcacgtgaatttcaccctaattttgcagccaaatggaggagatacctgtatatatttcctcttgacgaggatgtaaaactaatctcaggggaagaacagtccgctaaaacagtagagggtcctgagtgcaacataaaacctc

SEQ ID NO: 15158 - DNA, 4597 bp, Oryza sativa
gaggaccttgcccatagagaggggggggattcttttcgagatttagagcttagaacgggggatttttggtcctttcggaaggctgagaggaaaggaagtcgatcctttgtaacttgtccatacacaaatccacaaaaacacaggagtagggtattacgcttcgcagcggcccgaacctgtatacatcgtcgtgtctcgtgtgtcttgcgggcagacgatctttccagatacagagggagagcgagagcttgagatttcaccctaagcccccggccgaaccggcaaaggggggcctgcgcggtctcccggtgaggagccacgagctccgtcatctggcgcgccaggtagggggctcagcgtgtgttttctgagctctcagactcttccgtgtgcgccaagtttttcttgttcagcctaatggccgagcagggaaaagcgcacgacctctctccgagtgtgagcggcgacgacggggagccgaatccacgccgtcgagctcgtactcccccacctcctccgcgccaaagccctaagcagggggaggcgcttgagagggtcgacaaatccgtggcatcaccagtcgcaggtgatgcaggagaacggcgagatggggagcgtcgcctcctcgtctacggcgacggcagcacgcctcagggtgcgcttcaggctgctggcgcgctcctacgacacccgcctgtcgtccatgacccggagtctccagcccaacgatggctggaagacgtggccaacttggtcatgacggcacagcagcgcctgggtgctggtggacggtccgccaccaccaagacctccggcgccgctaccaccggctccgtgtcatcaaggcggagggcgcggcgagcggcggcggctgcacgtcattcggctgccactccctcgtcgacaccgtcgactcgggaggatcagcatggggagccggatgcccgcctcaacatcgagcgcaggcgtaatagccggcgtactccccgtgcaacggagggcgcctcctcgtccagaatgtcacctcgacacggacgtgaagatcagccctccgtgcccccggccggtggtgttggctgtagagcctttgtggcgagtcttcggaatgtccgttggcccccaaggttccggcccaccatcaccgagaagtacgatgggagcgtcaaccccaccgagtttctccaggtctatacgaccgggatcgaggccgctgggggtgacgacagggtcatggcgaacttctttcccatggccctaaaaggacaggcgcggggttggctaatgaacctgccacccgcgtcggtccactcctgggaagatttgtgccaacagttcaccatgaacttccaaggcacatatccgcgcccaggcgaagaagcggacttgcatgcagtacagcgaggcgatgatgagtcgcttcgctcgtacattcagcggttttgccaagtccgcaatactataccatgcatccctgcacacgcggtgatctacgcgttcagggggggtgtgcggcacaaccgcatgctcgaaaagattgcctccaaagagccccagactaccgcagagctttttcagctcgcggaccgagtggctcgtaaggaggaggcctggacctggaacccctccggttccggtgtggcagcttcggccgcccccggatccgccgctcagacagggcggcgtgacaggaggaggaagaaaaggtcggcccattccggcgacgaggggcacgtcctcgccgtcgagggcgctccgcgggccacccgaaaggggaggcctgcgagcgacaaaaagaaagaggctggtactcccaaccgggagcgcccagccagcaagtggtgctccgtccacaacacctccctccacgatctcgcggactgtcgtgcagtcaaaaatttggctgagcgaacgaggaagtgggaggaggacaggaggcaggaacgccgtgagggcaagtccgcggcagttccctccggtagacggcgaagtgaggccagacagaaggcccccgccgttgaccccgatgacggtgatgatgacctaggtttccaagaacctggggccaccattgccactgtcgacgggggagcgtgtgctcacgtttctcgccggagcttcaaggctatgaagcgagagcttctagccgcggcccctactcatgaggcgacgcgtcgggcgcggtggtcggaggtggccctcacctttgatcagaccgaccacccaccgtgcgttgcccggggagggcagattgcgatggtggtttcccccactatctgcaacgtgaagttggggcgtgtcctcatagatggaggagcggctctcaacatcctttcccccacggcctttgatgctatcaaggccccggggatggtgctccagccgtctcaaccgatcatcggtgtgacgccggggcacacatggccgttaggtcacatcgacctaccggtcacctttggtggatcagccaacttccgcacggagcgggtgaacttcgatgtggcggacctcagtctgccctacaacgcggtcctggggagacccgcgttggtgaagttcatggcggcggtccactacgcctacctccagatgaagatgccgggccccgggggccccatctctgtccgtggcgaccttaaagtcgcgctcgcttgcatggagcagcgcgcggaccacctcgctgctgcgaccaagcccgagggtggtgacgagaggcttggcacctccgcccccaccgccccgaggcagcggattgccacatgcgacgaggtcccggtcaaggaggttgccttgggcgacggcccatccaagaccacacggattggtggtcttctggatggcaaataggaagacgcgctcgtctccttcctgcgggcaaacgctgacgtcttcgcatggagaccagcggacatgcccggggtccccagggaggtgattgagcaccgtctcgccgtgcggccgggcgcaaggccggtccggcagaaagtgcggcggcaggccccggaacgtcaagccttcatccgcgaggaggtggcgagacttctggaggccggattcatccgtgaagtcatccatccggagtggctggcgaacccggtggtcgttcccaaggcgaacggcaagcttcggatgtgcatcgactacaccgaccttaacaaggcatgtcctaaggatccttaccccctgcctcgcatagatcagatcgtcgactccactgcggggtgcgaccttttgtgttttctagatgcatactctggttaccatcagattcgcatggctagggaggatgaggagaaaactgcgttcattacccccgtaggaacctattgttatacatcaatgcccttcgggttaaagaatgcaggtcctacttttcaacgtactactcgaatttctttgggtagccaaataggacgtaatgttgaggcttatgttgatgacttggttgtaaaaacgcgcaaccaagaaactttactttcagatctagcggaaacttttgagaacctccgctccgcccgcataaagctgaaccctgataagtgtgtgtttggtgtacctgcgggcaagcttctcgggttcttggtctctgcccgaggcattgaggccaaccccgagaagattcgagctatcgagcggatgcgcccccccagcaaacttagggatgtgcaatgcgtcaccggttgcatggccgccctaagtcgtttcatatcaaggctgggagagaaggcgctacccttgtttaagctcctcaagcgctccgggccgttcacttggacggaggaagctgaacatgcccttactcagttaaaggcgtatcttagctctcccccggttctagtcgccccggagccaaatgagtccctgttactttacttagcagcgaccccccaagtagttagtgcagcgttggttgtggagcgcgatgaggacaatcctcattctgcgcacccccactctgtgccgacttggcccgggagcaggcagggaggagaggcccccgagtcgaacggtggcctaaggcccccgacgaccggagtcggccctctgcccgcttgtcagacggtgctgggtgcccccgaccctcaggaaggccccgaggccactgagggaaggccgcacttatcgccctttggccccgaggctaaccctgtgctgactcgacccgggagagagcagggagaagaggcccccgagccgaaaggaggcctgaggcccctgacgaccggagctggccccttgcccgcttgtccgatgacgccaggagcccccgacccccaggacggccccgaggccactgtgggaaggccgctcctgtcgtcctccgaccccgaggtcatcggcacagaagacgagtgcaccccgagaggccacttggatgaagaacgccccggggatacggcccctagcgaaggggatcggccccgccgaaaggtgcagcggcccgtctactttgttagtgaggccctccgggacgccaagacccgataccctcaggcccagaagatgctttacgctattctgatggcctcgaggaaactgcgccattatttccaggcgcatcgggtcactgtggttacgtcttaccccctcgggcaaatct

SEQ ID NO: 15159 - DNA, 3277 bp, Oryza sativa
cttacattgtgaaacggaggaagtatttaatttaccggccgtatcatcaagttggccagttgattttgtctgagttgaactgtttagttgattctacaatctgcatgcacatgctaactacgctactagtgaaaaaagaagaaacgattttcttgctgcatggcttgctcacctttgattgatctattgagagaacatgtatttttccatgctaaaggacacttttgttgatttatcttcttgctcgtatgataattgataacaggggtttgccttaatatgccatggtctactcgaatgaagattgctctaggtgctgcaagggggctggaatatcttcacggagctgagagatcaattatatatcgagatttcaaaacatcaaacatcttgttagatgcggtttgtacttcatctactatctgaatactttgatatcattaccctttttcaatcacttgttataggaattccatctcatcaggctctagcaactttgttctttccaacccagacaagattccatttcctacattgttctgaactcttggaatgacagaactaacagttaaccggataacttagcctacatgctagccataaggcccataactgtctttacagaatccaagattctgaagtagtgatagaatagtgtgcttgccctccaaaccgtcatggtggtttcagttgctgccagcatggtcaaagctactaaatcttctgatgaatgaatgattcaattctttcagcagtaagattctaaacatcagcgatctcaataacgtaccagtttggatctggtcccgcttgctcttcaacacagtcctgtttaccactgatatttcgactgaaatctttttaatattctcaatttattagtgtgacacagcaaaaagtatgtaaggacgattacaaatgaaacacttgatcaatcatttatttgtccctggtcctcctccatggttccactttaaatagtagatattatgtgtgccctcatccatccaattaaaccatgcaactctgcacaaggaatactgatctaaatatcttatttcagatcttgggatgttatatgttgacgattatcttatgatactgccgcagtctcactctgtgtcacctctgcaggattataatgccaagctgtcagactttggcctagcacgaactggacctagtggagaccaaacccatgtatcaactcgggtcatgggtacttatggctatgcagctcctgaatatgtcatgacaggtgagcaatggaatctccctgtatttttagaatgccaacccgttcattcttgagtgcatttaatgttcttaagtatgaatatgcatatcattgtagctgacatcatgtatgttaaattgttactctaaccagtttgatctgttacaggccatctgacagcacgaagtgatgtctatggctttggtgtcgtccttctcgagatgatcataggcaggagggctgtggacaagagccggcctagccgtgagcacaacctagttgagtgggcacgtcccctcctcgtgcacaatcggaagctgttcaggattatcgatccaagaatggaagggcagtactccaccaaggctgccattgaggtggcaggccttgcgtaccgatgcttgagccagaatcccaaaggacgacccaccatgagccaggttgttgagacctttgaggctgtgcaaaacatgcctgaatgccaagacatactcttgcagaactgcatgacgggtgcagtgacactctacgaggttgcaaaggaccctacggagagcgtcgagccggagaagataaaacaagaacaaccagcagcaaaaacggtcaccgtggcaccggcaccggtaaatggaaaacccgtgcctcagagcaggagaacacggccagggaatggccggagcaagagcgagccgtctttggaatgcaagctgtacatcccatctccagactctgatggccagcagccaggcctggaggcattgtcatccccttccagagatggaagcataaaggatccaccggacgaggatttgtacaagatataaaagtcacacagaagttttttatgacgattcaagttttcgctaccggcgatttcgcattgccatccatccatcttgttgtcaagatcgatcagagtcaaagttggtgttaaaattttttctgatggcggaagaactctacctcgttaggtttcttgctgttccgactagcaattgtatgtagagaggagcgttgtggaaagcatttgtaatgtgagatgcctgccgcgacgaaaagttcgtgttgtaaacttgaaaccattctctgggaagaggaagatccacatcataatcgatgtgtcagtgttgttgttgctcgagtgtttttgacttttctgtatagatgatgatgtccttgcaaacttggtacagttctacaggaaatcaacaagaagatggaaaaatataagatgaatcagtgtccgtttgttgacagtttgtttttggagtatggttttgttttcactgcccatctggaaattattaggaatgtgagatacaagagtatgcttgaatgacacatcactatcgaggatatatcatctaccactgaaacaataagtaaatgtaaatgcgagcatcccctagtgagttaattccactaaaaaaagaatctaacgaatataaccagttgaggtagctcactttacatctatttattatattataataaggatagttaaaaaaaaaaatcactacattgacggcctataaattatcacatagaataaaattttattacacaaaatatgaaaatagaagctaagaattgtataactccaatgcaacttaaattccttaaatttttactgagactatttggtagggtaatgttgctgcggcgcagctgcagtcacgaaaccttcattgttagcttctaactgcaaccacacgtaattaaagtaaaaaagaaaactgaacaaacactgattcaagcctcttagttttacgagtactactaaatacactgtaggttaagacctaagaaaaaaataatttgaagttgtataagaacccagactttcacttcaatgggctggtttagtttccaactttttcttcaaactttcaacttttccatctgtcggtgatatgggaccgggagtatcatgaccagaggcttgaggcagacgcaatcgcccacgtggcctggcaccttcggggacgtcgggcccgagggctgaggtgtccgccctcctcctgatttcccccgaggggg

SEQ ID NO: 15160 - DNA, 3285 bp, Oryza sativa
tcatgggatctaaacaaaccctaattttagccagacgtgtcacgtatatgatatttccttggctaattaaatttaagcatttgaaacaatctgtcaaaaacataaacatgcgcatatttgaatcaatcacataaagaaaaaaatgagtaaaattaagtgaaaaatatgatgctatatttttaccaaataaactcatatggccatatatcacttaataaccaattaaccatgatgccatcagtcaaaaaaagaaaaaaaaaccatcctaactaaaacccaaactaaaccactgtcacggccaaatcctcttttcaaccatgcagcacattaatcaaacccccataaactccaagcctctccaatccaaccataaagcaacaagagagaaaagaaaaagaaaggaaaaaaaaaaccaagcctcagctcagctccccagttgcttcccctgctgcatttattaatccaaagcagcttccttttactctcgcttccctctggcacagctaatccaaatcctcctctttttcttgttttttttttctttcttcgtcttctccaacgcccaaagtaaaacaaaggaaaaaagaaaagccgcatccaagaacgcaccagaaatttcggcgacggttgcgcgcgaatccatccatccaccggcggtcggagggcggcggcggcggagcaattccgcccaaccaagcggcggagtcggtgcgggcgaaatttccgggttggtgcgcggggcttgggttggtggtggtggactggtggtggtgtgtgttcttgggagtggatctggcaggaggctggcgatggggaggcgggagtagggggagcggcggattggagtgggaggcgcggtgttgggggctcccatgggcggatgcttctcgctggaggagcaccggctccagggcaagacaggttcgtccgtgttctttcttgcctcgagctatatatatcttacttagtctctgatgtgtgtttttgcttgtagtagtagtagtagctgtgtgcatgttgcatggaagtgaagtttttgttgtaatttggttgtgaatttagtcgtgcggttgggtttttgggcgtattgggggctatggattttcagcgtatattcagcttcagaagatttggtttttgagcgagaattgctgtctcgtttatgtcagagttccgacaggatcaattttgtctctggggctatatcatgtagtaactcgtgttgcaaattcgggttttttaggcatcgcgtggttgatgtttgattcttctgtgactgagtgtcgagtgtgaggaatgccattctctaagtgctaaaagttttatcttattggacatcgttacattcaggcctctatctgtagcttagtttctcttttttctttgacaaagacgaaacttgcatggtacaaactttgctctttgatggctggtagaggacacgatattatgatgtactggtatgttgtctatgaaatttgcagtcacggttcctgaaaagtcaaactgcagcaagtcaaatttagctcataacttggtttgaactacattggcaaagctgctagaagattttaagttggttggatggaagtatcgagtaaccctataacttagatgcaaatggtctgttctgcatagaagattcttgttcagagactggaagagatgacaaatgttgtcctgcatataggaccatgagcagcaaatgcgtgtttggagctattctagaattttattgagataccaaattaaattgggaccttcctttgtcatgtcatggcctttagctgcacattaacctgccacttgaacgtggaggatgatcaatgaatacttttgttgctgtagagctattgcaaaatgacattgtagcttgacacaatggaacacatgtttcttaagttagaagatgaacaccattttgggtaggttagtggtatttacaaactaagatgttatgcttatcagattatcattttgacataatgcacaacaacattacagagactgcacagcaggagctgtatggggggtgttatatgaattaaaaaactaaagtactaaggcaaaataatcacgccacattgtagctcttaatgttcgtatgtaattgattattccctgatgttttttcttttctattaattctataagcagaagctggtgggccagatgggttaaggaaatgcaaatctgattctaaagctacagcaagtgtccttgcccctccaaaagatgtggaggacctgcaaatcgaaggatacggaaatgttaatattttcacatataatgaactaagagcagccacaaaaaacttccggcctgaccaaattcttggagagggtgggtttggtgttgtttacaaaggtgtaattgatgaaaatgttagagcgggctttccatccacacaagttgctgtgaaagaattaaacccagagggatttcagggtgacaaggaatggttggtaagtatccttgctttatttcattttttttgaaaccatgatgaactatacacaagtctatcagccttcatcagctaattagattttacgattcaatttaatgatcataatagttgtttgttattgtagtttctatattacctgacttatttacattttatgattttaagcaaggacattgaaagagtacttttatactgattagtgtttgattaaacagcatatatcagatacttatagttttattatttgtttccaggcagaagtcaactaccttgggcaacttagccatccaaatctagtcgaactgattgggtattgctgtgaaggctctcatagactgcttgtttacgagtacatggcttgcggcagccttgaaaagcatctttttcgccgtaagctgaccctttccttcttgacagttatcactcccacctactgaatggccgttgtccatggcagcagaacctgcaacatgtttattgtttttgcattttcaaaagtaaaaaggaaaatggtcagtttggtgcacgctgcatgaacaaaaacactaatttattttcaacaagatgagcagatctatcagtagaattaatataaatgcattcacacttatatttctttcagtgctcgatttactggtgcaatttaatctaatgagtagtgaccactatatacaatttagttgtatctgtgtacccgttccctccatgtaattttcaaaaataaaggattttcttttgaaacgataatggttagcatatgttttgaagttctcccaagtcccaactagctactccctccgtttcacaatgtaagt

SEQ ID NO: 15161 - DNA, 8852 bp, Oryza sativa
ggatccccctattttcatgtctggtccatatcctccataaacggaacatcacaaatttttattatttgtaatttaaaaaaaaagtacagaaaacatggaaatgcataactactttttgagaggtctgcatgtcctgcaccagcgaaacaatcggaactaccaagtttgcatctatttataggaattgtattagacttgctcgacgaaaaagccggccaacgatctctatgctgcatcatgcgtccatgcctggttttctttgccccctgccaccataaatacgcacccaactacaacatggatcaccaaacacctcgatccatccctctacccttcaagaaacaagaaagataacaccaacaaactagctagctcgccaatggcctcgttgtcctccttccggctctctgtggcagtggcggcattgttggtcgtcggctcgtgcgccactgaggtcaccttcaaggtcggtgagggttctagcggaaaaagtctagagctcgtcaccaacgtcgccatctctgaggtggagatcaaggagaagggcggcaaggactgggtggcactcaaggagtcatcgactaacacctggtcgctcaagagtgaggcggcgctcaagggccccttctccgttcgcttccttgtcaagaacggcggctaccgtgtcgtcgacgacgtcatccccgaaagctttacggccggctctgaatacaagagtggtatcaacgtctaattaatagacatgagtattcttgcattgggttgcatgataattattaacctctaaataattttgtcttgaaagagatcatgctatgcgtgagcaagcaaacaattaatttcttgtggttattttgttgtaataagccagtggcaaaataaggcatacatgtgtccttccaaaacattgttgtggagctatatgtgaacacgatttcaaatatatgctgtttatagtggatgtatggaaaaatgttatatttggttagctttcattaagacgattgtgtgtatttgatttctcaaaattttagtacatatatatgtccaaatcaatgtagcccatttctcccttttagcttgtcataaatattgtttacagttgtttttttaaaaattttgtggaacaaattgttgaatcgatcacaccgtgacatgaaactataagtataaagaatcagtacatcgtttagcttattcagatgctaaaacaaaatgtaagtcacattaactaatcatatcttctggacccccgtttttataacaggaatcattcgtgtaaacagtaccatttccctggatcaagtagtctggtacacacgagttcatagctgaaataccaaaagcacatacacgagagtctagtgctaattattacatcataagcccgcaggcattgtcttaaatcatcggaccgagcagttcggaatacatccaaaatgcagaaatagataaggcagcggaattcaggcgcagcggcatgccattgccacaggcaacgaccgtactaagacctactgagcgccatcgtcttcatctccctcctggtagtaggcatagggatcctccaaagctttatctcctgcttctgattaattttatatttgcaagggtgagtaccaaccgtactcagcaagccaccacaacaacaatgcatatgaaaaggggtatttcaaaggatggctatggctcttttgcgctaagccagttttgtaattcttttcacaaacctaagacctagcatagactgatcaagttttaataccagtgttcacattaaacaacgacggttctgtccaccatccattgtgatcccaaggatagcttcccgccattgagtcgtcatggttttctgaggacgtccaccttccctcctctcaggaagtggctccatcagcataaaaaatcatcatgcaatatcccatcccacacaggttaagaatttagagtctagccaagtgtaatacatgtcccggtgctcaataaccgcgagcacggctattcgaatagatttggtttactcacactgcagtggatgtacactttacccgcactccgcgactgcccaacacatgagcctcgtcccaacacatgagacgcgtcacggcaaagcttttcgataacctcgcattggcagtacccgctccatgaacttaaatcctcatgcactctaggcgtccatgtttctagtagtgagaggagttctggcgctcccaggaaagagaagtctcacacacatattaaattatggttcaagttaagttctctctctcacatactcatggcagtcctaccaatggcgacaccgatgtagggcacgcttctcggccctacctcaacggctgtcccatcgtagcgcacctgcctcactcaggggtgaaccatctatgcagggatactgcctccgctcggctatctaatccgctaggtctatacccattcgagaagtacagttgtacgggggtcgtttcatgcttaacttcatggctcggtccttaattgactggggacggtactagccttttccagataccacccaaatcatccgtccgccccagtcgaaaacagttgttttcgctttattttcctttcacaaatcatgttatcaatttcatggcaatgtggcgctcatgtctccacataccgcatctcaattaccttcccaaaggtaattgcccaagcatttagcatttgataaatatgagtatgcatgatcctagaatagcatttctaagcaattgtcataattgactagggactcatacgtaaacatggttacgaaggaataagggataaacaataatcaaggcatggcataatcacaagtaggatgttcatcattgcatgcaattttatttataaacaaaataatttcgcaattgggatcaacatgttcaaggaatagtgatgacttgccttgctcaaggtcttgggggtcttggccttcacttggatccgcaactccctcgggctctatagttacgtgcgaaaactgatttggattcgattagaattcaaataaaaaatccaaataaatccaaatggaagtcgaacgcgaaagtcgattcctttattttaactttattattcgcgaactaaggcaaacccaatttcgattcaaactattttgcgggtataaatgttttgttgtcataagtttttaatttaatctacccgagcattatatccatataataggttagagatttctatcgcgagctaaatatcggacgaaatcctagaaatattatatgatttaatttagtctatgactaaatgattaaatataatatacggctaaaatccctagtaaataaatccgaatttctaccgtgaatcgattacttatagagattacccaaaataatctataatagtctataagaattcatctaatcgtttagttcctaattacagttaaactactaccgcgaattgatttcttgtagaaattaccaagaataatctataatttatattaaattttgcaattctatgaccataattaatctataattaaattctaattattttagattttcttaaactattaacctccttaatttcttcctaattttctatttatttttccttttctttttctccattctctcttctctttttctttctttttctttcttttctctctctctctttttctttcttttctctctttctctctttttctctctgccggcctctcttttcctctccctctctctcttggctctctcccaccagagcggcggcggcggtggacacgagggggaaggagggcggctcaccggcggcagcagcggtgacgacggcggcagcgacggtggcgcacggcggcgcgggagcggcggcacggcggcacgggaacggcgccgcggcggcacgggaacggcggcgtggcagcacacgggaacggcggcgcgacggcacgagagcggcggcgcggcggcacgagagcggcggcgcggcggcacgagagtggcggcgcagtggagagggaagaggggaggaagggtgagatggggtgggggaaaatggagagagggggggtatttgtagagaggggagaaggagagggggaggggcggcggcgtaatggcgacgcgacggcggcgctcggggcgggacgacggtgacgcgcgggcggcgacgcgatggcggcgcggggctcggagcggcgatgcgacgggcgacggtgcggggctcgagacgggcgacgcgacgggtggcgtggggctcgatgcggcgatggtgacggcgcgcggcgatgggacggcgacgcggcgggtggcgagcgagcggcgtgacaggcagggcgacgcgacgcgcgcggcggcacggggctcagcgcgatggaatgggcggcgcggcagcgacgcagggtgacggcgaggggacggccgcgcggcggggcgcaggcgcgaggggacgggcgcgcggcggcacaaggcgcgaggccgacggcgacgcgacggtgacggcgcggcagcggcggcggcgcgcgcgacgggcgggcgacgcggcacacgcggcagggaagggggcggggccagggggaccacgatcgaacacctatgccgcaatgaacagtaacttttcctatttatcccgattttagcccattttctatttaaatatagtcctataaattctaacttttgcataaatgaagtttactccatatttgtgttatactaactaaaaattcaccctaatttaatatcactcatatttattttatataatttatttgaatttttattagggttaattctcattccatcgtactaaaatttaattattgctaatatggtcgcgataatattttatatatttccaatcccacctaatatttattttaatttatattttaattatttatttagccaacttgatttttagggtttattcctagttagttattcattatccgcgattaataaattccgagatcaaaatccaatgaaataggcgaataaaatcggcatgatgcaatttattacttaaaaagtttttgaaaatctgtatttttggtgttttgatttcgttggtcgaattttcagggtgttacatatctccaacatgaataagtggtaatggatagaatggaagcgaagccagctttgagaggtgctaagttaagcttcatttcatatagttggccaaggccccaagctatagtcatcaacaaagtttatataatactacgagaataccaacctattgcaaaggatataaaataaatacgcaattagttccaaactttaaatagaaaaaagaagcttacactgtcagtgtgttacaaaggatctagaaaatataccattagttccaaactataaatgtaagaaataataaatccttaaggcctagaagtatagcggtggtttacagtccctcgtccatcttaagctcaacctgactcccatgccctctcgagcgattctcgcacgcatgatgtccccttccctgcgcgaatggaagcacacccctgacccccaccacccgatcaaaatcaatccaccatccttcaccgacgctttctgcggagattatgagtaccgcatacccacacggctgggctatccgactggttacaggggatagatcatgtatatagaatatgtaataaagtaggactcggtcgctatgttgccttgtattccaaggcagggtataaagccccaatcgggtactaccatgtactccctctatcccaaaatataagcatttttagcatagtgacaagtcaaacatttttaactttgaccattaataacaaaacaataaaaacgatcaatcatgtaaagttgatgttattagatttatcattaaacaaactatcataatatacaactctttttatttaaaacatcttacttctatagatattgttagtcaaagtagcatctcgaagaccgtgtcagggtccaaaaatgcttatattttgggatggagggagtaatagattaggatactgataacgtgtccggctaggtttttcctttgtaaccctgccccccaacctatataaggcgggcaaggagccccctccaaggggcatgggcagagattcacaatccgatcgtcagatcaatactacaacccgacgaattcaaatccctaaataggagtagggtattacctctcattgagagggcctgaacctttttaaattcttgtctccgcatccatccacttttaggtctcgtgcgctaccccctttataatgccgaattctagttcttcccgtggaccttctttcatgtgtagctctcacgctgcatggacataacaatatatgcacttgctaattaaaaatcaattgaatttaaactatagtcttgttttagaaaaaaaaaagttagaaaaaaagtatgttatctctcatttttcgtcggtgagatactggtacataaaagactagtagcctacgcagacagcagcaacaccagccctacaaagtacgaattgaatctttcggttcccgtgaataagaattgttaagtagcatctacactaaaacctgtatcattgtaggattattctcattatgtccacgtgctcctccccacctatgcctcatcgagtcgtcatcttgtatctctgtcaaatgtattacatcgactgacgcaccgctcgatattcagctaggtgtgctctaccatattaattagcaccaaccccatttcactatagacgctaacctatgtcccatgtcacatagccgcaacaggccatcacgtgagcccctccatcactgccacggtggcgttaacatcgagtcgttgatggcccctctaccacatatactatgtgtgccacagtgtgcccctctgtgccatacgattactcctgattgttagctttaccacccctttgtcttccactagcatctttgatcctaatttgttcatgcgttggttcacatcctccataaacagaacatgagaaggtgattaatttgttggttgtaagtttttaaaaaatagagaagagatagaactacataggtgctttttgagaggtctacatgcccttcgtcagcgaaacaatcagaactatccagtttgcatttatttatagcaattgtataagagttcctcgataaataaactgttagttccaaagtttaaaagtaaaacaactaataaatctttaaatttaaatgtagtagtacgttttttttttacaaggcagacgtgaaatgctcgatcaaggtctccgatgtaaaatcggcggcgccggttcggcgctgggttggcgctttggcaggtggcgtacgtcgtcgtgcgaggcagaacgagcgcgcgtggcgagacgaggcgaggaggaggggtcggcacgcgggggaccgggagaagaagggcgagagacaaaccgcgtgcgcgcgcgcgtggtggtggagtggatggcgacctcttttttgggcgttttccgccccgaaaatcctccgttcccgcgtcctcaccaaagtacaactccagattggtttcgtatctatctactctaccaccgcaattaccagtattttctaagatttcgagttattgcaatgatgatgatgaagctgtcacacttgtaataacaagttgtgtactcctgctggagttagtgggcagaggatgtgattggaaggcgtacagaaatggattccgctaagcacaaacaaaaccgagtggagaaacgggggtggtggcgagcactttgacacggtggttgattgattcatgccatgctgccgcccactcaaaagcatcccctctcctcgctaatgccatttcttaaatcattccatggaaccttccaaacctggatctcgcaactttgggcaaccacaaaacaactcgttcccaaagcatagcaaatgcaatgctactccctccgttccatttgaagtgcatctacaaatttccgtgtctaacgtttaaccatccatcttatttattttttttataattaatatttttgttgctatttgatgataaaacatgaataatattttatgcataacttattatctttatttttttaataattttttaaaataagatatacggtcactgcatttaaaatggttcggggagtactagtagtactacaatacagatggctctgctcccatgtggacgtacgcctcgcgcccccatgtggtgtcttggatttggttcggatttaggcgtaccgagtccatgccaatcacattgtttttccacgccaaattgcgtctcccagaacaccaaacatatggtggccaagaaaatgattgatacgcacggtggatggatggatggattggtggcgatcgatcgattggtttgatgatgaaaagaaaaacaaatccgaggagcacctggaatcggggacatgcgctgaaccgggacaaggaaacagccccttgttttgcgaacttgtagttgtagagttcgtgtggagttgctgtttgctgttgccgtgttggggtatttttctgccgtttcttggagtctttgggcagtaggttcaacagctaaaggagacaaacctctctccggccgtgttgcgaattcgcaatgcaaaatgcaaccgacggtctggtctggtggtgttgctagtcttccatttcaggtgccattgtcaaaaaactcaaaagggcatcacaggcacagcacagggatttctgtccctcggaaactcattgataaatttattacaaagacctagctttgttttgttcttgtgtcttttaatcgtgtcaaatgaggtgtttaaatctatgggtgtaaagttttgacgtgtcacatcgaatatacatacacacatttgaagtattaaatatagattaataagaaaacaaattaagattccgtctgtaa

SEQ ID NO: 15162 - DNA, 12026 bp, Oryza sativa
gcggtggcggcggaggcgccgcggtgccaggtggagggctgcgggctggagctgggaggctacaaggagtactaccgcaagcaccgcgtctgcgagccccacaccaagtgcctccgcgtcgtcgtcgccggccaggaccgccgcttctgccagcagtgcagcaggtcagccactcagccctcctccccttcccctctcgctctcctctcctccaataccgcgcttaagattctgagaagcatagttggtgagaatctggagaagctgacttctcttaggagactggagaaactgcggccgtcaggaagctctctaaacaagccctaaagttctactagtaattgattcaatcgccccgttagtgattcgattgggcgaattcgcgccctgtttgaattgcttcgatatgcctaagtgcatagtagtaatcattagtacgactattactatactacctgtgcagtaaaagatagggtataaatatgtatgtggccattttgtgctggtacagtgtgaaactctgtgcatgactgattggtcacaaggttctctgccccttgcctgatttggggaggtaagatcctgtttccccgtcgatagtactgtgctagaatttgcctgtacgccctgcatctggaaagctgccaagacagtgaattgtctgtgcaaggcaaggcttcctgaatttctggtaggacggcctgtggcttgcgtgtctatgtgaatgtgtattttcagcaaagaggtgtgtgttagtacaatgagtgattgctatgtgtagatagtagtattttgcatagttgcattcttgcatctgcttttgccagaaactccctgtgaccaaattctgcttttaattgtggttataaacaataattcattacgttttgcggcatgtttatgtcgttttgatgattttttttgttctatcttgggattatcaaggttccacgcgccttcggagtttgatcaggagaaacggagctgccggagacgactttctgatcataatgcccgtcgacggaaaccacagacagatgtgtttgcttttggctctggaacactaccgcgatcactgtttggtaataccctcgtgacctatataaactacaaaagtcaatcacagtgttgtttgtagtttctgtctagtaatatattggagaaaattgttggtggttggctgatgtgatgcatatttaatatctgaaaaaaaatcaagattatatctcacgatgtcatacactgtatttccctgaaataatgcttagctggatccttcactattttctatgaaaataatagcatgtatggccatatgggatagtagccttagccactactgtattatattaatgccactttagtttgggattttgtcaatgcaaaatctattggacggtatatcaaaacaaagagcatgcatttattcgttctcctgacatgttttctttgaggaatcaaaaaatcatttaccattgaccttaataatgcttgggtagtttccctccttgtctttgtaattttctaaaagtttctctttcttaatttcaaatgttattgcagatgataggcagcaaataagtttcgcatgggataataacgctccacttaaccatgcaaacaccacttcaagttcctcgtggacatctgacttacagctctcccaagtgatggacataagcaaaaggtcacgaaaagctggggcagacagtgcaaatatccgtttgtcaaatgctttgccaactctttgtcatgacacaaatgagctcttgccaataaaaggtatggctccatgatctttttatatcatgaatggaaaattaatctactcgaataattttacttatgctgacaaagttagtttacttcacttagcattcatgccatgtgcagtgacaggcttaaaagataggctacaatgctaaatttgacagcataatatgtatctctactaccttaaaagcgcaaccattctccttctgtcctcttcccactgtgcgcagtcgcctgctccttcatgtgtgcgtaaccaccgtagcatccagtattttatccttaatccatccacccagccaatcgcccaatcctcaattgtatgagcttggtacgttgcaaagcactggcatattactagtaaaaagaagaaataaaacagtaaaatccatatggccactacccaaaatgggttgatacatcaagtttgttgatactggcatctatcccgaaacgaactttaaacatgtgtaggtacattgatatttgaattttgaggtttatagttcagcattctttctgtaaaccaaactcccaatttgttgtttcacaacattgcaagtttcttatgcagtgccaaaatcttggctgcagattttttccccccatctttgaagttaggaacatttgaaatgaaaattttcctagttactatgtatatttgaatattcacaacccatgtaggactagcaatccagcattccagttacacttgtggcatcatggcagatacctatagcctaggtatcacaccattgaccactatgcacgagtgaacttatgagatccatcctattgctaaatgctttccatcctccgagccccttgatatgctcaatacaatcagataccgtgtcttgagagtagtattttctctagttttatttactggcgctgtatgcttgatttttcatttcatacgtttctgttatcacttaccactattttattttctttcgactgtcgctctaatgctttgatggtccaattttgcaggtgcagatgcatctgaaactgcttcaaaactagatggagcactagatgttcagcgtgctctctctcttctgtcagctagttcaaggggtttgactgaccccggacaccaaacatcttctatcatccaatttacgaattcgaaccaaaacagcacattgcccagtgtaccaagcgaaggaaactctaatgtacccttttgggttgatggacaacatcaagcagtagagcctcaggtgtttcagttcacaatggacaccggtaacactgtgtttccggatctagagcggatcaaaccttcctacgagtcttcaatgtttggtctgaaccagatacattgaagcctgcaatgatcaccagcacggtcgctgctagtatggatgaataagcacacgtcctggactatccaagatcgtccaagacttgccccaatctgccgagtgtcaatgctatatccgtgtgtttatttaccttcccataattcagataaaccttgtgaacgccaacatctaagtatcaagcgttcacaaagtgtgctagtttcaaccttatttctgtcaaaatgtaattgctgttgtgcaattctttgttcttcgtgttgtacaaattattcattgttcttggcgttgtacaatctactgcctaaccatttgtcagaatattagctctttcgggaaacaagacatgatttttccctgtgcatactgtttttcagtgtctaatagtataatttgaaatcttaacatgtttaaagtaattttatccctctttaaaaaagggagagagattttaccccgatatgccgttgcgcttgacttctggtcgcctggacagcatatggtttctttctgactggtgcggtgtactatgtgcatcttaccagctttttacacggtggttaacgttatattttttttatcattaatttctgtcataatgcattatcaattactacaaaattaacatcatatataaatattttaaaatacgaataatgatactacacacatgccaccaaaaacatttttaattcatattagttaaaaaaaatattaatgtagattttatggaaaataaaggtttcttatttttagcacaaaatcttgtcccaaatgaatcaaaataaagctatttcttcacccatcatcttctctcaaccaatcataataattcttcatctacattctttttgtgaatcaatcataatattcctccaatattttcacctacttttttaatatctgttcctacaaaaaaaaatgccaacattttggaacagagaaagtattttagaacggagtactccaataagtggaagttcaacagactataggtgtttagaatttggtgacacaaaaccacttggaaaatctgcataatttacctggataatcaaaaaccggagtggaaccggcagatacattttagatttgacttcgacatagatgataggcatagataagtatcatggatccatatggaaaacaacacaaggagaataatatgaaatggatttggaggcgcaaagaatggcagcatatacaaccgactcaaatcaacaagaccaggagatgatgaccacaagtaggtcgacgcttcagacaaagaacacacaacagctgctgatcaaccagcaaatacagctgctattatttcacaagatagctcatttcggagaattacataacacggctctttgctaagatatacaatcatacaaggtaccatccatatttgataaagtagaaatcagcaattttaaaccttgaaggccagggatgagacttccatatcggcacgcaaacgcgaccgatatcatggtgtcctctctcttttcttttttcttttctgtactctatcctgcattagtttcagtctgtggtcattggccccgcaatacaacagcggaaacgtgccctgcggacatttctcataacctctatctcggcattctcaagcatgacaacgatctcggcaaatgatgggcgaacttcagggtttgcgtcccaacagcaagtcatgatcttgctcagagaatccacacaatcctgcgggattgcaggacgagagcccctgtttacgacagcaaatgcagcctgaacggctgtcatgtttgtgaaggggagcatgccggttataagctcccacaagacaatcccaaagctgtaaacatctactttatgatcataaggcctgtgctggatcatctccctgcatgatggcaagataagcatatttgacagagatttaaaaaggtaaacagtaggcaatgagcgtgaatgcgtgattatgacttacggtgccatccaacggtaggttcctgtctctggggtcattccctcagtttgtacctcaattcgagcaactccaaagtcagctatcttgatggatttgtctgctgaaattagaaggttatctgattttagatccctatggataaatcgcaaggcatgcacataagccatcccccgagcaacatcaagtgcctgcttcacagccagccccagaggcacagacttgttctgccttcgtgcaaggaattgccgaacagatccaccttttgcatattcagtaatgatacaccaaacaattgatttccggcacgccccaatgaaccttacaatatttgggtgcctcaacgtagacaacatcataacttcctgcacaaactgctgttccatcaattgagctctctctgggtcattctcaggcttttccagcagcttaatagcaacgtcttctccattgtatgttccccgataaagcttcccaaatgccccttgagcaaaaggagctcccatgtcgagcttacccagatcaatggtccactcctcgtaattactaagtatctccgtcggatggcttggatccatcaatacccgagccaatgcatcctcattcagagtaggcgccatagcccggttcggatggatgacgctattgtgaaccgaataactcggcgccggcatatcacggaggccagggtgtttgagcatgaccgtgcgggactcgtttgatcccacgctgctgttatccaccgacatggcaaccgaaccaccaacaaagttcatcatgttcaggttgtcggcgttatccacggacatgtgggagctctccccgaccttgtggtagtagggcatattgtggaagccattcatctcgttttcttgccttcctctgcaacctataccacctccaattccagcaccgcccaacatattctgaaaccttgacccctcaatcatcttcaaacaaccaacactaacagtagggttgctttacgaaacagtagaatcgctgaaaaacatccatttctcagttttcttcagtgctcccacggtatctagaatcaaaacaaaaaactgattagcgcctaaatacgcatatagtaaagtataccatcaaaattatgctaaaacaggggcggatctaataaactgaacccccaaactatttggggaacaaccaaactactattcgtatcaagtttcaaggcaaattaagagaaaagcttcctccgaggtctagaagagaaacaacaagggttcaacgcaaaatttggggaacaagcaaactactattcgtgtcaagttttcaaggcaaattaagagaaaagcttcctccgaggtctagaagaggaacaaccaaagggttcaacgcaaaattggagggaaaaaaaaagtgagtgggtacacagcgatgaggaagaggatgaatggatgctcaccgggatgcggcggaagcagcaggacgaacggcggcggcgcgcctcgcgggatcggcggcgcaggcggcggggcgagctcacgaggagtcggagtcggagtcggaggcgacgacgaggggaaggggaaatatcgtcgtctcgtcgaggcaccgcacaacgatctcctttttgttttccctttttttttcacaactacgctaggaaggatgctgattatgaaacattggtactactatcttttacggggaatgcaattaaaacgtagaagctcatggcacctgcaaactcactcccacaatataagttattttaacgtgtgtacgcttcgtacacacgtacatccatgtctacgagtaccttcggaagattgagctgatatatcttgagattaatgaatcattaaaatttcataattttaatataaatttgttcttctctatactgggggtaaatatctcagtattctttcgctattttattttgttttgttctcatttttctctattttcgacgatgatattgtttaaccttacgtgttaaacacggttagcaaactcgagtgtccacaatatgtactacatatttgtatttagtaaaacataataatttattctagatgcctaacttggtatttgttcaaatacatcacggatacgtatactaacacaacaacattcatatgagaatttgtattaaaattccgcttggaatcgacttaatctgagaatttgtattgtttttgaacttttaaatatctaattttaaagtagactattttttaatatgaacttttagtcataccaccctatctaacgtaactgaaaaataaccaatgctaatgttatcctaccaaactcttaaatagaagacgatccaagtatttttttactattgtagaaaatcttttatatattttgtgatgaagatagtaaaatattccatcatctcgcatcatggctgcattagcactttatcagtcaacccaaagtctcgaacctactgaccagagcacacacattagattcatcaaaccatgtggtccaattcatcccaattgatgagtagattaactagggaaatcaagcaaatttcgccgaatttcttctgccaccaccgtcgtcgtcgtaccgtatcatcatccataattgtttacgcgtgtttggatccggacgcgcacgtcgtcgatcgtttgccggccagcgattttcccccgggtttgaagtcaacaaaagcgatcggctggcggcttccgtttcgtcaggtcctaatcgcaaatctctttctccatgacgccgattaataaagtatatacaacttcagatgcaaattggaatctttgttcttgtttagtactctttccgtttcacaatataagtcattctaacatttcccacattcatattgatgttaatgaatctagatagatatatatgtcttagattcattaacatctatatctatctagattcattaacatctatatctatctagattcattaacatcaatatgaatatgggaaatactaaaataacttatattgtgaaatagagggagtatttttttagtgtgactttaattaaagtgagcgtgggacgattctgattcgcatcggcgaataatctgcgtgattttatgcaattatttgaaacgatttgagttcaaaaagaaaatcaaatgattatagcccaaaagaaacaaaggaatacaggctgatgatgagactgcgagagatcatcaaatcccacctatctaaagactaatgggccggaattctggcctgttaaatgggcctacatgggccgcatgattaataagcccaaatcttagggccgaaacataataggccgtacgtataacgggccgtaagttaaaacggcccgcagattaacaggccggatttttccacgttgacttgtcgcacgaaaaggtcatgtcaatgggcagcttaatgagctggcacttcgaagccccacaaatacttagcaggccgaaattttgtttgaaggttaacaggccgaaatttgacactcaaattttcaggtttttggaggaaaacacaaaataataatccctccgtttgttaataattgataattttgactttctcattaattatttttacattgttagataaatgttaatagatttcattgtgtatcatttcattaaaagaagagaacacgaaaggaaaagtgtccaccaacctaatccaaaacaggccaaagcctttacaacacaagcaaaaacctcaccttcaaagggctatccacttatcaacaaataaaacaagtgatcaaatttctaaagcgaatattacctagtgctagttattaagaaacgaagggagcagtcttcgacgatgcttatatgggtagagttggtgtgcgtacgttcatagagataagtgcacgtgcgctgtgagtggctgcgttgtactatgtaactctaaaaaaaaaaagaaacgaagggagcagtattaactaatccaaaattacgcccttttttggcacggctctaagctgtgagttctagagaaaatagtttgtagattaaactaaagtaccacagtttagtactttttatgtaaattctaaaacatgaaaaaaaatgcctcactctaataagcagttctaactcaaaaaatcattttggcaggtgaggctgcgactacctataaattgcgacattgtttgtattggttgcagcgcaccaccaagcatccaaacagacctagcaacaaaatccaaacacaggattttcaagtcacatgatttttttaaaaaacagtggaattgcgtaggaatgtatatgcaatactaaggatcaagacatattttttttcttttagtgagctgaacaaagaagatggagtagatgtttttattcctatggaaccaatacattttgaagatctagcacatgattcctatagaaaaaaaaatcatttaaatcgtataaccgaaccgaacaaggcatatataataagaaaaaggagcccgtatggttgaaccatttggattctctctgaagtactatggcagttggggcatgtctgctatccagtgctacgttttgacaaacacgacgttggaactacacgagaattacacggtactggcatttgcaggctgcagccggcgttgacatgaatagcctcctaaagtcgccggtaaactaattacgtactgtaccagcaagcacgacaagttgccaaccgaccacaaaaccgatgagcaggaacaaaacagtgggactagtccactctctagctggctagcactgtgtatatatactccgtatttgtgtgaaattgttgacttgcatcgtccatggcaggctaaacatggtcctccacacacactccagtacgcgtagttcggtgtacacaggtcacgcgtttacaatgtcatccacccggacagtccacgacgagctctacccgtacagttccatacaccaaccaacagacgcctctactaatctgtccaataaaaaagcgagcctcactttggtgctatttagttgtagaaaataatctgaaccgttgatctcatttgatcgaagggttcatgttgctttctactgtcatcctagttagcggtagtagaaatttagaggggaaaaaataggggtatagttgttatttagcagtgagccattgactaaaggcatgttcagattgtattcaaaataaaccttttttttttcaaaaatcgagcgttgtttcaccaagtagatcgagaatgtttcactaagtagttcgaaaatgttttagtcttttaaaaagctgaaatacaaccaaatcacctcgtggaacattttgctacaacgtatgatacaaacggtttccaaaaaatcagacgttgtttcactctatataaaaacaatatttcaacaaatagcaaaatactatttcaattcactgcaacatttgatccgtacatagtgaaacatcacgagtacactagctgaaacatttttggtggaacaaaaaatgaaacggattcctttactatagcgtttccgtaatatgcagttgatttgttgcaacaacgtctgtgatggtgcacttggtggaggcggcgcgcaagcgtgggaggtgcgggtgcctgatgcatgcacgcaattttcgaaataaaccttaacaaattttggcaatgccaaaattttaggaatttggtaatattgccacatctgttagcagcgaaatttgataagccccgaagacatcatcggactagagtcagaattggcttcagaatcctataatcggccaatcaaaattatcacatcgccaatagtcggattcctgctatattcggttaaggaaattaatcgaattaaaggaagcttatccagaagtgaccgagttcaagaaggatacaacatggcaagttatctattaattaggaatagtttgttagttttcttttatctttaggaaagtgtgtttagtgtccaataaggactttatgtttccgttttaactttagaaaagtttctttcttgtcctacaaggactagtatctatccatgggtgtaaatatgtacacccgaggccattgtaatgaatctctagatcaatactactctcggtgcatcatcaccctctttcccgaggtttttacttatcaaccagcggaatttggcacctaacaatataaaataacaatataatcaccatcttgcatctatttatagcaattgtacaagagctccgaacgaaaaagccggccaacgatatccatgcagcaccgtgcatccatgcatggttttcttacccccccacccacccccaaccaccataaatacacacccagctgcaacatggatcacaaaacacatcgatccatctaaagtttatatagtactacgagaatatcaatctattgcaaagtatctaaagtaaatacacaattggttccaaactttaaatagaaaaaaaatctttacactaccaacgtgttaaaaggaactagaaaatatatcattagttccaaactatgtatgtaaagaactaataaatccttaaggcctaaaaaatgtagtggtggtttatgatccctcgtccatcgtaagcccatcctcactcccatgccctctcgagcgagtcctgcacgcatgatgtcccttccactgcatgaatggaatgcccccgacccccaccaccgatcaaaatcaatcaaccatcattccccggtgcttggccatggacctcctttcacgtctagctctcaacctgcaggatgtaacgacatgtgcacttgccaataaaaaattcaactgaatttatagtgtactcctttttaatgtacaatctacacccagacctagaattgttggattattttcataaggtcacgtgctcctccccacatacgcctcatcgagttgtcatcttgtattcctatcaaatgtattgtatcaactgccaccaccgctcgatatccagctagctgactaggtgtgctctaccaatttacttagcaccagccccatctcaccataaatgctaacctatgtcccctatcg

SEQ ID NO: 15163 - DNA, 9604 bp, Oryza sativa
catgaagctcgtctcttggtacgacaacgagtggggctacaggtgagcatccacttaatggcataacgccttagccagcccttttcagaacctattcgctttcctgattactgcagaaactgaatgtcatacgcaactcgtgtgttccaaatggtgccttgcatgtattttttccatctatctttatctgacctgaagattttgtttctttgctccagcaaccgggtcttggatttgatcgggcacatggctctcgtcaacgctaagccctgatgccattgataacagcagatgccctagtaatgtaggaagagaaggctgcaaacttgatggccccttctgtatctcggaattatattaagcacaccgaacaaaaccattgccgacatgaagatacatgctgtgttgtgataatccgagcttatttttggcctgtttgaattttgttattttgttgtgcgacacatggactccatgagttggggtgaatgaagcaagtagtaacacactgcttgcacacaaaacaaacagacctgatttcctacacttggtatggtgcattaacgtacaccatggaatggatcgatatctccaaaaaggtgtcccgtattcctatcttgatgatgatattctccctctctgtccatggcaatttgggttccgattaagctttcgcggagcaatgacactgacaacaaccggcagtgtcgccctcggtcctcctcatcacatcccattcctgccctgccagccgtcaagtggtttctcttagtggaaggggcatcacgccctccagataaaccgtgggaatcacttcatttttccccctccttttttttgtgtcgtctctatacaatgacgagagtcgtgagacctgcctgttgtatttttcctaactgtacaatggccctgttctttgctggttaagataaagattttatcttagtttttgttaacacgctattcaaattgataaacggtatattttgtgtaaaagctttctatataaaagttattttaaaatatctgataaatttatttttcaagtttgtaacaattgacaatatgaaactcaattaatcacattctaatgactttatcatttatcgtgccctaacttcatttccatttttagtgaaacgaacatcgccagtctgttcatatctcccggtcctatgaggctagatcgattttcattatcgaaaaaaaaatcttgagttcccatagctcataaaaatatttatagtaagatgtttattcttttagggatggagtggtaatgccgtcgattgtgcttttttatggtattttggaaattttgattgatgaagtaagtgaacagtacatctcttagagttttaggttataagacgttttgacttcagtaaaagtcaaattacttcaagtttgactaactttatagacaaatataataatatttataataccaaattagtttcattaaatcaatcattgaatatatttttataataaatttgtcttgggttgaaaatgttaaaacttagtcaaacttaaagcagtttgactttgattaaagtcaaaatgtcttataacctaaaacagagggagtagttaactataaatactgttcctcgccaaaaaaaaactacaaatactgaggaccgagcttagctcggttggcaagttcgctgtggtgcgaacggctggtcgtgaattcgactcgcggggcctcacctcgacgggtttttccagtcttttctttgggactgtccttcagggcagtctcgactagaaaatagggagtggtagtgcagtcgattgtgtatttttttaggtcttttgaaaattttgaatactaaggatcgagcttagctcggttggcatgttcgctgtggtgcgaatagtcggtcgtgaattcgactcgcggggcctcacctcgacgggtttttcccgtattttcttcgggactgtccttcggggcagtctcaactagaaaatagggtacacacgcatgtgcgttcagtgggactgcacgtttcccgtgcattgaggcctagtgcctccattctcaatcctagcgtgtgttagggatacgcacacgtgtgtgttcgtgtgttgtgatgtgattgtggtgtgtgagtatgcgttctgagttgtttcctttaaaaaaaagggcaaatactgtagacccattgccagttttaatgattagctttgcattattatgcagtaacaactaacaagggatgctcatacataaaagcaactgtcattcaggatgattttcctggatagacgaaaataataactactcactcaagatggcgaagtaaaatcatcagccattatacaagttatttaccggataatgagcatatataggtcacgctcataatctatagtaaaaaaagtttagccgatcaattaagcagcagtcaaaacttgcaggcgatggtggtggtcttctccgacgacggcgccgtggccgtcggcctctggcgaggggcggcggcggcacgtcgggcaggagcagtgcgccaggagccacctgtcgatgcacacgacgtggaaccggtggccgcacgccgggagcagccggaccctctccccgtcggcgaagtccgacaggcagatggcgcagccggcgacggagggcgccggcgaggcgacgtacgtggcgacgggcagcgccacgacgtcctcgcgcttgagccccgcgccggcgcggcggtgctccacccagccgacggggtccgccacggcgcgccgggtgcaccgcaccacgcactggagcatcgagttgagccccagcgcgcacaccagcgcgcacagcatcgccgccaggatcaccaccacgtcgtagtcaagctgcggcggcgacggcgacgacgccgctgccgaagacggcggcatcggctgctgctccggtgaggagacgttgctgcagttggccatgtgggacacctccatgccgatacgacgacgacgacgacgacggcggcggtggcggcggcggtggcgaggcgatcgatcagacaggcaaggagaagaggagaagagagtggagcaaccacgacatcgcagagaaagacaaggagaaaacaaaaggtgacaactgaagagctagagctatagcagtaagcaaagtgatcgaaacaaattttagtgccaatatgctcatacatttgtaggcttttaaggctgtgtttgagagtaagggttggaaatcctcctttcaggtacacaaaacgaaacatgtatttacgcatattaattaaatattagaaaaaaaaccttaaaatagattaatataatttttaaaacaactttcctatagatttttttttaaaaaagcacacaccatttatcagttgggaaacatatgggcgtaaaaaaacgagaagtaggaaatgggaaacacacccctaagtacatatgcatcttattttcagattatccatctgattgttgaaacaaattattgctccataatttgaaaaacacattttctaaaaaatatattcctttaactatattatttagaccacatgttttaaattatttaatttattcttataattgagtagataattcatagcaacgatccgtccaatagtctgttttgaatggagctttagattcatgatggacaattggacacatcaaaaaaattctataacctgaatactgttctgatagagtgacaccggtgtttcatcagcaggacgtatcaagtacgaaaaggtatgaatactggtcatagctatacaagtattggaaccaaagcaacagcacaacttgcacgagaagaatctgttcttacctttcttgaaaaaggaggcgaattgactgataaggagatcacactagtattcacttgcccgagatcaacatataatcgacacaattgtgagaataattccttcaatttgaatctttaaaatctaagcatatgcaaaactggaatatatttggccgctgtaaacatcacttccaagataaatggtgtaactacataaacaatacatgctttaacaaaggaggaagagagggtcctgaaatctgaaaatgtttttgtacaggcacggaaaagagagttggtttttcaaccttcatttctgaaacaaatatattttcacatgatctcacatgatcacgtgatcagtaattcagactttcagagctttaaaactttttttagagagagaggtttaagctgttgactgaatttgcagtaaattcacagggtttccgttcactgaagtgtgctttgtcaatatgcttgatcaactctctggttgcacctctgcgtgaagattacactgcttgtttggtaaacaactgggagtattggcaactccaatatcgtatcgatctaaggcaggagtaactaacaattgacctatagcattgttaaaacttgtcaggccagccagcagacagaaactcattgaacactaatctgcccaagttttaaacgtatccagatttatgcatccaaaacatctgacaccaagatcttaatttcgcactgaattaccccggtagatgcctcacggcacacggccggctcaggcattctaaatttctgaatattaggggttggtttcctatctgctatatggctcttcaccaaactttgctggtagaacaagttggtgctggtcacaaacagtttatcagtttttgacagatgagtgatgaccgaaatgactccacaagttgtatgagaattaaattagcaccatagaagtagatcaacaagacaacaagaacttgggaattgcagaatcacaaattcacttcacaggcttcactagcagctcactaacaccagcccatatatgtttgtatattttcagcataatagctcacatgcagttttgaacttccaaccggtggctgtacaaatcatggttctgaatattttcctaagtagaaacacatagccgcatcaaggattccagttccaggtcatctttataaagccctgtcataattttattaaaacttaatacctagttagccgtgctcatcttgatgattagtaaaagcttcagcattttcaagagaacttttacagtaaaatacactcgtaatatatcctgctagtaataagtaacctgtaaattcttagcgtacagtggaacaactttaggtgctttcgccgctcgatcccattcctcgttatccttcatcacgacgaggcgcctccaaccactgtggatccacatgtgccgccgccaaccaccacaatgctatgagcctttgactcggtgatagttaggcactaaactacaaatttactaatccctccatcctaaaataagtacagttttacactgttcatctccaacgtttgaccgttcgtcttatttgaaaatattttgtgattagtatttttttgtcattagatgataaaatataaataatactttatacgtaactatttttttaactttttataaattttttaaataaaacggacagtcaaacgttggacacggatatccacgactgcgtttattttggggcggaggtagtaaaatattgtgtggaaattttttttgttatacttcctctgtttcatattataaaactttctagcattgtctatatttatatagatattaataaatctagacatatacagaagtatagaggaatggtacatggcggtataccatgggtgtctcactaatcgtccaaactacccgtgctcatcttgacgattagtagaagcttcagaaattagttttctgagcctcgctccccaaaagcagaacagtagctaaataaagcagcatgacaactctgactttgaccctgcctcgtcaccaccatgacttcacgcccacgtcacacgcacaccccgaaatgtcgtgggacccacccgtcagcccccgccgaccaatcaaatccgtcgacaaaaaaccccacgctagtacacgtcgcgccacaaacatcgcatttacactcgctattaatccagaagaaggagcagatgcgatgcaataataaacccgtgaaaacaacatgtggttagcgtgcgcccgccacagctttgcttctgaaacttggcaacccaaatcaaaagttgattcctcccccggcctaatcaaatcacgcagaatttttttttttactgcttgtcaaaatccacacatgggctatgagagtgaccaaagagcgaaatcgaattgaagaaaaaattaggagtatttacatcgctgcagcatggatagctgatcagctgattttagtgatcttctctcttaactgaacaaacatgtgaaagtaataagaagaaaagaaattgcacacgatcgaggagagggtaaaattaacttgtagggggttaaacacaactggtccatgaatcttctttgcttgtgatgtgtcttcgattaaccgttggttaattaggcgaagtaaccattagcgctgtggttagcggcggaagtaggcatctgagctgactggaggctctgcaggagcaacctgtcctcggccgagctcagcgcgtggctgaacatgtcgccggcgccggtgccggcgccgccggcttgctgcaggttgccgtaaccgaacggtgcgccggtgtactgctgctgcggtcggaggagctgttggtggtcctggaacgtcggccggcgcggttggaggtggtcggagaagggaaggacggcgccggtgaagccgtagtcggagccgaagttgatgaccggaacgccgccgggccccgcgaacgcgcccgcgggcggcgccgggatgccggtgaactgctgcaccatggcgcggaagttggtggtgtccgtgttgagcagcgtcacgggcgcgcgccgcgacgccctggaccgcctcctcgccggcttccccacgcgcggcccctccacccccggcgcccgcgtcgggctcccgcctgtcgatcccgccggcgacgccgggctcgtcgccgccgccgccgcaccgttcgccaccacgccgccgtgagcagccgacgcgtcgtggtacagctcggcccactgcgccaagctcgagccagtgtcactcatggccgccatggcgatcgagcgagagacggatcgcgtcgcgaattgcaaaatatcggagtaaaaacggtggaaacgaaacggtatttatagcgacgcggcgaccggtcaaacggccaaccgaaccgggagacgatctcagccgtccgatcatgacatcaacggctgaggatcgttgacaccgtcgccgtctcgaatacgtccccgatcccgtgacagcggccgccgcctcctcacccctcaccttcctcgaaacgtcgcggagaggaggtggtgggtgggccccgcgcggggtgccacgtggacagccaccgtgctccggtacggcggggcggcggcggcgttggcgttgggtcacggcgcgcacggcgcgggatgattaattccgcgaggaaatatcgggcgctcgccgtcgacttcgtggcgcgagcccgcacgtacgcaacgcgcgcgcatgtcgccatcgcgcggcatgtgaaggcggcggcggcgggggagctgaggccggtggtggtggtggtggtggtcgaggcgaagcttccggtgaagctgcggcggcgtgtgcatgcatgcggcggatggcgaccgcgacgccggcgatcgagtagtaatgcggttttgtgtgtgtggatagtgtggtggatagggcgtcgtcgtggcacgtgcccggtttgaagaaggcggacgtcgctgtcagtatccacctcggggatcgcgtttacattccggccacacggaaagtttccacctccatcgtggtttgttcgaggtaaaagcgaaacggaatacttccaccgtttcgaaatatttggcgccattgattattttttaatatgattgaccgttcgtcttattaaaaaaatttaagtaattgttacatcttttcctatcatttgattcatttgattcattgttaaatatatttttatgtaggcatataattttacatatttcataaaagttttcgaataagacgaacggtcaaacatgtgctaaaaagtcaatggtgccaaacatttcgaaatggagggagtatttgctaacgaaaaataatttgtaaataaaactctaacttttattgtattgtctatatatctattgatataaaatctcacatcttattttttaaattttggaccatcgaatatgctttaagattcgtgcagagatattaaccctagctctcctcctcatatatgtgttttaaattatctaaaagaaaagactgaaaaataactataatgaacaaaaatcttaaactcaactctaaatttaaggttgaaaattaaaattttgactgacaagtataaatataaggaaaaaaatgaggatgttcactctccgtttgattacactaatgaggatattaagcttggacacgtaaaacgagaatattattagctcatattactaattaattgggtttaaattattttaaatttagaaatgactttataagatatttaaaagaacttttatataaaaagttcccgtacaaagtaggacgtttaccactttaaaaaaatgctaacaaaaatgatataaaatcagtatctttagcaattccctcagtcgaatcaagttatgggggatgcctgttttggttatatcaagcatatattcgacgaccactattggatcgtagtacaatggagtacgcctcttcggactgcaactgttgagaaaaaccatcataaaattgggtggcacaaagattgtttatcatgtgctcagtttctatttttgaaatttatcatgtgcttaaaatgatctatgaaaaatggtttgctatagcatggtcaccagacttggagcatgcttgctgatgtcacttgagtttaaaagttgaatcttcctgtttctaatttactttcgaccgatcgatttgttgataagtcgtagaaaaaataatgaaccagacaaaacttttgaatctgtattattcgtaatttgaaagccaagattaaaataacatactataaatttatagtgaaaacaaatcaaaatcgcttatatataagtccacgtgtagatgattagagtgttaaggaccctttttgtcactctgtgttgcctggctttcttttcatgaagctttaacaagagcttcaaaattagcttaggttttaagctgaagctgtgacaaattaaagcacgatcttgtaaaggttgcacattatatgttacactttcaccttcatttgcgtgattgcttccacgagcacgtctcctagctcgtaagcatggccaacactacaagtcaagcactaatggacctgatgaattagtggtaactacaatgttatgtctagctcttagttaattttctgatcaagaccgtagagtgattcaacgtacggcatgcacagtagtcgatcagggcgcccattttttacttgcaccgcaagccaaacatcgattaatatacgcttaccaaattgggtatatatagcaaagttagattagctcgttcagttaactaaaatgttcaaatgtcgatcgttcgaggaaatactcagcgtgttcacatattatgcacatggtttctcacttaaccaagtgtccagacc

SEQ ID NO: 15164 - DNA, 586 bp, Oryza sativa
acaaagtcatcaatgatacaagcaaagttttgaacaaaggaaacccccaagagaatgagaaaagaaagaagagaaaaaattcactctagaagaggaacaaggaattggacgacccttaacaagtccaatgcatgagaactcaaaaacagttctctaattatgctgcaaggtggtgatctaaagagtactattataacttatacatctagagtacttcccaaagccaaggtagggtaattaaccaattaaacacaccgattaaaatgccgagatgagagagagagaaaaggtcccccatatatgttcttgcaccaccacaccgccatggatatgccgcaagaacttcaagctcttctcatgtatctatccccccacaccgtatgccctatatacaaaataagctactacataccacccaaggaaggagatcaagaagccaagaagccaagtagagctagctagctagcaaatcaagtagtagcaacactagctagtgcacttacactttctttgcttctcttctcctcccatgattttgttgatctctccttccttcttggtcatcaatgcatcccaaattgatctt

SEQ ID NO: 15165 - DNA, 1779 bp, Oryza sativa
taagtttaacaaatcagaacgatagcttcgtgtaggaggcacagaaaaatgggctcttttctattaactcgatgtataaatctatcatgtacagggacgtcattccaaaaaatgatatgatctggaaactcaaggtaccgctaaaaattaaaaaaaatttgtggtacttaagaagtggagtaatcctaacaaaagacaatttggtcaagagaaaatggaaaggtagtgttaaatgctgtttttgtgattctaatgaatcaatacaacatcttttctttgattgtcctcttgcacgatttatgtggaatgctgtcttcatttctctctctagcatataacgtaaaagttacagttttgtgataatttctcacgctatcattgtagcaaactgaaacatgtcgctaatgttatagcaaactgatagttttgtcattaaagttgcaattttctgaaatttactctatatatattgcttgtggaagactaaaattttgttatagacgttcgtgctgcgatgaaataatagagttcccttccccttgccaaccctttccctcccctcgcatccatagctagctctccgccgctcgagccagctgtcgggagtccatgcccgccgtcatcgttgccgctctgcccaaggcgcagatccagccggcacgcgcggggctggcggcgccgctcccagtcgcctcctcctcctcctcctcatcatcagtggcggccaccgcgccgcccgccgccggatccactcgggggagggcgggggagggccctgccggcatactactcaagcccgccgctggagctgcgcggggcagggcgagggagccgcggccttcgccattgcccgccgtcgactgcgctgcccaccgcccgttgaccaagccactcgctgccgccgaccgccgtccacgctcgccgcccgccgccgttggccgcaccgcccacactggattgcgagaggagacgagtgagagtgagggagaggtgaggataaggatgaaattttgaagtgatgaggagggaaaagaggagggaggatagacttgtaagcttagtctattagtttcttcttttcagttgtttgttatttatctcagttatgagattaggggtgtatatactcgtgtaacttttagctatatacttgaggccgggattctatccattatctaaaaatatatagagatgcactgcctgtcattttaatcatgagtttaatcgaacattttggtggtgttctttttgttgtaaaccaacgcgcctattagcggatcaccggatctgttccctgtccctcccacaatagtagaggcgtgagatgatgtagaacacccgcgcccatccctttgccctcaagaacattgcagaagtagacaatgaacacagatatagggtggagctctctcttcattatagatctcatctggagtacaagccagccattagccattagatgtcacaccctgcccctgtatatatacattgtgaaacggatggaatatataatagatagatagattatagcacaagtctatatctatatacctaataattaaaaaaatacgtaaggcttttgccttcctttcgtccgtccggcccctctccctcccgcgtacctctgcttctacctccctccctcctagcacccccatttctccccctcccccgcagcctctcttttccctggcgtatgtcctctcctgcctccctccttccctcccggcaccccacacccatctctccctcgctgcacacactccctctctccctcgg

SEQ ID NO: 15166 - DNA, 8679 bp, Oryza sativa
acctcacctcacctcaggagtctgtgaggtagcccacttgtatttggtgtcggtcaataaagacagatcttcctatgatatgacctagaaacaggtctaagtgatcatcatcgagtcaatgccccgagcatactctaagacatttcaatgtctcgcaaacgacaatcaacacatagcacatactccccctgatgacaacctttgtcacaaaccatgttcccatagcattaaacatctctcagatgtatgcgtaggcaagaatccttcagatcctcaaaccattagtcttaaaaaacttgtctcatttcaccgctaaaatgagaatagggaacatagagagtaatgcatttcatcactatcatataccatagtaccacactgttatgcaacgcaatctgtttcatccttcagaaggattatggggataaataagtcgcaacggcacacacctcctcggcgtgactccatcaagaactaggtcttgatcattacaactctctctgacagtaccaacaacaattggggatccataagatcaaccacaagcctttcaaagacatgttgtaacaatcaaagtaactagctagtctgaaaatttaagcactatgggggataacacacagccaacaacaccaagtatacctcaataggtattagaggacaccactattccaaccatcaggtggagtagatatcacgagtgtacacactccaaagtgataatcgcgagatgcacatgtgcctacagaccctgtctatttgatctcatcaggttcctcattgcaatcttatcaggtcacaattgggtcttcatccctccaagggattacacaattattggtgtgctcagacttactaattattttgtatctcagaggaaatttcatcaatgaggtctccccgttagagaaaattccatcaatgagattttctcccaacgggagatggtactctttccggaatacctattggtagaagatttgcatgatgctattccactatggagtctattcaagacatcctcatggatttcccagatcccttaactgcatatttaatttcatgccattttaccaatacctttatttagcggaacattcaactcacgtgggagaggtctcatgaaggacctacttgaaccatcgcacatcaccacctcattatatcaataatgacccataaaaatccaaacaatgttcgcgattttcaattggcgattcggttcagcctcaactgcatttccatttgacccgatttgagcactgtatgctcatgccatggacttgtttcggatctgggttctctcagagagaatcattagcaagaggcgacatagtgtcgacacatttattcccacttacacatttaaccagatattcgtcatttcccaaaacgatcgatccatggttgttccgtattcctagcaccataatatgcgcgcattgctaggaatgtcgtctccacgacgaaaaccattatgaggtatatcaccttccaaaggtgaattttccaccaggagaatcagaggagtatgctcacatccagtgagaactcttatgctctgactaaggcctacgaaccgtgttagcaggcgtccccgcacaacatgatctaatgccataagtcttacctggatacgatattattcccgagtctatccacatttaccacaattgggagcattactcttttttaacaactatctagttgttcctcatatgattttgttggcaaaaactcgtgcaccaagcaaccaggagtatgaattaaacatacaagttcagctcatttagtgcgttcactcaaagaaatctccaagcattccaaaatgggcatttctctccccctaatgccgagatgtcttgcaatagcatactaccaatccccatatcgtcgcataggattaaggaatttcacctcgatcacaaatgttctcccacgaatgtatgcttcggtggtgatatatttgggaaatattacgcactttaattggagagatttttcccttatatgcagtgagcctggacatataccgatacaatggcatgaatattgtatccttccttcctccgaagggttatcctcaacctcctagttaggatatacaattctgcaaaaaccaccattgctaccaaatgtatatgcaaccaacatgcaaatactttagccaaatgcactctccatgaattaatgctcacctagtgccattcaaactcacaatcgattccggatcgacgtgcattagacatcccatgtcatatgcttaagtaggcaacctatggtggcaaaacgcattccgatgcgctcaacaaggagtatgatagcaaagtgcgcggccactagcctgcgctgccaagcagatttttgtggtgcagagttatgttaaagtccagctcgtctaatgcccaagtttgacttcaattacttataccaaactctagaattgggtcatagttaagcagcatgtttttaggtacgatccacgagcgaattatcaaaccacatttgctaatgtcccctggacatagccatcagaagataatcaatacctccgacaatggtaatattcacaataaaaccattatattcagacatccacaaaaatagtggaatatgtcggtgcaaccgtcgttggcataacgagctcaacgcatacaacatgacgaacctttgcatggctggcacacgtccacacgcgaaaaatgccagtgtgcgacaaacatggtcatcaacccgtgggtgatcaaccaacacaacctgggagtagttattgactacgagagcgcgataacacacaacagtgcatagccaacatttgtctgaaatacagttacgtcaaactgtgtgagtggttgtaactcctcggattatacactaattgttcttctaaactaaagcattttatcaattctagcatgaagataagctttagaatagaacaggaaagaccaagaactttatttatctaagaaatatcgatctaatacaaagttccaaactaagcaaaagataaactgcttggcaacagtatagtcgaccaatgtcctcctaggacatgctctaaactagccatacaactcctgttgtcagaacaactttattagacaaacactaccaacaattggtcaacaaccagaggtgaccatttagcgctagatccacacgaggaccgagactgagtcaacacccaagtcaagctgttggcgctatagtgaaatgggaatcatgcctattcacagcatctacccttgggcttattcctctagatttgccacctcttttctggtgtcctcgcaagacatcaggttccaaataatattgagaagatatgtgcacaccaagggcaaccatacgaacagtgtcattccaccacatggaaaacactttacatctttcaccgggccaggtgaaaaatatctcaaattattgaacctcacaactccacgttgccagaaaattgaggtataatcatttatctccaaatcagaaaagcgtgctctcaacctttgggaaagcaaaaaaatgtcgaccatagtccgaccatactctgattgagatgttaagccactagggaaaaggcacaatgaatcccaaacacattgtctaatttcacacatttcaacgactcagaatcccattcttgagtgtgatcatagggatagagtgatctacattaatgcccaaagccatacaatagtcattgaaggcctttacgtgaaatcacccacactatcatccgaatcgtttcatgcggttctcagagaacgcaacacgcaaacggacgatatgcgcagtgaattcggcaaaagcatggatctcgtacaacaagtatacgtgactccatctcgtagacacatcgatatcaccatttatgtatggaggagtgtatcagtaaagagtggtcttatccatagtcatggatatttaatttcccagaatttccatgcattaggtgattttctgttatttatttggtcttatttggcattatattcccaatatttatgccacacagaaaaccatcacacataaatgcaggaaaataaacccatcataatgcttccaaggggggaattctacactatgtgtacacaatttatggaagcatcataacctagaaaaccatctctagattatttagttggaattgcatcaattttaaaagcaaagcaatgcttaaaaaacaccattacatggttatttacgagtctggagacccacatgcaaaaccaaactatacaagtcctaagcaacaagacatagccacagtaacaaaattaatataatctcttgttaattacaaggttcaaactgtaaaattgcattaaccagtgaactatagcataaaaacccaacactccgggggcttaaatgcaagttgtcaataaaccgaaattaatcgggccgaattaccgttcaggccacgatcttatttgggctagcaagcacagcgtagcccaaaatgcctaatgggccgaatttccgaaactgtaggcccatgaggatttccaggtttattatttttattaatttgtttgggctgtctcattactgttgggctttattcagtcgggcggaggcagaccggcccagccggttcgcctaagtgaccgagagagggaagggggggaattagggtttcccctttcccattcattgtccgcaacggcgtacaccgcccggcgcaccggcccctcaggcacggcggcggcgttggaggccgtcgactgtcgactttgaagggatttagggcggcgcacggcgaggaggtcatcgacgacccatccactaccgcgattggcaggacggcggcaacgacattactcccatgtggcaatttggtgcggtggcggctcggtggcacacgacggagctccgcgtcgacccgcgcatcctcatgacggcggcgaggtgaactcaacgacggcaactgagaccccaacaacggcaaccaaattgcatccggccatatcgtctcggcagaggttaatccagtagcagacagccgacgacccatcatcctcccaccacggctcgacggtagcgtcgatgggaggtcaacggcggcagcgcctcgcttcggcattaactccggcggcaacgacgatatgggtttagggcttgctccaagacggcggtttcctgcgacggcatcaacgcaaggccgacggtgtacccaacagcgacggcgaacgacagttgacatatctccaagtccgactgcacagactgagaatatgtcgtcgcgttcccggcgtggcgtcatcagagaaagagagagagagagagagaaacagagagatgcgagggagggtgggcgagacggccggttcggcccagccaaattaggcacgtctctagtccaaggtatcccatcaattttagtgatttctctcacactgttttctctagttttcatcagataaaatagatgcatatagatcaaaagcagaaaattaatctactgctggatcaagagcaggatcaaatctactgcaagcaaagcatccataatatgataaaaacgagaaaatatatataatcaatcaataaaaacatatatagaccgcatacctcaatagacacatgcccggatgtatctatatatgaattagtaaattagtttagaaactaatcttactaattaccgtgattagcgtggttgatgaagagcacgtatttatctcttggtagtagatgtcaggtgcaaccaagcctcgcatcgcatgtgcgtgtggctgacgtgcatgtaggctggccgaccggccgcctggtggaggcccgactgactcgggccatgcatgagattgatcatgcatgtggctgctccgtgcggcagggcaacacgcgcgcatgccgatcagcccatggcctgaagtctcgcgcgcagacgacggcgagaatcgatgcgcacgcggcggagccgtgagcggcatcgcacggcggctcacgtcttgcaggccggaacgccgtccgtccacggccggtcgcgaggtcctccgtggacggtcaagcagccacggacgacaattcctctcctggctgcatcgtcagatacgcgtgcgacgtgccactgccatcacggggaggcgatcggccggccatacttgaccaatcggcatcgcgcgtcacgtggaggagacgccgcgcaggtgccgctcaacggacggtggccaacacgagcacggcggcggctcgcccatcggctgcgctacatgcaatcatacaggaataacgacaattagattggaacgacaaatcggagatggtagagctactgataacgtgttgtaaaccaacacgtctattagcggatcatcggatccgttccatgtccctcacatagcagtagaggcgtgagatgatgtaaaatacccgcgcccatccctttgtcctcaagaacattgtagaagtagacaatgaacacagatatagggtggagctctctcttcattatagatcttatctggagtacaagctagccattaggcattagatgtcacaccctgcccctgtatatataggggtcttaggaggagatagatcttatctctactccggttcggattggtccacaagaaaggatctttatctccccaggagataatattccgtaacacttttctcctgaagatgaagattaagtttttttacgcaaaaccaggtggtattaacgtatgattgattgagttttaattattataaacttgaaaaatagattgatataatattttagagcaactttcatatagaaagctttcgcacaaaacataccgtttaacaatttgaaaagcgtgtcacgaaaatcttaatcttcatctaacttttgttggagaaaagaacgggacctttgtattgaattcactatttgtattcaactcactatatatatatatatatatatatatatatatatataagaatatcataggtaggaaattattaaatgcgtgatttctttcgtcaaagtgttagcaaccaaatttggtaacatcagcatcggagagaagattagatcgaagcaaagtcggaagcggagatcgagtttgaaaatagggtaggaatcggctaaagtccagatcagctacgacaagatcggctgagtctgagtcgagctaaataagccgatatagccgattccgacaataccacttgtgcgcgacaccggttcaagttaatgtacttcaagatgattgccacgtatggatagagtctttcacatcctgattttcgttttaggatttataaattatttaataaagtattattagaatttatattaaatgtttattaatttacaagtgaagttaaatgtgggaaataaaatttcctaaatataaagcatggatggatttattttttattaaattctccatggttaattatactctctggaattttctcggatttttcggagctcaattcctaattttaatcatacaaagaacatttcagtaattatccacatattaaattaataattaaatggtctgtttttaatattcctaaatactttgagtgtccaagtatgttcaagatttttcttggaattatttgagcattggaagtatttttaacaattcaaagatcatttcagtgattaatttaattggaaaagtaattaaaatccccttttccttttccggctgaaactggaaaagttcaccttcagtcctcggcccattctcccttcctttcagctggctttattcctcctctgaagtccatttcttgtccctccttcaatcgggctggagaaaaagaagcccagtcaaagtctaattcgcgttcctgccacagtgtcgtcttcaagcttggacatagcccgtgcagccgccgagccgtgtgtaccgctgccgattcctccgcccgattcgctcgattctctgaaccgtttcttgaattagttgagggtaaatattcttcctatcctcctctatcttttcccccaagaatcggactttatcccgaagaaatcaacgcggaatcgagctcgattcgagtttatctctccaccaaaccctaggttttcccggcgcgattccttgcgttccaagcccgatctctctctcccatgcctataaatagaaccccaaggctctcctctttcgtttccaacctctagctcgagctcccgtgccctagccgtctctccccacgctagccatctctctcctcctccggccgccgctccagccggctatagccgtcggctccgccatcaccggtcagcgccgtcgcctccatcggtaccgcatcgaagagaggaagagcggcctccacttccccgaagccgaagacaaccggaaggccattgccgacgtcaagccgatctgcttcgcctccatccgcgccgtgccgtcgcctcagtcgtccccgacttgtgccgccacctccctcggcatcgcagcaccaaggagaagcccgtccacccctccgttgccgctgctcgtcgccgaaaagccgctgccgtcgtcgaccagtaccttgccgccttcggagtttgtcgccggccgtcttccgtcgtcgttcgtcgtcgtgccgcccctcagtgagttccccgcgtcgtgctcgtcgcgttggtgccctccgtttcgccgccgtgacctagatcgccggtgaccgtgatgtcccgagaggccgttgatgacgtcatcgatgacgtcataaagccctttt

SEQ ID NO: 15167 - DNA, 664 bp, Oryza sativa
tctcatgacaacacacatcacatcacatcattgacacgtgacaaacacccgtctctcctgcacatgtcgccctcgaccaaaaggagaggaaaaaaaaacatggactgcacgaatctcgatgcactaccctacttcggtggcggcgctgccacgtcgacaagcgcgccacggcggcgatcagctcgccggcggcgtcggagccggggccgagcgtgaagaacccgtggtgctcgccggcgaactcggcgagctccaccggcttgcccatggcggacagccgctcggcgtagtcgacggcgcggtcgcgcagcatgtcgaggccgccggcgacgacgaggaccggggggagctcgacgccgtccatggcggggctgtccgggccgaacgggttcgccatcgggtggtccctcgtggcgcccggcggcagcgacagccgccagaaccggtcgaacaggtccaggttgaggaacacctccgccgggcaccccgcctccgacggcgtccggctgacgccgccgaagaacggcattagcaggacgtagcctcggatcgcgaccgggtcgtcgggcgccgccgccgccgccgagccggcgcgcacggcgaggtggtgcgctatggtgccgccggccgagtccccggtgacgaacacgcggccgaagtcggc

SEQ ID NO: 15168 - DNA, 675 bp, Oryza sativa
aaaaggactaaggcagggagacccgttatcaccaattctctttaatttggtggttgacatgttggcaattttgattaaaagggcaaatgacaaggtagctttcatggggtagttccacacctaatagataatggtctatctatcctccaatatgcggatgatacgatcctttttatggaacatgatctagaagaggccaagaatctcaaacttgtactaagtacattcgagagattatcgggtctaaagatcaactttcataaaagtgaattgttttgttatggtaaggctaaggaggtggagaaagattatatcttaatgtttgggtgtgattccgggaagtatccttttaggtacttaggaattccaatgcaccacaaaaaactatcaaacaaagattggttcgcaattgaggaaaggtttcaaaagaagctgagtagttggaaagggaagcatctctcggtaggtggtagacttgtgttgataaattcagtgctcagcagcttggctatgtttatgctctccttttttgaggtacctaaaggtattctcgaaaagctagactattataggtctagattcttttggcaaagtgaagagcataaaaagaagtacaggttggccaaatggagcattttgtgcaaaccaaaggaatgcggcggtctcgggattcaa

SEQ ID NO: 15169 - DNA, 7555 bp, Oryza sativa
gtgaaaaaaaataaaattcaaaaaaaaggaaaccctagccggccggccggttatgccgccgcccgcccccgcctccagatccgggtgacctgaggcccgccgccaccgaccacgtcgccacccgcatcgtcgtcggccgctcccgccgccgcccgccccggttccgccgccggccaccaccgtcgctgcccgccatccccacccccgccgcctccagatccgggcagcccagccgcctccaaatccgccgccgctcgccagccccgccgcctccagatccgccgccgcccgccgcctccagattcggacgggaggagtctgtcgccgccgaccacatcgccgatcgctcccgtcgccgtcgaccacatcgccgggcgggaggatgcccaccgcccgcgtcgccgcccgcatcgccaccgttgtggacgccgcccactcaccggatcgccgccgtcgcccgcatcgccacatcgtggacgccgtccgtatcaccacatcgccgccgtcgtggatgccgcccactcacccgcacccccgccgctgagctaggtcgccgacgccgcccactcgcctgatccgccgcccccgctgcgcgccggccgtcgccgtagccgcagccgctccctagggcggcggatccagccctcccgagggcggcgccgccggatccgccgcccgccaacgcatcgccgcccggcggcactctcggagagggagagggggaggagaaaagaaagagaggagaggagagaaagagagagagagagggggtgggtaaaaaatacagggagagatagaggagatgagttaaaaaaatttgaagtggtgagagggaaaagagagcgggaggagatgaaattggggtggtatttttgtatgcggaccacttaatgagccgtctgcgaaaatagatttttgcatgctgttccttaagtggaccgcatgcgaaaatagttattaaaaaattaatttcaaaatatgagaacttcgaatccaattttaggatattaaatgaactcaaatgaaatagttgtcaaaaacaaagttgtagaactcgttgagatctaacaattttcttttggtcatttctccatccgagtttcatttaactatataaaatttgaactttataatataagaaattcaaatacttttttcacatagtaaatgatttcaaatataaaagttgtcaacaacaaagttgtataacttatcaagatctacaacttttgtattggtcatttttctatatgactttgtttgtacagtttaaatttgaattttcaaaatatgagaacttcaaacaacattttcaaatacaaaatgatttcaactgaaaaagtcatcaataacaaagtggtataactcatcaagatctataacttctattttagtcatttctttatccgacaaagtgatttgtaacattattcgcaaaatgtatatctcttatatagttttatagaaactgcataagagatgtacattttgtgaacaatcttacaagtaactttattagatgaagaaatgaccaaaatagaagttatagatcttgatgagttatacaactttgttatcgatgatttttttagatgaaatcatttactcttcaaaatattatttgaagttttgaaattcaaatttttaattgataaaataaagtcataagaaaaaatagccaaaataataccaataagaacacaataacatgatagagcatgattttagaaacatttagaaaaaaaaatcatccaatttagagttcatatgagtgagatacactattttcaaattttattttcgcatacggcttcttaagtggctcgtatggaaaaatcgatttttccatgcgggcgcttaagtgagccgcatgcaaaaataagcttatttttgcatgcggccctcttaagaggcccgtataggaaaatcgatttttccatacgggccacttaagcaaccgtatgggaaaacgccagtagttatgatccgcatggaaaaatgatggggcctcgtacagaaaaattattttttaagtagtgtgggatgacttaattaatagcttgtctcatgtgctatatgtttagggccaaaatagttacaaccttcgtctcattgatcatcatctgatcattaaatgataaccgatgctctctcatctcatcatcttactcgtcatttgacttgttccattaactttttataatttgtgcgtgtttccaaatgctgcacgcatatgagcagcactggatccaggactactccgtggggagagtgacggatgaccagggccgtagggcattcgccctggtgaataacctaggcggtacgagaagagccgtgctgatcagcacaaagaataataggcagctggagatggctccctacggcgattgcgtgaagctgtcgatgctgtggtcgcagggcgtgcagctccccggtgggtacagcgaagtaagggtgctcagtgacctctccatgactctcaacggcatcaacggatttgtcaaggaaggcacggtcgtgggcatctacaatgcggagccacactctattcatgccatctggaagtttgatccaattaacaagtgagatgatgtactactatagtagtagtaaacacgaaatattatatttgcatgcacttattggtcatcttaatttgtaataaacgtgcacgatttttcttccgccagaaaatttgtgtgccattttcggatcaggtttgtttggcaggaaagacctgccaccagaagccgaattgtgtgtatcgggtttccaacaaaatcgagagatatcagcaactattagaagattgggacctagctccttataatgttgcgttctccacaacatctgcgagtgcgacggagatgccgacagtgccttagagctcttcgacaatgacatggtcatcgataacgccttccgcgcgcctcgctaccgtgcagacccacaccaccatctatgccccttcactattgtcgacgccttgcccacacttctgcgtggaggaggaccaagccgctcccgttgtcccccgctctgtcccccatagcctccatcctcggcgcgcagaggaaatgtggcggccagccacgcgtggctgccttggatggtactgggaagagaggagaagatagtgctagccactgaaatgtgagggtgtatgggtcccacgctgacttgtttgccacgtcagctaaaagcgtaaaaccaggcataatactgcctatgaccttggtgatacgaatttcaaactcgacgacaattgatggaccaaaagcaaattaactcgttcataaatatagttaaatggaataagttcacttgaggtcccttaacttatcaatgaatccgattttcatccttcaaccgaaaaaccagatacaacgggtccctaaactatcaaaaccagtgcaaagcaggtctctcagcagttttgatggtggttttggctgatgtggcgcttacgtggccagtttgacttgatccccttcctacgtggcggtgacgtggcattggaagcaaaatataaaaataaaaaataaaaacaaaaatgtgaggcccacatgtcagtcagacaaaaggaaaaaagagtgggacccacctcctctctatccacggacgagtggacgacggttgagggagcgaccgacacctcctctctctccctccctacatccttcctcaccagccggcgagcgcacacggagagggaaaaaggcgtcagccagcgaggggggcggagctgctggccgcccgcctgctgcgtgcggatcagcccgccctggatgattctctgccgtagcgtcttgccgccgtgcggccagtcgaaggagttgacggtgttcagcgtcgccgcgtcgacgcggctgtccatgttgaagctgatcggcacctcgtcgccgacgtagtacgtgttccgcagcgacgccagcagccgccgcagcgacttggcacggttctgcgtgatgatgttccccgagatccgcatcctgttccagtctgcgtgaaatccatagatcggttagagctttgatgtagtttttggttgcaacaatggcgaatgagaactttgaggtagaagaagattactgggcagagaggtggggtggagggtggccatccagagaaccttggagatggagttgcgggggaggaggacgaaggcgatgtggttgatggcggagtcggcggccatgcggaaggcgtccttgatcttggcgtcgacgttggcaacggtgatgatgacgctcgggttgtgcatccggatgataccacgcatgctagagtagacggcctggaggacgggcacctcggagtgggatgggccggagagcgcgccgacggcaaggtcgaagatcttgaaccgcctctccttgcacaccaccttgggccacttgagcaccgtcgccgcctcctctgcaggggtagtgcccaccgccggacacgacgaggtaagccttacagccgggggtggtgcagaaccgctctagcagcaacgccagcgcgtggacctcgctgagcgagtgcgcatagaagagtgcgtccaccttctgcgggtgcatggcctcccactgtgtgacgtagccggaggtgagtgcgcgccaccactgctcgtcccgcatctgcacgatgtccttgaagatcaccgtcgtctcggcgaggtacgcaagacggtgcttgctgtccccccacgtctccttggccgcaactccacctccatcgctgacctcccgtactacttcgtccacaccctcctcaccgtcatccacgccatcctcccgccgccctccaactcccgcaaccctggtagcctagctccgcgtcgcagcccgccgaagagtacggcgcagtgggcggcggccaacgggcatctccgcccccctcgccggccggcgaggaaggatgccgggagcaaagaggaggcgccggtcgctccctccctcgtcgtccactcatacgtggatagagaggatggtgggtcccattcttttttccttttgtctgactgacatgtgggccctatatttttttttatttttcatttttatattttgcttctagtgtcacgtcaccgccacataagataaagaccaagtcaaaccggtcacgtaggcaccacgtcagctaaaaccaccatcaaaaccgctgagggacttactttgcctggttttgatagttgagggtatctggtttttaggttgaaggacgaaaatgggattcgttgacgagttaagggacctcaagtgtacttattccaagttaaattaaaggaataagatcactttgactcctgaactgaccactgaatctaaatcgtatccctaaatcacaataccagaaatcttaacccccaaacttgcaaaaccggtgtaatttgactccctttgtggttttgaaaggcggtttcgctgacatggtgcacacgtggcagtgttgacccagtctttgtcctacgtggcattaacgtgacgcttatgtggcattaaaataaaaaatatatatgcggggcccatttgtcattcacccaaatatatttgtggtagatcccacgtgccatcctcccttatcccttcgtcctcctccctctcctccctctctatctctccctctttctcttcgcgcgtggggagtggcgtccggatcggcggcggcgatggggggcgatggacgaagcggcagtggcgggtgggagggcaggcgtgcagccattggagttgcggatccggaggctagatatgcccctcgcttcattcctcctcccgatagactacaccatggccgctgccgctgtgctgccgaccgtcgccggggagctagccactgacgagaccaaacattcacaaatctcaacagggctagccgcctaggcccaaggcagagctggctggctactaggaggacgcgggagctcgggtccctcggcagcggcgcgggcgctccagctctatctgtttggccgcgtcggggaaggggaaccatggcggagagggtgccttgcttcgaagggggatagggaagaggacaaatattgcccgctgggcagtagccaaaagcaaaggagtgctgggacacatctatacacagctaaacaatggcgatagatcctacaatgctcaaaactaaaaccactacatcagttcaacatctcgaaacaagaaatttaaaattgaaaaaacaaaacaaaataagccacgacaaattgtccaaatttcacacgccgaccagcacggacttgaggaaactcctttctcagcggcatggctccggcgtcctcaaaggacaccgcttctgacgtcgacaaggacggtcactgctccatacacggctccggcaacggtgggagggtgtcgttaatggcgctgctggagtaggcggagcggcggtgggcgacggtggccggggacgccagcctgagatgcatcgagggaggtgatgatgaacgccatttggtgacgcccacgccgatcgtcgtcgcgagcaccgagttgcggctagctatgccggccgccttgaagatgcttgggtcgtacagcaccacggcctttaagccgatgaggtgctggaagaagtagatccccaggacggcgatgacgatgcgccgcaccggcggcgtcgggtgcaggaacgccgagggagccgacgccgacgccagcgacgcagcggccggcaaggagtgtggcgaagttgggggtgaggcccgtgaggacggagcccgcgaggaagatgcaggcggcgagatagaggaggggggagagggaggaggaagaaggaagggataagagatgatgacatgtgggacctacatgtcagtgggtcccacacattttttttgtgaatgacaaatgggcccgcatatatattttttatattaatgccacataagcgtcacgtcaatgccgcgtgggacaaacatcaggtcaacactaccacgtgtgcgccaccaagggagtcaaattgcaccggttttgcaagttcgggggtcaagatttctggtattgcgattgagggatacgatttagatgtggacagttgagggagtcaaagtgatcttattcctaaattaaatgtcccccattaacaacacgaaggcccacgagatgcaagacccacacctgtgcaagatccaaaggaaaaagtacaccgaaggtccctcaacttgacatcgagttacaaaaatatcctcaaaccgcaaaaccagatatccggcaccctttaactaatcaaaaccggttactttaggtcctccggtggttttgactccagttttgtccaacgtggcagctgagtcagcgtaggacctacgcgggccccacatgtcaggtgtccacgtcagcacctctctttttcccctcttctctttctctgtttctcctctcgtgccagatctcaccgagaacatggtctgcaccctgggcgcggcgcgttctcgccactggtgagggcactggtgccgctgctctacacgtgcgccgcgtgttcgtcatcgcggactgggtgtacatttgatggcacgaacatcactgagaggatcataaacagcaccaaggaa

SEQ ID NO: 15170 - DNA, 18331 bp, Oryza sativa
cgtatccttggcaaggacaatggcggcttcctcgacaccctcgcctccgtcctccttctgaaggcgatgacatcggcgatgccgccggagcggataggctgccgcccccgacgtcgcagcatccggagccgaacccccttacgctgatatggcgagcgttcctgaagaagcaggtgagccgacgacgaggcatccgcggccgcagccgccgccggcgaggagcaggaggatgacgccgttgcgtccatctcgcggcagcgactggcacgtgagatttgggggagaagaccccgtgatctggcatgctagctgcggccacgccattcgggcggtccggcatcctgccgatgcaggcgctcagccaccggcacaccgtcctccaccgtcatcgtcgccgccgaacccgcggatgctccgggaagccagctacttctcgggctccgtctcgacggctcgccgagacagctcgtctcgtcccttgagcgaaccggtagcagtagcagctacatagccacgacgccaagaaccaccaaatcccctgccgctacgatggagacgaccaccacgacgccgcgtccagcgtctgctccgtggacgctggcccatggccgccgcctcctcgtccaactctttttgctcgaggcggcgcgagctcaagacataggtctccgaccgcctcgcagccaatgacttggtcgagctcgtcggccacctgggggaagctcgcgagaacgaggaaggagagaaacagagaaagagaaagagagagagagggggaggaagagagaggtgctaagtggacacctgacatgtggggcctttgtggggctcaccctgactcagctgccacgtaggacaaaatcggtgtcaaaaccaccagaggatctaaagtgaccggttttgattagttaagggacgccggatatctggttttgcggtttgaggatgtttctgtaactcggtgtcaagttgagggaccttcggtgtactttttccagatccgaatgcgctgcttcagcccgcgagatggacgggccatccacaaactcgaagacctatttcaggcccagtaactcaaacggcccaatacaacttttaacccatcgatcgagtgggctctctccatctcctcctccggcggaggccgcagcctatacacaccgacaccggcgggcagcggcacccacccatacacatgcatggctgcggcgcgcgtgggcctcgtctccgtctccgtctcgcacgcgctccacgcctccagctcttccccctcggggcgcccacctcgcctccgcctccccccttattttccccgccaccaccaccgtctcctccccacctttccccccaactacacgggcccctcctccgccgctgccgcgagactccgcgccagcgccaccatgtcgcaggccgccgggaacccctacgccgctgagctcgccgccgccaagaaggccgtcaccctcgccgcccgcctctgccaggtgccctcttctctttttttttccctctctgcttccccactactttgcgctgtaaggaccagaccatatctcgtcgtcggtctgaataattgctcggcttcagcggggaacaaggccgaatgcgcggactgtaatgtagaccaagactgtgagaacgtgtcgagtactacgattcggcttcagagctggaatggaaatggtggcatagactgtgtgggtagtcaaattagtcatagctgtcataaccaagattaatgttccactagggggaaaaagaaaacaagcttggatgcttgggtgcaggattaatgttccttttgcagtgaatgtttggatgcttggttctgaaggtggaattcatttatgttaatccttgtttttttccactacaggcggtgcaaaaggacattctgcagtctggtgttcagtctaaggcggatcaaagtccggtgacagttgccgattatggtacgatctgttcatctcttcagttgttgccaaggtttcttcctttgatgtttgcaactgaattattgacatgtgtactcatcagaatttggaattcatagagcatctttttcgtactgcatctttgtttgctagggaatgtaaaggactgataggacaattttgctgttcattgttacatggtgcttctgctttatcgcggctcaccattcacctctagttttcttttggttcatgtagggtctcaaatattggtaagccttgtcttgaaaatggaagcaccagcttcttcttccttctctatggtggctgaggaggtaattatcatctgtttctgtttctgcctactggtttcgatggacagcgcacaagtctttcacaattgattgggatatgtactcatgtaggactcggaagaattgaggaaagaaggcgcagaagaaattttagaaaatatcaccgagctcgtaaacgaaactatcgtagatgatggtacatacagcatttacttctctaaggaaggtatcctctctgcaattgacgatggcaagtctgagggaggtccatctgggcgacactgggtgctagatccaattgatgggactaaagggtgagtttgctgacctaaatctctgggttgcagaatatgctgctgcagtcaaaacataaaacatcagttcatccccaccattcactgcacaatcagaactcatgctgcttctttattacagttgtttgtaatgagcatagtgcagtaaatggcactacttttttccccactttgaaagaacagaagcctatcatagtcttctcttattagatgcttctaacttctaagctgcactgaagtggactaattaatatagcatgaccctgaacacacactaggttagttgatactgcatgtttcattttcttttcatctgctaggttgcatgcaacatatataagaggtcataaaattaaaagccatgtaaaaggcatcctgtcaaattagtactcttgtgatgtgcatatctcaaacttctgacccaaattcacattttttttacaacgttactcagtttcttaaggggagaccaatatgctattgccctggctctgcttgatgagggtaaagttgttttgggtgtattggcttgtcccaacctttctttgggatcaataggcaaccttaatggtggctcctcgggagatcaagttggtgctctcttttctgctactattggttgtggagctgaagtagagtctttacagggctctccagcacaaaaggttacatctccttttatttcatattataactttgacttacttttacctatttgagaatggaactaattttttaatctgcttttggttattttcacttccagattagtgtctgttccatcgacaatccagtcgaagcttcattctttgagtcctacgaaggggcacactccttgcgtgatttaacaggctccattgcggaggtttgtcctgaattattctttgcctagtacaggtccacgagagttacttgggtaatctggtgtttgaatgctggcagaaacttggtgtccaagctcctccagttagaattgatagccaagcaaaatacggtgccctagcccgaggtgacggtgccatttacttgcgttttccacacaaaggttacagagagaagatctgggatcatgcagctgggtcaatcgtcgtgacaggtatgaaggttctctttttgaacattgaaaacatagaacccaacaacctgaaaaaaaacatagaacccaactgaaacattttagattgatattctgcttgtgctaaaacgtagaaaccaactgaaacattttagattgatattctgcttgtgctgttttcagaagctggaggtctggtgacagatgcatcaggaaacgatttggatttctccaaagggagatttcttgatctcgacacagggatcatcgcgacgaacaagcagctgatgccttcactcctgaaggctgtgcaagatgccatcaaggagcaaaaccaggctgcttccccgttgtagtagctgtctcaatccacaatccacaaatatcataatgtttccatataataataattgcagtgctgcttccccatcaacattactttaaatgtgtgtacagcaccactttgttgttgttgctgctgcaaattcagtatcttattgttgcacatttctgcatctaattggtgggtgagctggcaccacatgaatgttctttcatctggattcagaagaaataattaaattggcctgattctccctaactcggggcaatattgctatgtgagttccaactactgtggtaggacaaatattttaatagtagcaatgatctcaggttgtgcaaccgatgtcatatactatgtactcatacctaatccactgacgtgattagtttgatatacctaaatcactggacattatcagtttgactccactctcactctgactaaaagcatcacctgctctccaccacgcctcagcttctgccatgtcggagctgccatcgccgccgccgccggccgccggcaaccagtacggagcggagcacgccgccgccaagaaggccgtcgccctcgccgcccgcctctgcaaggttatttctcgtttcttccccttgttatttctttctatgatcagctttgggattgagatggatgaggttttgcattgacttctggtcgtgttagctgtggccattgatctggggttttgtttacctgatcttgagatgaaaatttctgactgaaattgctgcagctgcttggatgtacttacctcttgttttgtgtcttcttgtttcttcagaaagtgcagcaggacctcttgaaattggacgttcaaactaaggctgacagaacaccggtgacagtcgccgattatggtatttgttgatacgattttacgatattcttcatctgttctattataatatatgaatgatttttcaaaataagtaatttttatttcctaaaaaaatggatatattattatgttttgtaacttgtgctagatatgaacttctgaaatagtttacattccattaccaggatcacaggtattggtaagtgtggtcctgaagattgaattaccttctaactccttttccatggtggctgaagaggtaatttacaaatagtatacatttcgccttatttgttcagttatcacacagagaagcatctttttccattacttgttgacttataaaggattctgaagacttgaggaaagatggagctcaagaaatgttgggacatatcaccaaacttgtgaacgaaaccatcataaatgatggttcgtacagcatcacattatctaaggaagatgtgctggtagcaatcgatggtggaaaatctgagggtggaccttctgggcgatattggatattggatccgatagatggaactaaggggtaagtttttatgtatcatgttcgactgctagaaaattaaatgcaagtattttgctgtgattatagatcatcccaaggtacattagccatacctgaattgttagttttagtccaagctgctctagcacaaacacaagtcacagaatccctactttagatgtggatgaacatggtgatatttcagtttttttggtggaaattggtgatttattttactagtacaattaatttggttcccttgacttgacatgtgttctatctcaatcctgtggtccaatccaacttgcttagcattaaaggtggtggttgttattgttggtgttgtataaatgtggacaatgtgtaacaaactaacaacggtacatactaataatttttttcgccgggccggcgaagcacgctggccgagcttgtaccaaggaggggaagaaaaaaaaattacaaactttacaagtgttcagctgaaatgttgaggatgaagcatcctggccattagatcgagatgcgaagcaaccaagccctgtcgtaacaccgaggcagagtgccaggttacctggctcgtcggcacgaccactataccaagaagcttgccacttttagatttggcatttaactatttgccaccgatatgtcaatgacacgtgggtccacatgtgtcgataacatgtgggtccagtggcaaatagttaattgtcacgtgtaaaagtggcaaatggttaaatatctcgaacctggccctgccattttcaagtttcaacgtcgtccactcatcgattgtgcaatgtgcccatcatgcttccttataatactttgtttatttttctcttcaatgcataatagcatcataaagttatacttcatcaaatgtggaaatgaaacaaataatattcatgcattttgaattagtataataaaaggccatgataccacatgtctttaataaattagttgaaatggaagaacactatactcaaacatgttacagccatggtgtataagtgttggtggttctgggagatataatcacaatgcaatacaaacaaactagtaaagtgttaatcgacctagggtctatttttcttgtaagtttgcatatttggcagtaattttcttatttcacctctttaacaaatgattctgaaaacatcaaagatgtgtaaattatactaatttttagaggtatattatgatttcagatactccatattccaattattgataaaaagtagtgtcctgtgcaaaaccttttgttactattggcatgattcactaaggaatttcctttataatcccaacatttgtgttaatgcagtttcataaggggagaccaatatgcaattggacttgcattactggacgaaggcaaagtagttttgggagcaatggcatgcccaaatcttcctttcaaatcaatagatcacaatggtggatcttcgggagatcaagttggtgccctcttttctgctacaattggctgtggatctacagttgagtccttagaaggctctcagccacaaaaggtaatttatcactttctcctgaactatctgtggattagattattcccttctctgaataatattatctttttatttaccatcttgttttctaacttccaattttagatcagtgtctgttctatcagcaatccagtggatgcctcattctttgaatcttatgaaagaaaacactgcatgcgtgattgcacttcctccattgcagaggttggtccccaaaagttgcatacctaatttgtttctgatatgaataatcacacaagtaaatctgattatattatgcttggcagaaacttggtattcaagctcctccagttagaattgatagccaagcaaaatatggtgctgtagcccaaggtgatggcgccatttattggcgatttccacacaaacgttccaaagaagcagtatgggatcatgcagctgggtctattattgtcacaggtatataataactatattcacaaaaaaatgaattcaactaaagtatcgttctgttctcaaataaaataaacattgttcggtaagtttttttttctcatgtttgcagaagctggaggtttggtaaaagatgcttcaggaaacgatttggatttctccaaaggtagatatcttgatcgtgatgctggcattattgcaacaaataaatatttgatgccattagttgtaaaagctgcccaagaggctatgaaggaggaaggaatactaggctgattcactcgtgcatcagatgaaaaaaaatgataattgtgatgctgttttcaatttgtgtgcaatataagtgtttgccctgtgttcttgctgtaccattatctcatatactccttttatatttatgattcatagcaacaatattttttttgtatttgatttataactgttggatcagcattttattgcctgaattattgttgttattatttatcaatgctatgaacctaaattatcaatagttactacaatatggaaacctctggtcacccaatacaactaaatatgcacatcagctgggtagtctgcagggtgcttcttgattgtatccctcagcaatcgctcttgctctcttaggttggaaggaacttcatcataaacatcggtgaatagttcagcgagcggcggtttcggcattctttctgccacctgaatggctttcagaagctgtgaagaattaaaccggcaatttcagatatcatgcatgatgttgaactagacagatatactaccattctgctaaagaaacgttacctcttgcctcacattgttcctgagttcagattcatcttcatcacaccaccagccattcccctgaacccattttctgtacctggaaatcggatctcgcgctgttcgccagtgctcgatctcatcgaccggcctgtatttggttgaatcatcggatgtcgagtgatggccgacccggtaagtcagtgcctgaaagtttaatgttcagtattcacatcaaacctattttatgttgctgtgacttgaaaaattgttcacctcaactaaaattggccttccttccttgatagccatttccctggctgtgtgaactgcactgtacacagcaagagcatcatttccatctactctgatactgcgcattccataagcttgaccacggataacagctccatcacctgcaatagcagtagaattcaagttgttgtacagatcacctgtaaattgtaattgtgatgcatgatcaagaaaaatgtcatacttctgaactgttcactagttggggtgctgattgcccagccattgttgcggcagaagaagatcaccggcgcttccataactgctgcaaagttgagtgcagcatggaagtctccctgaacatttttcatctgtcagaaatgctgggtaacaatgtagtggctgatgcatgatcagtggttgttcatcaatctacctcacttgtgccgccatcgccaaaatacgtgatggcacatgcatctttcttgtccatcttcaaggagtacgcagctccaacagcatgagggagctgtgtactgatgaatcatcaaagaatgatgaacctgcccttggcttgcatgaatttggtgtggacatggaagagatatttcagacttacgcaataggcgatgacaccgtgaaataattcagacggttcgatccatagtgtattggcatctgcctccctttaccataatccagcttattcccaaagcactgatttgcaaattcttgcagtgtgaagccgcgccatagaagaacaccaggttccctgtactgcattcagctccatagtttccagccaagagaatgacagtaagttacttgtcagcaacattgctagcttaatcatccaagttttggagtaactgatatatacctgaggcagtacaatgtcatcaatagtaagtgcagcagcagaggctatattgattgcttcctcaccatgtgaagtgagatagaatgagattcttccctgcctctgagcttcaaagaagattgtatccatgacctggagggtggccatttcattgtacattttcagagccagctccttactgacctgacaagagtgagccacacacacttcagaacggaacacacttcagaacggaaccatcttttacaacatgtttcagaaataactcatggagccttggatgttactaccatacctcttggaatctgcttccagatattgttctgccgtcatcgtcaagaacacggtaacagttgatcctatccctctgagattctggaaggaagttcatttcagcaacaaaggagacctttcctccagggaaatctattgcctgctgtggaaatagttaaaaaaaactgaatttcccatgggaaaaataaatttatctcaacattggccaccaaaaccaaaagtgaattccacttgaagtgaattactattttttagactagaacttgaattgaattattggaaaggctaatcaatatcagtctgacattggtcttgaaggtaatggactaatttatctattaattaatctatcatgataaagtcagcatccttacacgtagaagaccagatgagactcctaatcattgacctcatccattgacaccgaaagcacagcaagtattaaaactaaataatttttgggcaggtgtattaaaactaaataatagtaggattatcacacgtttcctcaatccttgtgagcttaccaaacagaagccaatcacacccaattcattgacgcaaccacacgtcactccatccttatctgattggttcatcacttgttatcaattcaattcacaattgttctgtgcttacttttctttcaaccaaatttctcttcctttcatgaaaactcaggggaggaattgacggcttggccgttactttgcagcccagggagtaagcacagagatgctgtgaaagaaaatgacaaatggtgtcctaccaaaccgaaaaagtaagaaagaaaccattttctcttgttatgtaataaacccatttttattaagataaatggattagttcattccaacctttgcttttagagacggcatgaattgattactactctctccgtcccaaaatatatctccgtgtagctatgaacatagataaacttttgtccagattcatagttgaaagtgaccttgtgccatatacatagctaaaggtgattgtattttaggatgagagagtccctaataaacttttgaaggagcatagttctatagaatatgccctgtttagatcccaccccaaaactttacacccggttacatggaacgtttggacacttatatgaagtattaaatatagtcttaataaaataactaattgcacagattgcgactaatttgcgagacgaatcttttaagcctaatttctccatgatttgacaatgtggtgctacagtaaacatgtgctaatgacggattaattaggcttaataaatttatctcgcgatttactaacagattctgtaattagtttttttattagtgcccgaacacccaatgcgacacccatataatatccggtgtgacacgccaaaactttgtactcctgaatctaaacaccccctatgttattttcatctagagttcaggatatgatccttgcagaatccagatcccaaaaggacatcaatttggcttaaaactatcgaagaataattgtatatgattcagagtttcagacacaagattattctgaacattcgtacgagcagtggcatactaagaatgggtgaaggacagtaaggcacgtgtgctgtctacatacctgatcaccaccggccaccaacccgttctccgcctcctcgacggcggcggcggcgttgctctccccggtgaaacgccggacggagcagaatccccgacgatctcccgccgccgccgcagccaccggagacggcgcaagaaccggcggcgccgagcccaggagccagggacaggcgggcgcggcgcagtgacggcgatgctgagacgaaagcagcctcctcgccgcgcggcgcgcgagctgggacgacgccatcgccgccgcacgccatggcgccatcagacgacgacgaagctgcgcctccaacctcacctatagaacccaagaaatcctctggaaatggcgctcgctgccaagaacaagaagtgacaatgcccagctacgagttaccaacctcttataggtgtccgtgttggaattggatagagatgagatgagatgagatgacatctgcattcatcagccggaagatgggggaggaagaagacgaggagagcaagaaaaggccggagacgacgcgaacgcgagagtgagttggaaagataagggcttgtttacatccagcgtcaaaattttacacatgtcacatcgaacgtttgaacactaatataaaatattaaatataggctaaaacataactaattatatatatatatattgcatctaatttatgagacgaatcttttaaacctaattactccataatttaataatgtggtgctagagtgaacattttctaatgatggattaattagttttaataaattcacctcgtggttaactgacggattctataattaataatttttattagtaaccgaacaccaaacattctataatattcgatgtgacacggtaaaattttacattatggatctaaaacatccccaagtgcgcgagctagctttagtccagctagtagctaaaggcagctgagctgagacggcatgggagagattggaggaggagcagacgggcacggctcactggagaagagaggataacagtggagaggagtggggcccacacgtcggtgacagtggacgggagaggctgacgtgtgggcccggataatgggcgcgaggaccacgtgggggtaggaaagagataggtgacaaatgtcgcctgcttggtagtacgacgatgatgcaagtgacaatggacggacggagaaaggcttggaactttggaaggagacattggttcacttcgcacacaggtagtttctgggtggatgacaaaattccgaagaaattcggatttcgtggaattcaaaactatttcaaataaaaggtctattcacttgaaataggtgctcgtatttatgctaattattatttcagtgatagacaacatacatattaacagcgagacattcgtgatgacttcatcaatcacaaggaatgccggcttagttttccggaggtgtttatagaggtaggatgtgtgtgtgcgcgttcacagggtgaatacgcgggcgttatgagctcttgtgattgtactgcgtttctcagaaaggtctcttcaccattttattatttttcttttgagacgaatccacccagggccatcttaagatttattttgggaaccaggagagattatagtatattatgaaaggtctttgaatcttaagaaataattcaaaggcatccaataagttgacaatttccagaaaaaaaatccaaaactacatgcagttaatgaaaaatcatcgtattctcatagaaatggctatatactctcgggattcgacagaacacctataatcaataaaaagacgcataactccatagcaaattctatactaatataaaaagaaattgtcaccttctaattctacaggccaaatcacttggatgaatccctactgtccatccacgcgatttcattcaccaccgcacgatttcgttcccaccgcaggatgcgaagacttcgctcctccacgcgcgcagacttcgctcgcttctcctcctcctccccatgtgtactgaagccacatcctcgcaggagctctgtcgccgctccgccgcatcctcgccggagacgccgccgccggatcctgcttcttctccaccgccgccgccgccacctcctccttcttccccaccgccgcggccggcctcttccccatcggccgcggccggagccgacgtcctccccatctgccgctgccgcagtccctgtcgccatcgtcgacgttgtctccgctgcctcgctccgctgcccatctcctgtcatgctgctgtacttgaccaatgtgcctataccctaggtgctgaacaataggagggaatctcaacatcgttgagacgtacaggtaatcagactctatcttgcagcttcgattcatcattcaattatacaatttgatggtctttctttgttgactgccaaacaattccccttcagctcactgccatcctcctctccctctgctgtgtggtttgtgtaaagcatcaccattctatacatcactgtgttcattatgagcttggctatgcaatatatggattggccattcaaatatcaatgtttttgttcttggatttgcaatgcttacgaaattactctctgaaattgtgcttgcaatgggccttgtattattttccccacgatgtgggtagtatggatttttttttctgtttgtcctccatatatgtcagctctaaaaatggacagtatgaacttaatttagtagttcaggcaatagaatatgagatcttttacggtgtttgcgaggtatttagaggtggaataatgtgcaccgttgatcaagagaggggcaaggtacggaacaaaattattgtaacatgatggcatttgagtaattaactagtaaaacataggcaatacatttgaattgaatacctccttccattggtcggtgtatcgtagtagctattggtatcgttgtagagaaaaaagtaaatcaaggatactccgttgatttagggattgattcgattatatcaaaaagtaaatcgtgtctcctttcttctctccctttggtttgttcgtgctctagggtttgaaccagttcatctccgacgttgtggccagcagcggagccacctctgctgccacctaaagttcctcccatcacccacaccggtgccggtgcggcagtgcaacctgcgtctctcccatcactagtgccagtgaaggcccgtacgttgccatcttcctcttccccaggttggacatggcgctaacgaccagattaatggcactcaccggcttgccgctagacatggacatggagaccaaatctgcgagtgcaattcacgcatgtgctatagatctacggaaaggtcctctctttgcaactccatctgcttcgttggtcttgcgagaactagttcatgagcaagcaaatgacctaaatgatgatgacatggatactactgaagctgggattggtgatgaaaatgaggctttcatagatgacaaaaatgaaaattatatggatttcgagtacatttgtcaccaattgctagcccaaggccaaaaacatgttataagaacacaatgtaaatctaaagaaaatcacgtaaaagagaacatcaaacaatacaaagtaaatctagagaaaatgaattaagaacctgttacgctagtgccgtgtaaatgacctaactcgaacacagcgtaaatctacaggaaaaccacgcaaaagtgacacaaataagaacatgtaacgctggtaccaggtagatgttaactcgtacagtcgtacctacttagtacctattataatttgggggaggggacaattttaccctttttgctctattaacaaaattatatttttatccttagtacctaagtatatatactaatacttaaataccttttacatagtatctgtgattgagaactgttggatctttaccctttttggaatgcaaacaccgtaaaagttctcatagaatatactaacagactgcctatgttttgatttccatttgtcttaacgtttttagtttcagcagtgcaaggttataattgcttcatggttctcctctctttgtttttagcaaaattaatatgaactgcacatacatcactgtgctcatattccatacagattcaggcgtgatgatatactgttgtgcaggaagaagcttcacaatttcacacaagggatttagttggtagcagctcacacactccctttgagcaaatattgttttcaggtacttatctcatttaacttaataagttgcttgattattgggacttgggagcaactcacacactcccttcgagcaaatattgttttcaggtataatactatcgatgattcttttattctacaagaaatgtgaattatggaccattatactaccttggtaaatatttttgttccagtttgaagctgaaaaacttgtttccggttgttctgattaacgtggttcaaattgattcttagaaaatgaaaagtcttcaataggtcctgttattctgtaacatgtaggttctaattgatgcttagaaaatgaaaagtcttcaataggtcctgttattctgtaacatgtaggttctaattgatgcttagaaaatgtggatttgggattttgttatagcgagcggactgtcatcaatattaacgaaaacctgttgcatattaaaactgcttttatatgctcatggtgtgttcttcaaggttgtacatccttgcgatggacggccttcctaaactaactgcaaaggaattaaaaagtcagcgagcccgagagcggtacacggcactcagcgttgaggagaaggctgcgctggttcaaaggaaccgtgaaaacagggagaggaagaattctgcatctacatcgggcacaggtgatgatattttcattcgatgcttattatggtcaagcttattttatggcaaacaatgctaaaacctgggcacattcaattggattgtagttttgaatcagagtttgcatgaaggaagccaaactgtaaattgtcagccatcatttcagcctgtgccatcctccacacctatgtcttcctccacacctggtaatatcccgtggaatcaatttgtaatatcaaattactctttgcgttttttgggggttcaatctaattgtgtatttcaagaagtgttcatcagtggaaggtttgttatcaacactgtaaaacaggaaagctgtttactcccaatccgtcccccctattaagctagccccaatcccactacttcagcacagtacatcgccactgcatttcttctcatctttcctcttccatagatcattagtaaggtctctcttctgagaatcagctatgacttttgctgaagttttcagtctgcctaatggcgcaattgttggtatggtatatcgaaccacaagtgtattttgtgtttgttcttttcttgctgaaactaactctgaaacatgtttacatttgtacaaatgttgctgccgttgtgtgtgatgtcgatcctgtagaccattatgcaaattttccaaacagtgttagaaaggtcgctttgatggattccaagtaagtcaattccaatttatttttgagtgcaattctaaaactaatattgattaggacactgttatttctgttgttctagcatattttgtttgtaatctttgttctaatggatgcagaggtgagaaactccctgttcaaagaaccagtcctgcatgacgccattaagattggtgtgaactttaggaaccaagagctactgcaaccggcagaacaaaataatgctccaggagaaccagaagtggtgatagttgaagatgatgaagtggtgattgagccattgccaaaaaagaagcgcactggcgacaagggataaactatccctccaggagttgaagtcattggtataccctccaccccttaggcataataataataggacaaaatgtgcacaactcaataattttaagatattgcccctaaataatgtgcaccgatatcatagtatggattttggtttatgctatgtagtgtttgctgttatgaaatataattagtgtcagtggccacttcaatttcaataatttattgtgctatgtatcttcttcctttgagatatcaatctaatgttcttccgttgttttctcagacattacctctgcacattggcttatgcatacctctgcacattggctgaagatcatatttatttttgagcaaattcttgtatctaatatgaaaatcagaatgcatatatgcatgcactttatgaaaattgtgcagtttgtgcataagtcagcagggaatagttagagcttcaagtgtgattgaagcagatcctctttctcatgatctatttcctttttacctattcttctttcagaatattgggttataatatattgggtttaatttatatattgaacataacgtgtcttgcacgtgcatgattactaatagtaaaataaggatgaagcctcctccggcttaagaggaagctagcgaatccagtaacacgaagaagcaagtgcctccagccaaagtcacatgagcggataagccacactagtaatttgtttagagtttatcttgctagtatgttggatttaggattgtgacataaccatccctcggagtttatcttatgaatgctatatcttgtggatatgtagtgttattaagcatcccttgcttgatccttcatccatctaattcactattgacactcacgggttttgcgcgcgagtgcatgatgtgtcaatagcgaattggactttccttattcatttccgataataagaaagatgtggatgtgatgtgacaatcaggattagcaacatgaaaagggaagatagcaattatgaaagttgtgcagacagtcgtttctatagtcgacagtgacaggatcatagcaaagtaggtggaagttccacccgttttgcccagaattgaagagcttgcaaatggattgtatcgatgactttgtattcctgttacatgcatgtactcgctgaatggtacttacactaacataaatctttggagcttcagtttggtccaacttgtacctgacaatccacagtacaagtacgtgtgaatcacatcccagacaacctctaacaacctctcaagagataagatcagaagagaagtcttggagcaaatgccttaatgtaggattcaatgagtttttaggtactgaagaatgatctg

SEQ ID NO: 15171 - DNA, 20423 bp, Oryza sativa
cagcagcctgaaaccatgatgatcctatgagattgatagcttcagtcaagagtacattgtaacataataaagatgagcggattcatacctcgagcatgggactgtcttttggaatgttgcatgctagaactatgttcaaacctgtcttcagcactgacaaatgacatgtatataagctttctgtttttcaatatacaactaagaacgtaggccaattgttaacagaaatagtacctaagcgacgggccatgcctgaaccagtgttatcagatgttcctcctagtacagaggtgacactcactccattaccctgcaatgaccatgaagaggtaacatgggagaaatattagtttctgcaatagttatacctcaaatcataagaacacaattactctctaatttttaccggacgagtacttgcagcagcgtatagatggccaaactttgctgtgttgcatccaacccaagcatagatctaaaattaaaaagaaaattcccatatctcaaaatatatatgttgcaaatgttaggaacacagtacacaacaatggcagcagagagagcataacgtgttgcaacaagcatgaggagattcaaacaaaatgatcatcaaaattatacctaaattagatagcactaggccatggttactatcaaaaacattgtacggtgtttccttatataactagcaacggagagcacaagctatgttgaagtgttatttagagatattgaattagtagcataagcatttctttatcatattcatggtgtaaaaaccatctagagcaagcttaaatcgcctgggaaacatgcttaaaagagcatgcttcatgtcctgagttctgccatacaaataaggtaatataaacatactcaaatgtatgctatttccatataatgccattaactacatcagttaaagagtcagctatgcattgatgagtaacattttgatgattaataccaaagccaggaattgagggagctaaccatcagttaaagaaaattcatgttctcaaaacagatatgttgcagatattaggaacatggtacacaataaaggcagcacaaagagcataatatattgcaagcaagtacaacgagaatcaaacaacatgaacattgaaagcttaaatcacatggaaaacaagcttaaaagagcatgcttcatgttctgacatacatgtacaactaagataatgtaaacatattcaatatttacggtattttcatataacgcacatcaacttgtgcaattaagacttaagagtcagatatgcatcacttgactaacattttgctgcaatgccaaagccaggaattggaggagcaaaccaaaaaaaaaaaaaaaagaacatctttattgatcaattatcagcatctctttaatcaattatcacaagcacaactcagatgaactgatcttttttatggagaacttgatccaaacaacatctgaaaactctagaaaaagttgttacctagaacaatttatattttggaattacataacttggaaccaggaaaccatgtttacctgcttagagaaccttattatctgaaaatggaggataacatcatgcaggtcctcagtgaagcaagtaacctgcacacctccctcagatgatggatcacctgaagattcaacttggctgtctgtccgagatgaagaacccaccactaaatctgaaaagcttgttctcagttcctctgaagccataatgtgactctagccctgagataagatcagcacatttgcttagagaagcagacaacatggtctccacaacaaaaattggaaaatgttgtagcagcagtttgcagtgagatggcaactacaagatccatccatgggtgagagataatgaaaatgaagaggtaaagtcatcagattggggtagaatttacaaagcagagcatgatatttacagaaaccttcatagacatgcggctgcttgaattataaacttaaaatttcacactataataaatcataaaaggactaaacatagcaggcccaccagagctcagcccacacatcattgccaccaagaattcagcttccggtgatgtggctgttcattcggtagatatgtttttattgataaatacagtattacttagaaaacaattgagtatgagtagacaccaaatcatttcagtagttaaagagaactatggaaaaaatatggtgactgaacatagacaaacaagttaaggattaattatggagtgtagatgaacagtaagatttgtggccactaataatcagcctagctgatgactaccgagactgcagctacagcctacagcagggaacatgccaacaaggatcatatttaatagttcaaattttattcggacacagtactacaaattacagtaccaatcagaattatccatctaatctattgcacattttgaaactgagttgctccaagattccagttcacacagcaaacccaagttgtaaagatctgttcaacctattcagatgcatcaatgaccaatacatggcgcatgtgtgacataccaaacaccatgaactcatcgtaaacaactgcagctcccatgaacaaggatcaactaaaaaaaaatacactaaatgctactaccacatgatgagtaagggttacttcccaaggatcaactgaagaacactaaatgctccatgcgggttacctcccgaacccacctcggaagttggcaaggatggaaggatggaggatcgccggatcgacagcgacgggggaaaccgccggaccggggtggccggcgcctgcctcctcccgcttagaggctggagcagcggggagacagcgcggggcagagtgactgcaggggaggcggcggcgctgcgcggcggccggcggcgaggcgcgtcacgggaggggaagggggcggcggcggcgagagcgtgtggactccccggagaaggaaaatcgagaggggactgcttcgctcaggcaggaatgggctgggccaacagtgggccgtcgccttcttatgggccaaaatctctttttcttttcccactactgatcacattttccaaaaaaaaaaaacgagaccaaaaatctagtttcttctctctatttatcaaacacttttcgactaaatcaacagtcaaaatcacatgtttatggggttggaacatttttttttgcaatgaaaacaaagcaatatccttataattgaaaaaaaaaaagtacttttagcacaaatactctataatatgaaacaagagaattatactaaggttaaggatacaaacacatgtagtcagaaaaaaaaaagatcaaactaaaaattgtgtggtgggtttatactaaaggtgtagcctttttgtattatgcaattttagactaaacgttatacaaattaaggtgactaataaatatggggaaaaaaatgtcagcttttgtattataaaacaaaatgctgatagctcgacaggttccactggacactaactggagtagaaagatgcaagtaatcgcagtagtactggtattaatctacacaactggtattgaactattgacaagcttgcgatcgaatgtatctgattcacagcaactaagatgtaaatgactatgccgtgcttttccgatgtacaatgctacactggaaagtgcaaaagctaacaagacatgaatatgatcttgagttgttgaccagcatcagcaagcagtttcagcagccaagtatagatactgttgcaatcttctgggcgccgcgcttagagcgagtggaggtgcttggccttgtcgatggcctccctgatcttccgcgtgggctcctcgtagagcatcgccgggtcgtcgaaccgcgcggcgaggctgggctcgccgaggaacgcacggaaggtgtcggccactgagctggacagcgactccaggttgtagccgccctccaggaagaagacgcaccgcccgccgcacagctccgccgccacctcccggatcctcgccgccagcatgtagaacgtccccgtcgtgaactgcagccccgccagcgggtccagcgcgtgcgcgtcgtacctgcaaaaacaacatgatggatgttagtaatcacttcttttctgcttctatagcttggtgaattgtttggcagcatcaagattcaggtgatgtgtttctatgcacaaacaatgcaggatcatgtcaacttatttcagcatgtttagcgtggttctgttaggattggtgatttggaggcgtcaagattcagaagctatgcacagaaattcattcgggatcatgtcgatatcttttcggtatggttttttgattcaggatctttggttcttttcggcttggtgaaataattggcagcattaagattcagaagctatgtacaaaaattcattcaggatcatgtgaacctgtttcagcatggttctattctgaaagatgaaatgtgggaggaatgaacctacccggctgaaacgaggatgatgtcaggtttgaaccgctgggcagctggggcaataacctcatcaaacgcgcacctcatcgcgtaatcgcctgagccaccgggtagtggcaggttgagcgtcgtgccctcgccgttgccctggccaacttggtggatcttaccggtgccaggatagcttccaagctacatacaccaattcattgtaatgttgttgcaagcccagattatttttcctgcactagatttgtaaggtgacaagttttaaagatgaggtaacaaacctgatgagttgagaggaagaatatgtccggatcctcataaaaggcgtcacatgtgccgttaccgtggtgaacatcaaaatctattatcatgacccgctttaaaccatgttgattctgagcataccgagctgccactgcaatgttcccaaagacacagaagcccatgggaccttcaggaacagcatgatgtcctggtggccttactaaggcaaagccgagcggtggcttcgggcccaactttgatgctgcaacctaggaaaacatagaacatttctcgggaaatgggcactgcaaaggaaaatatactgaaccataaaatacaagcaagaaaagtaaagaagataaaacatcaactgagaaaaaactcgttaccactgaatcaaccaatgtaattccagcaccagcagaaaggagacattcttggaaagtctgtgaagaaaaataaattatttaaagagaggcgatatgtaaactctcataattcgagttctagtattttccatcgacaaaagaagtaaagatggaagcattcttgagtagtaatccaaatacacatatggtggaagtattttgttataaagagatctggttatctggtacacaatatgaactatggtttgccctaatgtgagttttagcctgcagtagaaggtattagaataactgagttgccaagtgtagaagccctgcagctgttcctataaaattggatgaaccacttgaactaattgtttttgccattcatctcatgagtccctgaataatttgaggaatgaattttattccattttataaagggctttctggggttttacttgatttgatacaaatgaaattagtgcagtaactagtcagtccaggcccattgatcaacatatgaatggtagaaaactagaaatagaagatttaatgatatagctgctgacagactggcaagtgcatcgatgaaataataatgcgcagaagactgtactcaataaccttccaacgagaaaagcattgggggaataaaaacaagagggaatgtgcatagatcattacagtctgggtagcatatgtaggtccagttccttcaatgaatatcaaaccttcatctgaagccctactcatagcctgcaaaaatgaccactctaaacaaaccgttcaaccaaatattatgtaaagaacagctgcataatccaaaaatctgagtggtgcatttttcgaagaaaaatatttcaatccttttatcagtagagaaaaggtaacgtagataagaagcagctgctccattctgttctatccaaaacatgtcaataccaaaaataataccactgtgatgaaaataccttttcaagtccagttatgtatgatcttgaatgaactagtgcaatatcatcaagtgaagcaggttggaaatcttgaatttcaagaacctgtgaaccacgatgctggacacaaaacaaataagatgttatctaagcacggagtaaaacacttatttttcatatgtgaacattttgaatgtccaattcaagagaaacagaaagcatttcttttgtccttttttttaatatgtttatctattggtagttctgtacgcttcagcctagaatgaaagaacatgttttcttaactgatgtgcagtcattttagaaggtacagacagtaaggcctcagttatatagaacattttaaaacttacgaaagggcagtgttattttacttatatataccttcgaagtaagctccagtttttcgagagcatcaactattgcaggaactcttttgttagtttctggatgcgcttcctgcataccagtggataatagcacaatagtgatattgattagatgaggcatcttagcatatcatgactttgcggagcactttctctttcaagcctagtattttgcacacaaaagcatataattatacagtaagatggtaacggaatgtagtctacactaaaaataaagaatgcagagaaattacagttgtaagacagtaacaattatataggatgcactttctaatcagtactaagttatcagttataaacatttaagtgaagtttggatgcttaagttgctgaatgcagagaagctcatcacacttgaaaaccatatctgaaagctgctctaaattaaagcattgaaatgagcttaccttgttatgacccatggcaggagatgtacaatagagaatatgagcatcacgaagcaaattgtcaggcaaagctaagtcttttcgaacaccatttgtgtctgaaatagaagttccattatggcttggtaagcagtatgcaatccaacacccattatgcttctgttttcttccagtaatttgtaagcttctccaggttaagggatgatgacttccaaagccacagtagtgcctgagcataggcaatatccttcctaaaataaaaagagtcagtgcccaaaatatgttaaacacaaattatacctactgcatttattgagtaaaagcagattagataaatcagtaacacatgagcatagagcagtaaaatacctaaactaagtggaacaaaaatattataccctgaaacaagaaaaaaggactttctgcaacaattatgttatgtcaaaaatagtagattgagaaggaaaccaattcagaaatactgacaaaatggcatttgttctattattaaaatggtccgtgctcattaaggaaaattaaatgaaactaaaaggacagaatcattatagtggtagccaaggacatactcaaatcacttttgcaagtaaaatgtcaataagcaacttatgcaatcagagcaataaagcatgagaactcttttaggctgcaatagcgacgacataagattgtgaatccaccacctaagtttgagtgtaatttcaacctcaaatttcacgtttgtgggaaataagccatatcttgtcttatctaaaaaaacaagatattgttcaaaccatttgtttactgtaatatgtttggcccaaaagactaatcaaacaacataacccactggaatctagtttatatgagtgtgggactaatcataagcaagtggaatgctgactgcaaacaaagtgacgaattacgatgccacaaaacgaaaccaaggcatctctcaagtagatacacacataccaccttggcagttggcgatttctttcgttcgagcaattcagtaaatgtgcatgtacgtccctgacctatatccatgcataccgtactgattaacttggattagtcgattgttcaaataaagaaggaaaaaagaagtcattcagtgcacctaggcatttccacaaacagatggtggacacggctgaaatctaataaagacaccattggcagctcaagaaatatgaatcggcaagtgatgtacccaagaacgaggtagtttcacctacctccaagaatcggaagcgatggcacccacagctgttccatcccctcctgcaaacctccagggatctatctctctctcccttcctcactgaatcccctctcctctaccacctctttgcttggttctttcctcttaatcggaaaaagaaaatacaaaacaagggaaattatctcttcaacgagtagcttggtccatgaaacaccacaggatttcacccccaagctttcgctatcttctcgtgttcttttctagcgaaaacaacggcattttttcccttttttttttgagaggcgcaaaattctccaaatgagcagccactacattgggccggatcggtcatcccaagcccactgcggcccatatggaccgattggagaaatgggccgaatcatccggcccgtttgcgacgaatccctcctcttctagaaggaaagaagccgacgccgccatgggcgtcctcttcttgttggctcgccgcgtgcgtgtcaactccgagacgcaactttgatccgagcggcggcggcggcggcggcgggaggaggaggagatggcgcagcagagcaaggagccgtgcaagaaggaggcgtgcgacatccaggcctgcctctccaagaacatgttcgattccaagaagtacgtacgcggcagtgtcctccatctccaagcttttcttctttttagttcttttagtccattctgatgattgcaatgcgatattgttggatacctctcgatttcttggatgcggctgtaaggaatttgatgaggtcttgggatatttaggtgggttgccgacgcattgactaggttttgtgggggactggaagaggcatggggaatcatcggattagggcttagtggctatctcgatctaatgttaggtttatggattcctagtatttaccagctgccaggacagtgtcagggcgcaggagttgggctttgttgttggggaagttgtgggtgatgcttatgggtggtggtcgtggcagcaagatgatgcttgcttccaggtgtttggtgaagcaagctgatttagttggtccgcttgttcaatcatgcgataagtttctgttattctgaatatatccagcaagatgatacagtattatttctgaatatatccagcatgtggccctgtgtgccttcaggaaatgagttactgttactctgttagtcagtttcataggtgcccggatgggctagcctttcaatcttaaactgctaatctgtcgcaatttgagcatgaatcggggcttttctcctgtttactgttcacggatgtgaattccataatattgtttattggattgaaatacattagaattgtctgtgaaattcaccgttagttattcatgactagcaatcttggatgctaatagcatctatctgtcataaagaaatttctagtctaggatggatgttaaaatcttgtgtttcctctattggaccttgctgttatattttaatacacatattacacatgctgttgattgatatgtacaaagagtacattagcatcaatttatcataatttcccctgctttaatttttattgtggtgtgattcctttcattatcgtgttcactacatatatggataaagcattgggtttttgtcattgtttatgaccatacaactggaacctttggctttttaccattttgctatactataccaaacattaatccgttgctaggaacctagaacaatagcaatgaactatttactgtttttattgtctaaagttgattggagttagtatgattgaacatttaaacggtgctgcaaggtaatattgtgtgtatgattttagaatcaccttactgtgtaagttaatgggatatatatgactcagcttgttatttatgcttgtttctttcccagatgtgtgagagttatccaattacttcaatcctgctgtgagcagtgcgagtacaaatcaacacactgcggttctttgactggattattgaaaaacatttccaagtgatgaaacaatacagacatgtttctctgcagctgtcaaataaaagtatgctttatttctgttcttaccatattgtttttataaactgtagttggttccacttggtcagattgggaaggcagatcaacctcatactagcattgacttttcttttgatactggacaagcattatctcaaccatgccatacactccactaactgctctatacaaaacgctgtgctaattttcgttacccatatagttatttttgccatttatatattgagtgcaattgtattttagttgacagataattttcttttacaggttcttttaggtttgcttaggattgagagtgataaccgagtttcttatgcatcatggtacagtacagactatacttccatttagcttttttattgtgtcctttttacctgaacctatctattgagttccatttgattctattatgatgagagtcacatgctcctctgtttgattagctgaattattatttttttccaacataccagatgactcagggggaagtaacaaacccgtcctcagcctgaagaagatgaatggtgttcttatggctgagttgttttgtgcttaatcggtcaacagatagacgctactttaagatagataccagtacccctaattccttgtatatgtggtgcccttcatactacatgctcttgtagacatgtgatctcatgttcccttcaaagtataataagtgttcacctggaatttcattaatgcacattatgatggtgtaagttttttcagtgcgctgttttttatccttacaatatcttctacagtaataaagttaagtttaggcgaacatcatacataaagaaggtttaaaataaaacagttagtttttttctcgacctgcctttcaatcatctcaaaaaattatcctgttaagattgtttttgttagataactgttaagattgttaggtatgctgtcaagaagataatctgtgaaattatatgaacttgtgaagtcacaatcccattgcttagcatttatggctagtttcaggtcatttgtaagtactctagttgagggattgaagtattctgccatgttatctactgtgtattgcataaccaacaaccatatcttctgaaagtgtgctcttttatcttttgtgatgctacctaccaagtgagtgcagattggtatgcaatgacatcaagctgacatgtacactacattctgtacaacaactaattcttgctgtctacttgggaccaaccagtttgttggtatgtcttcacatggccgttccttaatttgctgctaatcttggatagatgccacagtgataatgtagtcaagcattatatatgcacaagagggccatgtatgcatattcagactatcacctgtaacaataaagatcttattcgttaaagctgcttcttttttcttttacaacaaattagcgacatctaaacggctgaaagctaaagttatcccctcttttgttcacttttacttgaccaaatcgattgcattaaacacattttgacgactattgttttatcatagtttgaaatgatactgttgatgtttaccgttgttaagtctgacgagcaatgtgaggttttaaagtttgcacggtgcattcaacggggtcaagtaaatttactgaaggagggaaagtgtgttttatacttttatttctttaaagttgtctgaacttcttttactcgaggaaagctagaactaaagtaagcaccaagatttttttaccttgcctttccaaaatcaaaagcctcctttagtaatagatgtagttttcaagtgaagtcatgaatgcatttcaactatgtgattatgataacccatttaaacatgccaattttctttaatatggattggccactttgatcatcaattttgccatgatttctgtaacttgtagtgtgcaatcatgcatttatgtgtgaactttaagctttaggaccagtattcgccggagtggtggtcgatgaagtaagtgtcttgcttaccattgacagaataacttgtggttccaacgctgcatctttgaagttgacatggcagttttacccgaaagaatcaacaaaagaggcacaatgaactagatcatcatgcgtagtcctgagaatcaacaaaagattcagacaagaaacccaatgggttccttcatttcagtatgttcttcggcagctaaaatcaagtagtatcaaacagacgccaaatccaatggcattacaaaaaagacgagcgggatcagagagtatcagaccctgaacattcatcagacaaacaaaagagacaaaaccctgaaggcctgaacattcatcagaaaatcaaaagtagagaagaagaagaagaaaaaagaaaagaatcatagccattaactatgagtcaaactctggattctggtaggatgaaaaatgtatagatcgatcgatatatacacctggtatatcatgcatgcaatcatctactgcttcttctgactgtcaatcagaattttcagattggtggtgcctttcttgatgcagcattggatttgtgagccaagaagagctttttgagcagcttcagcatcatcagcaagctcagccgcctccgccggaccacgctgccggaggccaccgccgccgccgcggcggcatggcggcgcatttcgggggtgccgtcgccggcgagccacgcctccttggtccactccttgctcagcgggcacggcgccgccgccgccgcccgggagagctcctcgttgaagtcctcccacagcatgtccatcgtcttggtctcctcgccgccggcgaacctcgccgagacattgccgcagccgccgtcgtcgtagcaatagtaccagccgcctctcaccgtgccttcttcctcccccttctcgacggccgagaagctcctccggtgatcgtacaccaccgcgtcgacgacaacgccgccgccaaaccacggcggcggggtggcgaagtgaggggagaaaggcggcttcttgccggcgttgcatcgctccggtgcgacgctggggaacgtgaactcctccatggccgcaaagctgaaaccttgcattgctctctctctctctctactctgaactctaaagtctgaactatcaaatggaagcctctatctgtcttcttttttctacctcaagaaatggctagagagagaaagggagaggaggaagagagagaaggtgatatggttttcttaagctcccaagctcaagtgatggttggcaaatggaagtattattatacaacaatatttgtggtggttggtaagatgctttgggtgattagattggtccatcagagagatgccaagcaggaaagcactaagaggcaggacctaataacattattaatgtttaattaaaaggtcattatatacagctaaagtccaagggctaaagcttactcccatatcaaatggaatgacctcctaaacagtgtccagttcagacataacagagcccaatagtttaatgttctagaaagagatagccttaatagtttaaggtgtaacttctggtgttaaggaatataaagatgcaattctgaaccaatcaatcagtagtagcattcagcaaggcaaatgtaaacaattgattagctgttgtaatgttttgtatggtgattatattcaaaagcaaagtcaagctgtgagttgttttgaatggttttggagggaggatggaagagcatagaagcatcaagcagcagacaggcagtgcttttgcagcctgtgcctttctgctaaagaacagtttctgaaaaatgttgcttgcaaattcaagaactcatctctccctttcttcctctactttttttttgcaaaagaaagagtaaagacggctgcagtggccttgtcagcatatgaggtggcagtagctttcagtgctgggggttgccacctgttagccgttggtccagactattcaaaaatgtcaatgtgaaactaccatatactcaaatttagttaaggggtgaaaagtttttacgtctcacatcggatatacggacacacatttaaagtattaaacgtagactaataacaaaacaaattacagatttcgtctgtaaactgcgagacaaatttattaagcctaactaatctgtcattagtaaatgtttactgtagcacaatattgtcaaatcataaagcaattaaacttaaaagattcattttgcaatttacaccaaatctatgtaattaattttttctatatttaatatttcatgtatgtgtccaaacattcgatgtgacagaatgaaatcgacagacaaaaaaaaggaaagtgttttaaataagcaatatgaaacttaatctagtccttgtcaactactggagtactatagtaacacatgtagtggacttgctgttggctggtttggctcaacgtactccgttgaaagcgagatttcagtaccgttgtgcttcgtctggctgtttgttaggtgcagtgtttttttctctttcggagcttagtgtttagaagttcaaaatgtgttggctcttgagttgagcgagcaactgagcatatatcgtttcttgcatttgtctgaagctagagagctgtctcgatctgatctttctgtaaatcaactttgcgcagaggttgtctgatcaatctatagagcttcctctgcagattacagtactagtacgtactagtgtcagatactctttctgttttataattcttgacacggttattaataatattaaaaatatttagtgtaaaggcaacatctatagatttatttcatgtcctacttcctctgtttcatattataagactttctagcattatccacatttatataaatgttaatgaatctaggtgtatatatatatatatatatatatatatataacctgaaacggagataatataatatatatttattatataatagaaaaaatatggtcaaaatatattttggatattgtatcattgtttaaagtataacaaattatgaaacaggagagagtaagagataacaccaaccaaatcagacagacaaatccatccaactggtaatcaaccaaccaaatcgttggcgaagaactgtgacagagaaaaactggctgggccttttcggcccagaatgcacgttcgacgtagcccaattccggccccaacatttatgggccgaacgttacgacccgatccgggccaacatttatgggccgcacgtactctgcactaccttttccggcccaatatacagtgtggccgctcgtaagccgctgtatagttttggcccactatgtatggcctgggccgcacttacgccactacatatgggccgcaacctttccgggcccaaaattcatggcccatttcactcctgcctcgtcttcccctcttcctctttgtactggcggactcgagggcggccgggagctcgccgtcgccgtcgccgcggcggcggtggcggttagcacgcggcagattcgaggctgaggcgacgaactccggcggcccccagccccccacggcggatgcagtgtaggagcacgtatcaagtttggaggagttgcaggcttgcagtttcttcgaggaggttagtcaattcgatatttcgatcccttgccaccattgttggttcctaggtttctttattacccttgtttgattctgaaatctgaattcaagaagggctggacggaatttcatagttactataaaaatagtcttagtctgaatcacatgggaatgcaaatcggctgtaattcgcgttttcatattgcattggctgagtctaaaactgaaattattttgatcggttagtagtaagtgtccgatcagttcatctgtacactgtaactagaaaaggcaaataaagatcaatcaactgcagaaaatgaccaatttaagacaattcagttactgagttagttgcctggatattcgtttttataaggatcatgactcagataaactgacacccatcaatataattatataatcttttcaaattgttgtgtttactctgacaaatttctcagtattttttactcatgtgcatccactgttcaatactgacaatatgaaattcgtatatcgtgggcattcatctaaccattcgtcactgcaatttaaaaacacttacacttagctccaaaccagtggattagctaatcacactagcaaattaagaaatcttaattcggcaagcttccgtgatgatgccatctagctaaagtcctgcaagagagacagaaaacgttcttgtttcagtactactacatgtacttataaatagaagcatgtaatcagcactgctctgcttgctttgagaaaagttattatattaatactctttcacagagctcgaacagggtgagctcatcgagattatagctaaattattcacaaggtccttttctgctaggcttttgccacagtgcattgcacctggacaacaagcttggttgttgtcactgttttagcattcagatcatacctggagtggagccatagccacttaggagtgaaagattaatcaacaaacttaaataatactaatgttgtgcttgaactataatccaaaggtgattgcttgagggtttgagtttgacaaatgcttatcgagacccaaaacaccaatctagctagctggagtgcggaagttaggataatattgtagcctgatgagacttgagagagagagagagagtctacatggagtacaaaagatgactttttctccgtctcctctccttcaaacacggcctgtctctgacgcaaaaacaaagacaaattggtacctttgccttcttttttttccctttagctttattccttgcctacttgggtggtgtttggatccagggacttaactttagtccctgtctttagacactaatttagagtattaaatatagactacttacaaaactaattacataaatgaaagctaattcgcgagacaaattttttaagcctaattaatctataattagataatgtttactgtagcatcacataggctaatcatggattaattaggctcaatagattcatctcgcaaattagtccaagattatggatgggtttttattaatagtctatatttaatatttataactaatatccaaacattcgatgtgatagggacttaaaagttttagtcctatctaaacagggtcttggtacgatcatcttccttgttttctaccagtatatgatgatgttggaccaatcctttgcattcagtaacattcacattcagctgcaaactactttatggtctattgcacactggagaccatgttagctttgatgcagtaacctctaaaatttaatccatctaagaaaaggtcaaaatttcagaagaattaattctgcagcaaataggtgtaaaagtattggactgaactcttggtgcaagcaaacacaatggaccagtccaagtctgaaactgatgcagatgcaacccagagagggctccaggacctgaatgagaagctgcaggtaaacttcagaacacaggtatggacagaagaaatagatcttggaacgagtgagaggcaaatggaggtgagctgaagtccattcaaagtctcctcgtcaagtgtgtggggtaggccagatgagatgaaaggaacagcataggatgagatgtgatcattcactcccaattccaaccttccactttcctaacctccaaattccacactaagcacagcttttatttgttttacattcttttgattcaggggtgttggtaatggacggctaaagcgtccacatgaaacatttgaaaattttccattcatggtttatttggaacacatgattttttttcttattttttctttagaaaatgaaaatgtaaaatttgatggaaattatgtaaaattcgcacttctcttcaattgtatataataatgtgaaatttgaaggaaattatataaagtttgcacatctcttcaattgtatatatattaaatcaaataagaaaacaatgcttgattattcaaatacatatatcctcagttgtatggagtcaaatagaataccaaggcgttcgtgatgacttacagcaattcgaatgtacaatttaattgtggaatagtatgaaatatcaatctttgttaatctagtgaatcaagaattattattctgaaacacaccacaccaaaaacttctatccgcatatctggtgaaaagcccacttggatgaaatttctgaacctgtgaattcctttaatcttctgtttgatcaaccagtacacttgaagacaatttcattctacatgggcttgtatgctcctaactatttctctccctgcctgtatgtgtttgaggtaaagctagataagccaaagccttcgtttggtcaagctcctctgtcatttccaacacgtcgtccttttcccgggcaaaggccccacgattgttacgtagactaactttaatcactttggcacatttcaacaatctcgattacctttcctacttgaatctggtgatcataattttggctagcactagctagtccttttcagaatttgtagaagcttttcttcttcagggaaaaggtaagaatttacagatggttttggtgtagctggtgagctccagcttctttgacccggcatctacaaatggtaattaatacatttatttttcaagtctcagtttgatggtctgggagggatcctctatttcgtctgcattaatttcagagaatgacatgtctgcattagtaatagagaatggcatgtgttacttcagaataattagctgaaattgaaagtgacagtttttagattgtagtattagtgtattactagtatactattctgcaagatgcaatgtgtttctggatactaactaatctactagtagttttagtgaaacagctttgcagatgttgaatggtgccctcacattgctcaacggcataggattctcttggtacactaataaagcgaaggctagttgcctcttaataaaaatgctaagcttttcttttgaaaaggtactcagaagcaagaacttgttccagaggcagttcaaatactcaaaaagactatttataatttcatgtaccattatcttttttcctgaccattactgtgtttttttaagttgattttaaatactcttaaatcaccaaaaccaaattggacagcaagtatattccagtcagtttgcatatataaaaaattggcatccatggatataactgagaaattaccaacagaaaagatcattttttttctttggaatagtaacataaagaccattcttttgttgtttgaatggtaacagaaagaccattcttcaaagctgccaaagtttccttaaaactcagcctaaatgcaggttctcatcatcactgttctcaacctgctttcttcagtgttttcagctcccctctctcacaggttttggtcactcacacaagatatacgtttcagtcagtcaaccctggaccccaagaggtgtatgtgtgcgagagaaaaaaaaaatcctcctttccttctctctaaaagactggactcccaacgccgaagcactgggagtctgggaggagcaagaagaggagagaagagagccatggccaagaacaccgagagccccaaaacctagggaaagagaggaaaaaatcgattttcttgggtggtggttgagcctgcagtgaagttcatcagggaggaaagggaggggattaagggaaggagatacaggaatcaatgggaggccaagaacaggtggccatggcggagaggaggccttgttactgtcgcaacaatggcttcttgctgctgctggtacaagttctcctcttcttgttcttgtttcttgattcgtccatggtcgccactgccgcgtcggcgccggcaccgctaaatacgactcaggtatcgatcatgaaggagctttctggcttggttactgccagtgccaagtggaacacgagcgattcgaatccatgccgatgggatggagtgagttgctcttctagctccaattccatatcagttgtgaccaaccttactttgtctgggtatggtttgtccaactccaccatatttgcaaccatatgctctcttgacaccttgcaaatccttgatctctctaagaattccttcaccaattcgatagagcaattcttcacctcttcttgctccatgaaggctggattgcggtcacttaatctcagcagcagccagctatccatgcctcttagtaatttctctggttttccccttcttgaggttcttgacttgtccttcaattctttcagtggtgatgtcagaacccagttgagttctttgctcaagctgag

SEQ ID NO: 15172 - DNA, 2182 bp, Oryza sativa
  unsure (1)..(2182): unsure at all n locations
ccggcgtcggctatgaatcctattattaaggcatggccgttcagaggttggggaattgatatgatcggcatgataaacccaccatcgagtaaaggacataaatttatattggtggtaactgattatttcaccaagtggtagaggcgattcctttgaagaaagttgattctggggatgnctattcaatttgttcgaagagcattataatctatcgatttggtcttcctcaaactattactacggatcaaggttcaatcttcgtgtccgatgagtttgttcagtttgccgatagcgtgggtatcaagttgttgaattcttcaccttattatgcgcaagctaatgggcaagccgaggcgtctaataaaagtttgatcaagttgattaagcggaaaatttctgattatcctcggcaatggcatacttggttggacgaaacattgtggtcttattggatggcttgtcatggatcgattcaggttcctccttacaaacttgtttatggaaatgaggctgttttgccgtgggaggttagaatcagctctcgacgaacggagttgcaaaacgatttaacagccgatgagtattacaatcttatggctgatgagagggaggattttgttcagtcacgattgcgagcccttgcgtaggttactaagggtaaaggaacgtgttgcccgacattataataagaaagtggtatctaaagattttttggaaggggaacttgtatggaagttgattttgccgattggtacccgtgatagtaaattcggcaagtggtcgccgaattgggaaggaccgttccaaattcataaggctgtgtctaagggggcatatatgttgcaagggcttgatggtgaagtttatgggcgagcgctcaatggcaaatatttgaagaaatattacccaagtgtttgggttaatgcatgatcggctcatattgccgatgcatgatagccgatgtgcttacatcgccttgagatggccgatatggttatatcgcccttatttgtttttcatggtgtaatcggttgtggtttgccgatgtacaatggccgatattgttatatcgcccttagttgttttataattttatcgatgctcttgacattgtaaaactaggggggcatatatatatcaaaatgcgaaatgcaatgcaaaaaatgcgaaatgcaatgcaaaatttttgagcaaatttcaaagtcatattaatcgccacaaaggattgttaagacagtaaagtatcagatgtctcagccgattacaaaaattctaaagtcctattacataaagattattgagataagtatcgctggatggccgatataaccttttgcctaatttgctctacttcttctatggcttgggcatcctgagcatcggttccagggataactttcagaaacttgtcagaacagtaacatgcttgatacccgattggagtctactttcttgtcttcaatagactttggagatcggctagctttttgtgctctatatccagttcagcgttacattcttcaagttgtgctaagagttcaattttgcgagcctcaagccgatcaatgttagacttgattaggccttcagataattgatcaagcttggatttctcttcatgcacaagctgtcggttagcttggatagtggcctcaatatccttgcgctctcgctgttcggccagtcttaacttggctttctccagtttaaattggtgttgctcaaggtaaacggctggagtaaggatgttggctaactcatctgggattagagcctgaatctcatgtagccgagccctgattgagccacaatcaactactaagctatctagtgatgatgcttctagccgatccaagatactttccaaagttttcttcacatcatcagatagaggggctaaggctttgcttgtggtatcttcttctccttcatcaagatagtctctgatgtcaaaagagaaaagatcggctaatacctgcagtgacaatttagaagcagtttgaggttaaacgattatagccgatctgaatgcttttaagacgaaagaaacttactgggatagcaggagcagctggttgttcttcttcctcgacgtgatgactccccacagctgaaggggtctggtcacttgctgattgttgtacaggaggagaaggaggaggtgaaggctggggctgcagga

SEQ ID NO: 15173 - DNA, 588 bp, Oryza sativa
atcgtggccagaaggatgaggcaatcaggaagaatcaatggtgtccttttggtattttcacaaagaatcagaaaaggacggtccagagattgaggagccgggagcgttttcaggaggttgaagaagaaatcaaccatcggctgaggaaaccaaagccaagacgggagtggcgtgtcaagaatcaggttcctgtagccgatgatgctgcagccgatgaggtaaagaggttggcaaaagggaagagtgttatagcggcaccaattaacatggtccttacattgccagctgaattcgggattgatcaggccgatgtcgatgaagtggaagagggattggctaagttggttctgtcaacagaacaggcagtattcgagaaacccgaggggacagagaatcgacatcttaaaccattgtatataaatggctacgtcaatgggaagccgatgtctgagatgatggtcgatggtggggccgcggtaaatttgatgccttatgctacgttcaggaaattgggtaggaacgccgaggatctcatcaagacaaatatggtgctcaaagactttggtggtaatccatcggaaaccaaag

SEQ ID NO: 15174 - DNA, 1887 bp, Oryza sativa
ttcccggtctacaccacgatgccgatctcgactggcctagcaattaccgggagcgagaacggcgtggttacgaccctggtcgactctatgtcgaaagatcctcccgcagaagcggagaacggaacatcgataacatctgagcctgagaaggatcctagtgcggtcaaatcttgtccttccgacaaaaagcacgagccgacaaggacaacttccgaggacgacacagaagctgagaagataacccgacaagccaagatctattgtatgatcggcaatgatctgtacaaaaaggcgccaaacggagtacttctcaaatgcatctcgtccaatgacggcaaacatctcctcctgaacatacacgaagagatctgtgggtcacacgccggcggatggacgctggtaggaaaagcttttcgacaagggtttttctggccgacaacactcaaagatgcctgcgatatggtgcagcggtgtgaagcctatcaatttcacagcaaacacacaaaattccagcgcaagcgctccagactatccctctcacttggccgttctcgtgctgagggctcgatatactcggaccattcccacgaggacagggtggctacaagttcctattcgtggcgatcgacaagttcactaagtggattgaagcgacgcccacaggggaaattaaggccgacaatgccatcaagtttatcaaagggatgttctgcagatatagattgcctcacctcatcataacaaacaacagctcccagttcatcagtgccgaattccaggattactgcattggattgggagtcaagatttgctttgcctcggtttctcaccctcagagcaatggataggtcgaaagggcaaacggaagagtactacacaggatcaagacccgtgtctacgacagactcatgtcacacgacaagaagtgggtcgaagaactcccctctgttctatgggccgtgcgtaccacaccgacaacatccaataaggagacacccttcttcctcgtgtatggcttagaggccatgctccccacggagctacaacatcagagcacacgagtacataagtactccgacgaggaacaggagcagcgaagcgacgatgtgaatctactcgaggaacatcgagaaagagttgccgttagagcagccagctaccatcaggcccttcgccgataccacgagaagcacatcagagcacgcacactttcgatctgcgattacgtcctccgacgggttcaaagtcaagtagggcgcaacaagctctcacccaagtgggaaggaccatacacaatcacgcaagtcttgcagccaggtgcattcaagattgcagacggcgatggtcgcgagttagtaaattcctggaacattgatcaattacgtaaattttatttacaaatcaatagtctcaaaatttgtaagtcatattacgatttcaataaagttgatttcaggttaagaatattgtcagagtgttccttcccgacgatcccttaccacgacgacacctagagttgaaacctatcctcatgtccctttacgccgtcctggcaaggcctctgaggaacctaagggaacttcagctagggacgcccagagcggataaggccttgtcggatcatgtagagacaaacgaccatgtatgacctggtcatgtaagagttctcgccatgcgtattaaccaagccgtgtaatcggaaattgagttttccaacttcacggctgggggctagggtcagtgcttttttcaaccaaggcaggtcaagggtctaaaagccttgtcctccgagaacgattctccgacaaggctaggggctagggagagtgtatagctcaagtgactgatcgaaatcacaaagtgagaaaacactcatacacaacatgc

SEQ ID NO: 15175 - DNA, 1791 bp, Oryza sativa
caagtatttcttacaagtcataaatacttcaaagtatattacatgcttccttgagatatttttctacataatacaaaaactaccagacggccaacgccaatccatggagcggatctccgcaggaccgtcgatctccgcaggtgtcctccgagaacgcgagaacccttcgcgaaggaactcgagatgcagctgcgaacgatgatctcggatgcaggctagcacatgtcctctggcatagcggctcgctcgacgacactcctgcttcagggcatcgtcgatgcgctggccaatcccttcgagctgtgcgcaagcctcattcaaccacgagatataaccagccgccgactcctcgggatcttcgcggggaactcagagctccatgcaaaccctcgccatcgacgtgcaacagctcctgaggtacgagttgaaccacacctcgtgacccccggagagcttccatggcctggtccttcttcacctgcaccatgatttttttgagttccaccacctcgagtttcgtcttccaatatcggattcgacgagctcggtcagccaacatgttcttgaaatctgcccgacacggaaaagactaagtcaagctattcttctcttccgagaacacagctaattaagtcaatccgaacacaaggagtgaaggagagcaagatacaaacctagcaacgtcatcgccatgtttgcctccgcggacgggccctgactaatttcctcccacagcacgaacggctcgagtgtgagcgccggaacgatcaccggcatatcgggctgcccgtgctgctggacatcctcgacatcaatatatctacaacgacaacaaagtactcagaatcacatgctaaggaaacaagggagacagtgttgacggtcgttatcaaacagtttcgaccgtcaatattatcaaaataggagagaactagtgatgcttgcaatgcatatgtttgttagaataataatattccactagtattaggtatactaacctttttgtagagaatgacactaaagtggaggagaatcgacatcaacatagacgataaatcaatcggacgatgtcgagaaccagacttatgtatgaatgggccaagaactcagaattgacacgatgaattgggccaaaattcacaagtctacaaagtgaagcaatagaggaagtcgccaaccgaagatgggctggtttgggccagcccatggttcagccaaaccagggggttcggtgtcacgtcctgataaattcatcccgaaataaaaattattttctaaaaggaataatagaattaattaaaattcgaaaagaatttggcaaacactaaaatacgtacaagaaaaattcaaatgtggcccggagaatttttgttaaattctccttggtctaaaaagagccctcaaattttagtggaattttcagagcacaaataataattattaagaaataaacaaagttaaaatgattttataaaaagaaaagccctaaaaaagttccctttccctccccctctccctcttgggccggtccggcccagctccctccctctccctctcctctccccgcggcccattcggcctcctctccgcgcgcgcgccgctgacgggcgggcccgcccgccaccctcgctgacgggtggggcccacctgtcatccctgtcctcccgccgctcccgccgcctcgtccgcgccctagcgccgccgccgccgccgaatccgccgcatcccgtcgtccccgcgtgcaatcaataggggggaattattccccgtgatttcctctctctttccccc

SEQ ID NO: 15176 - DNA, 3795 bp, Oryza sativa
gtggggctgccgcgtgggccccacccccgtggacccggtccgcgcgctcctcccctcggctgacgcaataaatccattttaaattaaaatttaaatgaacaaattcgcaaatattcatttaaagagcatataaacttcaaatggccataacttggccatttgaactcggaattggaccgttcaagtctctaatttttccctaagaagtcaagaacccatttttgtgctttgttcctgcttgttatatggagtttattagagtaaaagccttttcttttccgttggtcgtgtagacgctgcagcttcggaggatccgctcttcgtggaagttgaagccggcgtttgggaaagcgagcaaggcaagtcacatcatccttgaacatattgaatcccagtttataaaattatgttgctttaaattattgcattatcactttatttaaattcccgcgttatcactgttttatctagccatgcctatctacctttgttatgaccttattattattgttattgttattattaccttgttcaccctagattaaacaaaaccccaactagtggacactctactcatagtaccactagtataattttaggtagatgcttcgctgattaattaggtaacattaggcggttttacaactctagactttgggatattcatatcacctggacactttggaattgttggtttattgtggaattggattcacaccgccccctctattcaaaatccccaaaatggttttaggctgagctcggggtgcatggttttgatagtagcacctcggccatataaggaccggtcttcgggcctctgttgcaaagcactaccgtacttccacatgtctagtgggtaaggcttagtttgtggctcagtctggttataaacaaaagtacacggatggagatggacgaagtcgggggtcgatggacatctctaggacaaatgaaggctacacgagctgcggcccggtagtcgagatgtcatggcacagggctggtgtcctgctgctaggggctcaatcctgcctacctgtcccggaggttccggccgtaggtgggattgggtcggtactcttgtctatggctaggatgggttgggaactatgtcacgtcttccgtccgtataccgtggtggtatgtggcacgtggttacacatgaggaagatgtgtcttgtgggtaaagatgtacacctctgatcagagtataatctattcgaatagccgcgccctcggttatgggcaagccaagcaatgtacccaagttagtgttttaattcttaaaatttgctcaacaactaaaatgtggaatggttggcctgggttggcttgggacgagctgggatccagggtcgggttgccagttcggtctgaatcatcgtaggccttgggttaaggcaggttcgtgcgggttcacgaccttgattaataatactgtgtagctctaggatcgtctttttaaaatggctttgggcaactaagtgacttttaaatgctgttttctgcaaaacttaacccctatatcattaccccttgtacccccttgcattaatcgtgcatccgccggtgtggcttgctgagtactgtggttgtactcattcttgctctatctttctccccccttcagtaagagaagctttggagaagatgtcttaggtggagtcttggcttacaccccagttgagcgcctgtgaagatggagccgtaggcccgctagtccgctgctgtttattttttattgtcaggccttaagtgcctttgtaataatgtaaatattatcgatataataaagatgtgtcttttatatcatgtttgtatggtgtaccccggcttttcctgggacggggattaatacactagcgttcgggaaaatgcaattttctcggtcgcgacattcggccaaacccccatctccaccgttgaggccacagtttggcatggatgtccaagattgcaccccaatgacgtttggagggtacttcggacaatccccctttcacaactgtcataaccacctctatataaaggcttcactctcttcacttcaacacacaccttaagcaatggctctagtagcttttctcttctcttttgtaagatttgtacttttattagaatactcttctatatacatttatggtattaaaatactctccgagtatataagtacctactttacattatgttcttgttatactgaatatacggctagcttatctgggagatgctttggtacgggtacagtgtttgcttatgcaattactctatgtcatgacgatgatattatagtagtatctggtagtttagacgtggtgtctagattacgggatatcattatttggggttatatattgcggatgagaggtgggccgctgatggtgacagctcagtacaggtattcctccgcgcctatatataatcctaagttaatttcctggggagggtattcctctgtatttagccctagttgtatggtcatgacgggctgtcgtaaggaactcggcagtcaggggtggcttcttaaagtaccaggagagcatcggatagagggtattagctagtatatcagttaactagaatgtatgtatactatgtatattagaagtataggagtagatttcctttctcttttctttccacacagcttagatgatatattatgagaatgagtagttaatgcttgtgtgtcactctacccttggattatcttaacccctatttagaatatgattatcacaagtaatatataaattattagttgagttctctctacatgatcttcccacgggataaaataaatacgatacccttggaatactctagagtgaaatgctacaatggtatatccgtgcgcttgcggatgaactctgtaaccataatataccagaagtatttctacgccattgctgggaattatatttctagtaatgtcgttaagaaataccatcagacagttgttcagataagaatagttcggatccatagacaagttttacagcatgaaggttaaggggtacaagggaaaacaaatgtcctactcttcaaaaagggggaggacggactcccccaagtcaccgacttcttccatcgtatccttgcgtgcgtcatcagcggcccccagatccaaagccttcttaaggtccagatcgggatatgccagcctcatgcacgcaaggacatggcacgccccggtgtagatgccgttggacgtctcctccccgatcctagccgcgtgcttggatgtgatctcctccatcgccgtagccagctccacaagcgatgacgtcagcgagaactcatcgggatgcgccgggatggtagtcgtgacactacactccccggcgagttggtgcaggctggtgaatgacgttcgcagcgaaccgcagatgtcgatcatgtggccctcgagctcggacatccggtgctcgagtccgcgccgctgcatctcgttgccggccactagctccctcatctttaggaggtcctcgtgggcctccggccaggtcgctcgctagctagtcggcacgttggtttgccgatgacgccgccgccctggcctcctcgatctcgtgacctacgccgcgagcaccggcctagaggatgcgctccatctccgcttggagctcctcccaggtgagggcatcggtggacgggcctcgggtaggcatgaggctgacagcagggccactccgtgccgcctcctggtccttagtagcgaggtcgccgcaggggacacgctgaaagcggcatcagtcccaccttgtgccgtctttgcccgcgccgccctgt

SEQ ID NO: 15177 - DNA, 3459 bp, Oryza sativa
tttacttacttctcaccgatcgtcaccaacctttgccttcgctaaggtggaggagacgcgtccgagtcctgagtaagatgaaatggtatgagatcaagttgttccgactacgtgttagggaaccacaaagaagcttaccgtagagtttttcgctttccgacgggtccctcgtacggaggagaatttccttcccctctttgggacgttgctaccactcgtggtggcagcaacagcgtcagaggcctccttggcgatgctctccttcaacgacgctgccgcctggtggtccatgagtggcccgattacgtccgtcagagggagagcctgcacaacgtgaagtcacgacacgatctcgaggagaaagatgtaaaggaatcatcgagtacactgacattgatcgcagcggcgcgttcggccgttcccttctcgcaaagggggatcgagatctcgcccgtcgctgagggggcgctgatgatcacctgactgacgcggcgccccccggtgtcactgtctagacctgtgaatcgaaaacgagaactcgataagttaggagaaacagatggactcggaacaagattagaaatgcgagcaaaaatacaccgaggagagatccgggtcgtgtcctctggcccagagtaatcaaaggccggatgggcacgggcctgcagcggttgaatccgcctacctacgaagtcggcagcgacttcgtaccccgacaacccccaatttcggagatcatcgatgatctcgataaaagattggagggagggagtcagggcgggtttggcggtccactcagggattttgtttggttgttctttagggacaacaaggacgggatccgagttttctatctgaagatagaaccatctcgcccgccacttgctgtgagaagaggggcattggaaggggatgtaacgcgacttcagccgatcccgaagttggaatgcaacgcatccagataccctgttgggttccatccatcgcagctcatagtaaaagcggaatagatcaaggaagggctctaccccaatgtaggcctcgcaaagatgagaaaagatgctaaggaatgcgatggagttggggttcaagtgaagcaaagaaaggccatagaaattcaagacaagaagaagaaattgagaaggcggaggaagaaaaccgcaagaaatgtaatcttcaacgacaaccatgcggcctaagatgggtttaggttatataccacctgcctccctttgcatggtcccgcgacaagggagggcaccgtcgtcttgcagcttcctcaaggacgcggtggttgaggtagacttctcaagatccatcgccgtcggaggatcgccggagaacaagagggaagaagcaagctagggttttctttgcggagagcggagaagacgaagggcgctagaaggcaggagagttttctggcaaatggacttcaaatggactcccaaaatccctttaaataagcgcactaccgacgacgcgtattccaaggaaaggagagagattgctgccggaaaattctgggtccgttgcgcgcggtagttttcagacttcaatttaaattcactcatgaccgttgaacttcatgcggtttttgtcgatagctctttgtctctatggtttttgcactgagatcgactagatgagaacgacaattccgacatcagaagtcgcgatcaatgacatgagttcatttaagcagaagtcaggggctactgtcagggttacggataaggtataccatctacccttggatgtacgttgtatactgatacggtatacccgcgcgtgtacggatagtttccgtatacataaaggaaatctaacccgtgatagaaatagaatctatggacggaaagagttctactcggacaatactgggtctttactatatcgtgaggggtccgatatctccgagtcctacttggagatcaactgacccgcggtatataagggaccccctaggcaggacctaaggcatcgaatattactgccaacacatccccacagcctacggagctggagcctacaggagccaagtcgccaggccgggagatctagtcgtgccaactcgactgcgttctcgtcggtatcaccgagttctgttattccctttgtaatctgtggtttccatcatataatcccataccaactggattagggctattacctgctaagggacctgaaccagtataatccttatcttttgtttgcttgatgtcgtactacatagatcctcgtaccaacggatcccaatactctctatatccggtctatgggtatcccccgtcgacacttctaagctttattcctaactttcagtcatatcagataatatcttgagatatgactggtttttctccaactattttttatgattgcccaaaaatattaatgagcactccttttcctgtatttctcattttctttcttctcttaatgattgagaatattttctaccttccatgtcctttctttctttctttttttagccatattttattgcaagctactaatatgagagacattttaaggacatgatggaatatttatttggtggatggaaatgttgctcacacctagggtagaggtaaaacaaccatgataggtggaaggcatattttgttaatctccagtatatggtgggtgcacgtaagtgggtatcttggtcaagacagcataaaaagaagcaacatatgattatagggttattcaattaagatcatcatattattgaggaacttataaattttattcttttttaaaaaaacatatgctccggaattccagtatcacttagagaaagaccatagcaactctatttcacaaattcatatccaacaacaatctagatttagatcatgctttatgcaatccacaagtttcaaattcaaggcaaagattttttttgccaacaaactcaaaaactatagtgaaggttaggcagtaaagcactagatagaaataagaatagagcatctattcatcatttcaactgggaaaaattaaaacattcattgatgatggcagcagtgcacgttgccaagaaaccgttgctactgccaagtgattcaaggggcagtggctttggaggaggttactgcaaccagcagcgtgcagagactgcgactggttttcagttttaggattcctctgaaccagtagcagctgctgaacaatcatctgcagatgcagtagtaggtgtctagatcagtttaccgatcgatctgaagagaggtgaattaattacaacgaatgaaactacagattcagagaggaagatgagggaggaagatactgattgttccatttggatttattttgaggagttgcattgcagatagacaaacagaattcttgatgtaaccggtgcaaggaaagattcagatttcttcctatgtcattaatttataagtttttttgttttgattttcatgtacaagaatgtaaattata

SEQ ID NO: 15178 - DNA, 18421 bp, Oryza sativa
ccgatgtcgtgtacaagtcgtattgtcggaatcggctgtatcggcttacttagcccgactcagacccagccgatcctaaccgtagccgatctggactccggccgattcctgctctgtttccgaactcgatctccgcttccgacttcgttttgatccaatcctctttcctgacatagatgttaccaaatttggttgttaacagacatcaaagttggcacaggagttggctgggtcttcatttcagatcaacaaaaggtgggtattaattccttgatttgctttgtactgacttattttctgttgtgtcaacttccactacatctgtctgattaaattttgcaattctgtttggtatgcagggtatccttaatactgtggagaaatgggtacctgaggctgagtataggaactgtgctaggtacatttatgccaattggaaaaggcatttccatgagaagcagttccaaaagaagttctggaggtgtgcaaaagctccatgcagaatgctatttaatcttgctagggctaaacttgcacaggtcactcaagctggagctcaagctatactgaacacacatcctgagcattggagtagagcttggttcaggttaggttctaactgtgactcagttgacaataacttatgtgaatctttcaacaaatggatattagaatctagatttcatccaattatcacaatgcttgagacaattaggagaaaggtcatggttaggatcagtgatcaaaaagcagctggtgctaagtggactactgttgtatgcccaggaattctcaaaaaactcaatgtttacatcactgaatcagctttttgccatgctatttgcaatgaaggtgatagttttgaggttaagcaccatgagcataggtttacaatacacttggacaagaaagagtgctcttgtaggtattggcagctctcaggattaccataccctcatgctatatcatgcatattctatagaacgaacaagctagatgactatattgcaccttgttactatgtggatgcatttagaagcacatatgtgcattgccttcagccattggaaggaatgagtgcttggccacaggatgatagggaaccactaaatgcacctggatacattaagatgccaggaaggccaaaaactgaaagaaggagggagaagcatgagccacccaagccaaccaagatgcccaagtatggcactgtaattagatgcactaggtgcaagtaagttgggcacaacaaaagcagttgttcaaagcatcagtctagtggttctggcacagtgggttctcaatagcaaaatccttcaccaagccagcagatggtgttatcaaatacacaaggcagttctgctcacagcaagaagaggaaatctgtcagcctaactaccacaaacactacaagccaatccaggaccaaacactacaagagcaaggtaaatgcaaaaatttatccattccaaagttatctattaaccgaagcaaagtttaacatttagcacatatatgttattgcaggcaccaatggagagccaggagctggtcagggttgctgcaagtgccaaagtttgcacagaacatggtggatctgctcaagttgatctgcaagcaatagttccccattccgaaagcttcacaactgcatctgtgaggctgacatctggcaaggaaactgtgtctgtctcagctgaagagcctacaaaaaatctgccaaagaagaaagctggaggagctctcattcttcttccatgggaaaccaagaagctctgaatgtgcccatttctgtgtgtcatgttatgttgaaacatgctctttgatgtaatggcagacttttaagccaactatttatgtatgtgatgtaatgacagactgcatttagccaactatatctgtgtgtgatgtaatggtagatactagacaaccaactatttctgtgatgccatactatttggcttgcttatctatgacttaagacataagttgtgatgccagactgatttggctatctatgttacttaattgagacttaatggtgtgcaacttcatttgctattctcttaatggtgcaaatccaattatttcaggaccatttgctccctaactggatgtttcctgcaggaatttacatgttggcttacatatgttgctacaatagatgcactagatccattctgttgaattcaaccaacaatattgcacttaacatccatgtaatctttgcacagcttgaaacatatagcctgctgtattttgttgtcacatttgatattgcaaccattcatttagaactcatctttcaattagcaaccattcattgacataactcattccaaattgatagcacaactgatacatatatctcatcaaacacattgtctttccagagcatagctaacacataataaaggacctcattacatcatattggccacacatcacactgtctcacttcttgccaaagaacaccacaaatagcacaaacatacatgacaccacacatattacaaagacttttctttccttctctaacttatgattcctggccttcaagcacataatttctgcattcttcacagcaaccacaccacgagcatcatctatcgctttactctgtacttccaccttatcccgactctgttcgacctcctttcgcatcacttcgttctccctcctcaacgaattcaccctgtcccgcaaatcattcaagagctccctgatgaagcttgacgtcggcccgtcgtaccatgcccagaaatcacaccccccttgctgcaagaaaaaatcccacattcaaaccctaaaaacgcaaactcaacaaatccaacttgtaataccaaaatccctcacttacccgagcgttttggcacttgtaataccggcgcccagggttgtccatgctccacgagatccacctcaccgccttggctagtggacggcatcggcacatcaccgcgggctgatattctagcggaccaacccgataaggcacgggagatgccttcgactcacgggtagacgacaagccatccctcatcgagctcgacatctccgcgccaccgctcgctgccggtcgccaagtcactgccgccgccgccgccccgctcggttcccgcttcgctagggtttcggtgaatggggataacctaaccgtgcgccaaacatttcgcccattatatcctaactaccgccctgctgactcagcgctgaagaccatggtcaatgtgccacgtaggacaaaatcgggcacaatactgcccagggaccaacactgacccggttttgatagttaggggacccccgatatctggtttgtcggtttgaggacgttttggtaactcgatgacaagttcagggaccttcggtgtacttttctctttctagttcgctcgcgccggtcaccgcgaacactcgaagcctattcatcagacttaccccctcagatgattttttcccagaaagaaggggtcgttccgaaatgtggttaaattagtttctggcccaacccaggagtacgtaaagtctgtcagcattcagcaaactgcccagaagcctagaaaatatgggaccttgggctttacggaccatgtaatttctggcccatttcgctacagaagggcagtactctctagcttgttgtaactagattcaggatcagagtattgggagttcacaatgtttaatgtcttggcatctgtcgtgtgatttttgagaaaaaatcacctaatttttttctcccctcagatctgcatccaacggtaaaaaaataacagtacagagaatccattcaaatagcctgtgattgtgcttgttagcagagtagtatttagtaaagattaacacaaatgttgaatttataactaaaattacagtgttttataactaaaattacatttgtaaaaacagtagatatggcatgtaagtgcactgtaattttagtataagtgcactgtaaattttggtaactagaatatttatcgttttagaacaaatacattacttgagaaaccgtgcagatatttgaagttataaatgttgcatttataactaaaattacagtgctttataactaaaattacatttgtaaaaacagtatatatggcatgtaagttgtcagggttatggataccatatacctaatagtagttgactaaatctcggcaggacccactacatactatatcccatacggaagcaatctttggatataggaggagttccagataaggaaagacaaccagaattctacatgaaaacgacaaggactactcggattgtatccatattggtttccctagttctacttggacaaggggacacctatgggtataaatacaagcctcctaggaggacagggggacacccaccatgagacgatcaacacgatcaacacccactatgggacagaggatcaacactcaacacaatcgacatagaagccacaacatagaagcctacatacgctaagacacgccgccggatatcgactttagagataagcacggctagtcccctacggtgtttccggatactgttaggagagacgaaagcgctatctctgatctcgccgggcacgaattcaaggaggaaggctaccctgttgtcgactacgactcagatcgtcagaccgccatgttgacaacagttagataggctaccccaaatattgtactggtatgattatcatgaataagagcaatatcggcttcggccaacaggatgtagggttattacctgacaattcaggggcccgaacctgtataaaaatccctgtctccgtctcttttacctcagtcttgcgtatatcctagcaccaacgatccccatcctgtccaaataccgtagtcgtgacatcaaacgtcgacagtggcgcgccaggtagggggattttggtgcttcaggatttcgacgagataggtttaagagatggattttccaacaacaagctactcgatgacttcgactgtggggagatctaatccgaccggaatatatcctccgacgagatcaggatcatcgccgccgagaaggagacgccgacctccacccggccgtgcagctgctgtcccaagtgcgacgcccatccaaggaatgccaagcccgacttggtggcaaatcaatctgtatttgcttcgttcttgtgtccggttaggactggaattaggcaaacggaatacgtgcatgcatgacaaccgtgccgaccaatcaggactcaggagatatccatccgcaggcctacatgttgacgtacgtacatatgccgataggtttccaaaacctattcggtatatgcacatcaacacatgtctacacggcacaactgcataatattcaaacaaatcaacaaaagtatttagtagtttgatttttataattgatctactaattccatagatacatccggcatgtatctacaaagatacgcaatattttatacacaatttatcgtacctattttttcaatttatacagcattgtcagatcaataatttattatgtttacccagagcatgttttttatacaatatctgttgcgcggttgtccccgatgttaaatcgactacgatctaacgctgggggctcactccgtcttcttctgtataaatcatgcttgtttacggttgtccccgatgttacatctgctcgttatatcctgataatactagaagatccatgcagtttttagtacatactcgatattctctgctatatatcttgccttctagaaaatatttttcaggaacaattgagcactcgagtaggatgtggtcgagtacaccgtattatcgaggtcattcttgacaaatgcagagtcgtcgcgtccaacttaccaacgaagaccgacgacctatctcatagcaccggccatggctggactactcgagaaaaggttgttatcggataattcctcgcaaatgtcgtcggcttgatcacccgacatgactgcgaacggacatccagatacgctataagttgggtatgtgagtcatgctggccacatgagatacacatataataaaccaactttagcacctccattggtgtccgagagataattctacacgttcgctggttcctaaaccagtacgtagcaatctctcgcaccgcaacctccattggtgttcgagagattctactcgcttgctggttctcgaaccagtacgtagcaatctctcacaccgcaacaccaatgaaccagcacgtagcaatctctcacaccgcaacttccattggtgtttgagagattctactcgctcgctggttctcgaaccagtacgtagcaatctctcacactgcaacttccattggtgttctagagattctactcgctcgctggttcccgaatcagtacgtacaatctctcgcaccgaaacttcagatggtcgaggtacgactacagcaataacacagcggtcctcgcaccatgacttcagatggttgaggaacagctacgactagtcttcgaccaacagtgtagcggtccttgtaccacgactccaaatgatcgagagacacctactcactggttctcaaccagtcaatggtagcgatctctcgtacatttacttctagtggtcgagtttagcctacacctggttctcgatcagcgatgtagcatttctcccactacttccactttaagtgatcgagttacgactactgcctggtcctcgaccagcgatgtagcatttcttccactacttacactttaagtggtcgagttacgactactgcctggtcctcgaccagtgatgtagcgtttctcccactacttccacttcaagtggtcgagtcacgactactgcctggtcctcgaccagcgatgtagcgtttctcccactacttccactttaagtggtcgagttacgactactgcctggtcctcgaccaagggtgtagcgattctcccattactcctgcttcaacaaagttgatatcaggtgcacaatatcgccaaatgttttacccagagatcccttaccacgatgacacctggcgttgaaacctatcctactgtccctttatgccgtcttgacaaggcctccgaggaacctaagggaacttcggctggggacgcccagagccgataaggccttgtcggatcctttagagacgaaagaccatgtaagatctggtcgtgtaagagttctcgccttgcgtattaactaagccgtgtaatcggaaatggactttccaacttcacggctggggactaagatcagtgcttgttcaaccgaggtaggtcaaaggtccaagagccttatcctctgagaacgattctccgacgacaaggctgggggctagggagagtgtatgactctacaaactgactgatcggagtcggtaagagagaggacgctcatatacaaaacactggtctgtacattcaattcaccagtctgtcatattataacatgtcaccctttgagcattcgctcgggggctatttctatctaatattttttctgagtattgatttcaggaaaattctattcgacattatcgaagactccatgtctctatggttctacaccaagatcgactaaggcgagtatgacaaatgttgacaaggctccgtcgcagactctacgcctactcgattgctcgagaacggttggtagatctcgacaaggaataccgaatgaagaaatggtgtacccatcgagataaaatttcttgacttcaatccaaattctcaattacagcaagacaggaaacttagtcgtacgctctgtactttctcggtcgacatcagagattgacttagacaaacccgttcggtgcctgcacgaggctgataaaggaagtctaacgttatctctaaactcacctagaacggtcacgtgtgctcgataacatttcctccaaagtctgtggttgagaatatgaactcgttcatgtgcattgaagtcgggggctattgtcaaggttatggataccacatacctaatagtagttgactaaatatcggcaggacccactacatactatatctcatacggaagcgatcttcggatataggaggagttccggataaggaaagacaaccagagttctacatgaaaacgacaaggactactcggattgtatccatattggtttccctagttctacttggacaaggggacacctatggatataaatacaaggcccctaggaggacagggggacacccaccatgagacgatcaacacgatcaacacccactatgggacagaggatcaacacccaacacaatcgacatagaagccacaacatagaagcctacatacgccaagacacgccgctggatatcaacttcagagatacgcacggggtgtcttcggatactgttaggagagacgaaagcgctatctctgatctcgccgggcacagattcaaggaggaaggctaccctgttgtcgactacgagtcagatcgtcagaccgccatgtcgacaacagttagataggctaccccaaatattgtactggtgtgattatcatgaataagagcaatatcggcttcggccaacaggatgtagggttattacctgacaattcaggggcccgaacctgtataaaaatccctgtctccgtctcttttacctcagtctcgcgtatatcctagcaccaacgatccccatactgtccaaataccgtagtcgtgacatcaaacgtcgacataagtgcactgtaattttagtacaagtgcactgtaaattttggtaactagaatatttgccgttttagtacaaatacattgcttgagaaaccgtgcagttatctgaagtgttaaatattacatttataagttgtaactaaaattacagtgctttataactaaaattacatttgtaaaaacagtagatatggcatgtaagtgcactgtaattttagtacaagtgcactgtaaattttggtaactagaatatttcgttttagtacaaatacattgcttgagaaaccgtgcagatatctgaagtgttaaatattgcatttataagttgtaactaaaattacagtgctttataactaaaattacatttgtaaaaacagtagatatgacatgtaagtgcacttattacaagtgtatttacacttgtaaatggctactgacatgcgtgatgtacaggaatccatcgatatatacaaagtcagattgactcggtcatgtactcaactaatcctgctgttgcacaaatcttggaaaacatcatgtggctagaaaaacgtcatagtttgactatggaagaaatcacccgacaaatatttagcaaaatcgaattacattagccgctagcacgaggcaacaaattatcaatgtctagtacacctagctagtggaatagtggattaattactggtagttacttctagaaacggaatcaaccgtacgtcaatgtcacggataaacttgtggcgtggtgcctcacgaagatcctagtaaagctcaagcacgatgacttatagataatctatcatatgcgtacggcacgatgacttcttcttttaggaggcatgatgacttttggacgcacatactaaccttcttcttatctactctgatctgatcgtcagtttattttaggctgtactgcgctgcatgaattgttatcctatcctaattataaccagcctttctaacatgcatgttatagtgtaacttaatcatcatgctttagctagctgtttgttgattgcttcagttaattactaattaatccaatccatgggagattagaggttgttgctagctagttagagccttgttgctagctagctactccgtagaggtgggccggagacacgatgatttgaaaaggtcagaagcataaacaaattgctgtctccaatagggagacgtggtttagcaagtggatgagtcagtttaatttttgcttatctagtgggaagatgtcatattatttcacgcttgatcaatactccgttgagcaacgtgctctgccgccgtctttccgttgtacttgaacgacataaacaatgttgttttataatgggagaatctattttataccactttgttcgagttcaatgatttgcaatcgacattatcgttttctataatataccgatgactttatcaattgttctacaatagacattcttttcgaaaatatatatccaaaatacccttatggacatacaagattaacaattgattaatctaatttgaagtttcaaaaaaaatataaaatcttttatgtggcgttctaacacatggaattttttaggtaaattttgctacaggacactacgatttcgtggttttagccgtaggttaccgcctgaactcactttaaggggaagacactccataaacgtggtaatttgctaatgtacaccatgccgattataataataatttccggttgaagaggagagagaaatcacgtgaaatgtcaaaaatacccttgggactacatgtcagctctcctatctctgctctctctctatcccctccttctagcgtctgatgtgcggcgtcgggtggtcgtggcggcggaggacgacgccaacaccgcgatagcgacggtggacatggcgggcttccgcgcctcctcctcctcctgcgccttgagcgccgctaggatgtcgagcccgatccctcccgcgtcgccgtgcgccacccgcgatcgatcgggcttgtcggcgacggaaggccgccgctgccatactcttgctgctgcggctactagggtgagcagtgggcgatggagacgccgagcttgccttctccaccatggctgagatgagtagagagagagaggaggagatcccgttgacccatcgcttggtggacttcgcggcattgaggatgatggtggagatggggtcggtggcagcggacccgccgttgctgtcgctccaaccctcacccgcgcgtcgccgcggcccctctgctccacgcatcaaacgtcggaaggaggggatagagagagaggagagacacgagagctgctgacatgtgggtacaaggacatttttgacatttcacgtgatctctctcttctcttcaaccagaaattattattccaatcggcgcggtgtccattggcaaattaccacatttatggagtgtcttcccccaaaagtgagttgggtggtgtcctacggctaaaaccacgaaatcgaagtgtcttgtagcaaaatttgccaaatttgtatagaagtttcaagttttttacatttctattttttataaaaaatataacttatttgttatatgctatataaaatactttttattgctatttttaatataaatcatctttcatacactacataagatatttttatgctattatgtcttgtataagcaaattctttctcatataccacataaaaaaatactttttcctaaaaactaagtatacacaaaaagacttgaaacttgtatacaaacttccatgttatgtaaggtggccacataaaaattttcatttttttgaacttccggtgataatcttgtatgtctctaagggtattttaggtatttttgaaaagaagtttcagcctaatggcgtattgtagaataattgataaagtcaccggtatattataaaaagagacactatcaatggcaaatcattaaactcgagcaactcaggggtatagaattaattctctcttgattaaacaggcaccattgcgttttcggatactggtctggctatctgaagtgtaggatagaatcacaagaactaagccaaccagaggggggtgaatggttagtatacccaaaatccgaaaacttttagcggaaataaaagttaccctcgaaatcgacgagtcacggtctaaccgaaagtgttgcgccggtctgaccgatgtagatcgatcggtcgaaccgccgaagtcgcctgtcgcgcctgccgccgccgccggtctaaccgcctgtatgccgccggtttgaccgctgcttgccgccggtctgaccgccggtgtatcaccggttagaccgccgaaacccggtgaaacacaaatcgaagaactcttaaagtggatgacgactttatttattctctctgtgtttagaaagtgcaccaacagcactccttacaaaaatttcgactaaactcgaaaccctaactcaaaactcaactcaattactctcaaaagcgataccgggaagcctcacgctccccctctatttatacccgaggtaagcagcctaaagccacgaaccaaactcatactaagagtcctaaacaccttagaaaaccctctagtacaagaaacaaactttacataaccaatcgtaccaaatttggactccttccaaattcgactccgcattccatacgcacataatacctccatcgtatgccatatggaatctccatcaaccacgtgcatcaacactagcctaagtatcctgcatgatctctgaccaccacgaacgtcgtcttatccccaaaccgactcccggtccatcaccgcaaatactctcccgaggcatcgagtcacctacacatgaaataaacaaagaaaccatattccgagaccaagctatctccaacttgactcattagtaacaaacaacggtattacgtacgtatagtatccatctagaagtcataatcatgaaataatcacggatatccaaacaaacaacccgaaaccgaaaccgacagagtcggccggtcagaccgcgggctggccggtctgactgcgcgcataccgccggtctgaccggcaacacctgcccggtctgaccggtcacataaaatgacaacacctgtaattcacctataaatccaatcatctccgaaaccacttcgtgaataaatttcaaataacaaaattaataatctccaatgccaattgttcatcacagaataataataaaaacacctttgattttacatgaagcacagttcttattcctagctcagtactgatcgaattgtggacaagacgaccattaatttgtcatttagttagagtcgtccaaattaattgatcagcagctgatttgtcctgaagtatttgacaaattgagcaagaatttgatggtgtggtttgtaattaattgagagtactatacatacaagtggtgttatgcaagctagctgggcactcgatcgatcgtttggctccgatgatgacagccatctcgatctacacgaaggaatcataagaaggtaaaggtatattccaacctccactgtacaactttgaagatgcaaagctagcccagcaactagtacttgcatagtacaaagacctattatatatcagcttatacagggacaagaacaaattgtttaatttgtaaggtccaatgaatcaacgacaaagtagcatgcttctttcatgggcttgataccagaacaattaagaaatatgcataaatatctattatctattatatactaaaagtccaataaaattcctacaaatactctcaagccgtcacgtggcgataaaatcctaaaaattcaaagaaaaaagcaaaatatatatcctttgattttcacttaaattgatgggtccattattataccccgttagatgaaattaatcttaaaacaaaccaaatactatacgtcccagctctcccccttctcgcgcgcataggtaggtatatgtacgtacatgggtacgtacgcttccttcccttcttctttttttttcatttatataatggatatattttttaaataatcataattaaaaaaaaatctaccatcatataactcaggtaactaattagctctatatttttttttgaaaataaaatttataccattatatgttacccattaaatttataatataagataatttccacttaaaatagtgtactcataatattattttcaagtagtgcactattttaaaataaagtttacacaattatattgtgtacctatcaaataaacaattcaagatctacattaactaatttatacgtgtacttaaaccgatgacctattatttaaatcatcggatctattttttattacattatactattattctcaaataatgcactgtttcgaaataaagtctacaccattatattgtgtacccattaaattagcaagttaaaatctatattaacaaatctacacgtacactagaattggtggacccattatttaaatcatcggatgtaatatcctgaaaatccctaataataaaaatcactaaaatttcgaactttttaaaacttttgcattatgctggatgttatggttgctattgcttgccaaactataaattgtcacgattgaagattaagctaaagccgtacaactaagaagtaattagaataagataattattattaatcctataaatatttgtgtacatgatagcaagccaaataaaacacaagtcaattattaataattacaaattgtatgttaaatacttgaaccatgtcgacaagtgtcatgacatctaagtaaccacgaagtagtcgccactacaatgattttatatatataggagtgttccactagaataattaaattaacatttataactttcatcgagtctctcatgggatggattcactcatgtaaaataatttgtcatgcaaataaattgaactttatatataaaataggtttatgtgagtgtttaattaaacatttaggtcaatattgtaccaagtatcaatttacttttatggaataatcgattaaatgtgtccttgtaaaatacattgttatacaaataaactcgaccaatgtgctattgtattattaaggtcacattagaatatttaattagtttttaagaaatatcaaagcttataggttatattggataatttttggataatttaatggaaagcaaattcatttgggaactaataaataaccaaataaatattcaaatcaaacatttgaattctcaaaaccaaaatatattgattacatttcaattcaaattcaatcccattcacttttgcagattagcccctccctttccttcctttccctttttcttccttttctctcttttctcagccgccactattcaatgtccgccaaccgttcgatcccgtctactgcgtgcaccacatcgcttctggccgcgccagtcacgcccgtgccgcaccgcaaccgcgcctccttcccctcagctgcgtccgaccccaaccctagccgcaccgcacttgccgctccgcaaccgtatcgcgttgtatcgcgccgtgcgtcgcatcgcgccggacccacgcccgcgcccgcgtcatcccttccgtgccgcgtcgtgccagggcccgcaccacgccaagccgcacctctaaccgctctcctagattctctccagaaaacacggagctgcaccatcgcccatgtgcgcgcgtcgccgtcgccacgcctgccttcatcacccagacacgcgcgtcccatcgcccccatccacgcccaatggataaaacggagccctctcctccagctagcgcccagacctgcagtctataggttataggtgtgatgattaagccacagaaccttaatggagaaggagatgaatctcagccgcgtcatccacctcattgctcttatccgatcaccattagtactctagctcgcctaggcatgtgctggtgatcttatccccatagtttgcttgcatcctaagcgaagccctcaacaaaatccccatccctctcagccttcttctcgtatgcatttcatcgaacaccttgcgatcaccctctcaccaccgctagagatcaccattgtgaggctccccggccggagcaggaggttagagggagtggaggaagagccgtgctgccgccgtcgccatgggggaagccgggtagccgctggacatcaagaaacgccgtcgagcaccttacgtcgctgccgtttgcccctgtcctgcaccgcgtcgagctccacttcgctgcgtttcgccatctcgccatctcgcggtacaccctcgcgcccgtagcgtcctccatacatctaattgctagcgccggcttcaaaatcgacgattagcgcccatggccgtgccgccccagccgccgtttcatcgccggcgagctctccgtgggtaggctatcccgggagctcccctctccatatagttcgtgaaatcgaatccccatacctcgtagatgctcccgcacccttcaattcggccgaaggatgtccctagcaccgaagccccttgtagccgagctcgggcatggcgtcgcctgatggcgccgcgcgcccccgtctcctcgcgcgccggctgccatcggcgggagatcaccggagctcctccgcgcctcaccctggccgtcgccgagccgcccgccgccgtcccggctcgggccggcaacgccggctgcgccgagccgcgcctctgcctcgctcggtaacgggcgagaggaagaagaagatgaggagagagagaaaccgtgtgggacccacatgtgattagcgcacagtaatcctatccctaacggtgattatcccactcaatggcaggtggggtccctatagttaaaatctaagaaaacacaattatatattttgttcctatgacaggcgggacccaatggtaattaaacaagcaggtttgaccctaagtcaaccagggccggtcccacatgtcaaccacggtgggttttggataatgtttccgattaaaaataaatcatttatgaacagtgcatttttacaatttctcggattaactcaaatttgaatctttaaattagtataaattattcattttagctccgattcgagtgaaacttgaacctaaattcatctaaattcataagctttccaatggtatataactcactatttaataaaatatattaatatcaaatgattagattatggtcaacttaaaaatgtgctaataaataaaattgatattgtacagtagagtagatgtcaaataaatatatttaacatgttttgtcactgtagcaaccacataaactaagtataagtaatgtctcaaatgaatggatgtataggaaaatactagtgcttatttaatattcgatggccatataattaaattcatgacttaaaaattagttacataaagtttagcttcatattttgtaactaaaatattaatactcatagatgaatctttaacttgtttatgagaaataataacagagctagtgtgattaaatcacctatacgaaattaattacttaatgtcatgttctttggaatagtatcttttaagttggtaatcttaagttgataaacagtaccaactcgccaaatccacctgcatcacatatactgtatagcttacagtaaatagctcatgcttagtaaatgatctaatactagtatgttattgcactcacaactactgtacagtccatttaaatcatacacaagaacaataacctacctttttcatatattaaactgaggagtctatgataagcgtgtatagtagataaaacactaattataaatcttgacctcacacacaattatagtttgaccgtgacttaggattatttatggtaaaattatgcattgagataaactttaactataatattatggaccacactaatctaacctacatagcatgtaattcgttggaaccctaatacagtaatatttgtagagccatgcttagataatccatcctgttagaactcttgttatgattaaattatccactgagccttggtaaatctcctgtagggtgtcaccatttaaattacaatcaaagctagtttagccatgaactccacatagcaatagttcatagataattccatagtcctgagtattgagttctgtatgtgagcagccatagtttggacttcgtagcaccttacaatccattagcaagcacgagtgatatgaatagccctaggtatattccgaacaattatattttgtttgtgcatatttgattgttgcttgaatattggttttctcgcatattatagaaattgtgtatcgattagtggtgaggcaacgtatgcagcttccaggaggtgaaggttgatcaagattataccaagaataagaactatcctgagcaggcaagtcatcactaatctttgagcatgttgaacctattgcgaaaattatgttgatttaaataaaattgcatgctatatatatgaatatgaatgtcctacttgttatatatgccatgccttgatattgattatctgtatgaccattgtaaaccctgctatcgtgtgtacttagtcaatattgaacaaatgcttagtcatgctaattagaatcatgcattctcatatttatcaagtgctatatgcttgggcaactaccttagggaaggtagttgagatgcggcatgtggagacatgagcgccacattgccatgacaaggatgacacgaactgtgaaaggagaaataaaattaaacactgttttcgactggggcggctggggtacttgggtggagtccggaaaaggctagtacca

SEQ ID NO: 15179 - DNA, 876 bp, Oryza sativa
tcttgcccaattcctcagccgatgggattgtatgaccagtagggagctgaatttgcttttctcggagtagtaaatcaaaaatcttgtaagccttggtgatatcaaagtcatactttttctctttcccaggactttttacccattggcatggtatgacctttttgctcctcacccattcggttgcagctatttcagaatcatcttccttgtcatccgacccatacatgtatggacaaacatgattaactttcttagagcttttcctgacttccgccgacctatgctcatgcaaggttaccttctgtattagatacgataagctatcaaagtctttggacgagaacttctccctgatcggaggaatcataccctggaaggccaaatcggctagttgagcatcagtcaaactcaagctaaagcatttgttcctcatctccctgaatctctgaatgtactcgtgcacgggttcatcatgtcgctgcttgatcactgtcaagtcggtcaacttcatctcatgaaccccactgtagaaatagctatgaaattgcttctccaaatcggcccaactattgatcgacccatatggcaaagaggaaaaccaagtaaaagctgatccagacaaagataaccggagtaacctaactctcagagcgtctacagccaatgcttcaccacactgagcagggaatcggctgatgtgctcataagttgacacgccttcttttcccgaaaacttggagaaatctggaactttaaaccgattggggagagggactctttcaaaccactcaggataaggctgtcgatacaagcttccagtctcttttggtttaagcccaaattgttctctcattacatcggcaatcacattgggcc

SEQ ID NO: 15180 - DNA, 802 bp, Oryza sativa
tttttcacaacggaacctttaacaaggcttgttcgagaatgtgaggctaatcttgagctcctgtttcctatcgaagcagaagtacttgagtctgctagctcctctgctaagttgcaacctcagaatgatgatgcggctagccatgacccagcgtcatctgtcgatgttgaaacctcggacgtgtaccgaagcacactcgcggcaatgaaggcgattcagggcctccgcaaagccagctctacttacaatcccttgtcgctcgccaggttcttccatggagaggacggtgaagcctgctctggagccatcacctctgaaagtgattcctattctgattcccagattgaagatgctgaagatgatgataaagaggtgcaatcaagggagcagaatacggctcaaaatgctgcagaaggccagccacgtgatgaatgatccgtctttgcattgtgctgtttaatcctccgaggccctgataagtgtaaatgatacagctgcggcatacactaataatcttgatccttgaaatgtataaccattactgatcttcccaatggaactcttttcctttttcttttcgctcgtagatatcaaagttggatttatatttactgtgttctttggtttgacagcatattatcaggattttggagttctggatttctgatgttttaggcagagagcaaatgtgagttattagctgacttgggtgaactttatgcaaacccccagtagcattttgacatattctttgtacaaagaaagccacaaagctcccaattctgcagtgtacattcataaa

SEQ ID NO: 15181 - DNA, 4948 bp, Oryza sativa
actcctaggcggttaggtgtcgttcctgagccaccaatctacttgtggttggccgggagaagtttgtgaaggttggatctcacctccgaaagggaagagatacctttagtggaaggaggattgcttagtgcaccctctttaggaaaggggtagctaagacccggctcttagagagctcctcaacggagagtagaatcccctcaaggattcgaactttgagaagaacttcttgagcttcatctttggtgactttacttcctccctctccactagctttgcttgtttgagccgctataggtctagtggctgtttgtgctagcatattcttgttgtaggctcatccaacatggtcctcgccatctcaatgagagtcctattcttcctctcggctactccatttgttgagatgaatatggagccgagaactcgtgcttgatgccttcttcatcaaggaaactctcgatgcacgtgttcttgaactccttgccattgtcgtttcgaatgttcttgatcttgaggtcgaactcgttttgtgctcttcttgcaaacttcttgaagatagtttgtgtctcactcttgtcatgcaaaaagaacacccacgtgaagcgtgaaaagtcatcaacaataacaagaccatatttgttacctccaatgcttagataagcaattggtccgaagaggtccatgtggagaagctccaatggtcttgtagttgtcatcacattcttgtcgggcgatgtgctctaatttgtttgccggcttgacatgcactacacaccctatctttctcaaattgaacatttgttagtccaaggatgtgatcgtgctttagaagcttgtgaagattcctcataccaacatgggctagccttcgatgccaaagccactccgtgttggacttagccactaagcatgtctcatgtttggctttacttgaggaaaaatccacaaggtaaagctttcccttgagaacacccttaaagactaccgaggaatcattccttctatagacggtcacatccacatcggtaaaaagataattgtaacccatagaacataattgagaaacggacaaaagattgtagtttagagattttaccaagagagcgttggcaatggaaagatcattagagattgcaatcttacccaatcccataacatttccctttccatcgtccctaaagactatgttatcttgtgaagtgccatttggatcaagagttgaaaatattgattcttctccggtcatgtgattggtgcatccactatcaatcacccaacttcttccaccggagacatattcctacaagagatcaatttctagttttaggtacccatacttgcttgagtcctctcatgttagtaacaagtgccttaggcacccaaagtactctcttgatagaaatattcttgccccttagactaacatacttagcaacaacacgaccactagcattcttcctaagaacataagatgcatcaaaagaacaatgtgaagcataatcattaggaaggatacttttggccttaacaaaattgctaagaccttggggcctcttgatcatcacactcttgtccacctttccttttggtggaggaacatacctaagaccctcatggttgaagttgtccctttgatagcctaggtactcctttagggtcttactacccatatgccacttaagtaggccattgtgaaggagtcccataagcttctcattttgcttttgcaaagcactcaaagaaatagagttagtagcataagcttcaatatcaatatctttgcatctcacacatggttcattgcttgggacaattttggaacaagatggctcgctagggagagagacactattctttaaggtttcgaacttctcttcaagagtgaggtatgctttgtccaagccatccactctctcttgaagttgagtgttcgccacctcaagattagcatgagactctttggtttgcttgtaaagccgtaccaatgcctcatttttttctctctctccttagcaagctcactcttgagttcatgggaccgctctttctcacgaatgagcaaagcctcttgcctctcaagagttgcatattggtcttcaattctcccaagcaactcactcaagtgtggtagggattccttagttatggacttgaacaattcatcatccataacctcatcctcctcatcactaacaagatcaacattaaatgacttgagaggagaaggtaccttaggctcctttgccatgaggtaaacgggagcatcctcatcacttgagtagtcgaagagtctcggtggtgatgaaggcttgacggcgaacgtggcgactccttcttcatcacttgagcttgactcggagtcagagccgtagatcatcccaaagtgagctgggccataatgtaccctcttgctatgcttgtgcttctccttcttctcatccttcttctcactcttcttcttatcttccttgatgtgggaaccatccttgaggtgagggcaatccgcaatgaagtgcccgagctctttgcacacgtagcacactcttgcggagtgtcttccacttgacttgttggagtagtgcttggaagatcctcccttgaagaagccgcttcgcctcatgaacttgccgaacttcttgatggctctcttcatcatcggtctccaccttgctcttacacttgcggttctcttcttcttcttccattgccttcaaagccaagtcatccttcttgatgcttgcagttgagctttggttgatgtattggatgacatccttggactcttgcacgagcatgtcatgggcaaggatgcgtccgagcaaatcatgaggtgtgagagtcttgtagtccggacgctcacgaatgatggtcaccaaggtagagtttcttggagtgattgctcgaaccatcttcttgaccacaacctcatcggtcatgtccttggagccaagtccttgatctcattgacgatcttgctcaaccggtcgtacatgtcgcttgggctctcaccatccaacatcacaaatctctcaaattgcccctttaggatctccaccttggactcacgaacactatccgtgccttcatgcaagttccgaagcgtgtcccaaatcactttgtcactctcaatgccatccacacggttgaactcacttccactcaatgcgctaagtattgcattagcggcttgagcgttcttgtgctcgttctcgtcgtcctccttggtgggatcttcgggattctgcaaaacatagcatttttcgactattctccaaatagatgagttaatagacttcaaatgcatcttcatcttatgcttccaagcggcatagtccgtaccattgaagtacggagctttgccactataggtactcacataagatgtagatgtagggggatagtcataagggatcttagctcccttatcactatcgatcccctcccccgcttggcccgacatgatctctctaagcggttaagcctaattaggagattaggctctgataccaattgaaagtgtcaattaggcctagaggggggtgaataggctaattcaaaaattcaattaaaagcggaagcagtaattttcggatatttccgaaattttcggatatatccgaaaattttcggagtcagcacaaatagcaaagtaaatcctagatctagttgcctacaacaagaatatgctagcacaaacaacaactagacctatagcggctcaaacaagcaaagctagtggagagagaggaagtaagtcaccaaagatgaagctcacgaagttgttcccgaagttcgaatccttgaggggattctactctccgttgaggagctcactaagagccgggtcttagctaaccctttcctcaagaggttgcactaagcactcctccttccactaagggtatctcttccctttcggaggtgagatccgaccttcacaaacttctcccagccaaccacaagtagatcggtggctcgggagtgacacctagccgcctaggagtccttaacctccaagagtaacaaatgtagcaaagaactcccggagatgatgcaagtgctcacaaatcttcacgaagtcaacaacaagcactcacacaaactcgaatccacaactctcacacacacacaccaaatccaaatcgaacacgggtgagaggggaaacaagaaagcaaggctcaaaagtgctagagagagagcaagccaagggcacaaatgattggaatggaaccagcagccctcacaagtgagggggggggctatttatagccacagcccaaattctgcccgttatgcacaataattgagattttcggatattccgaaagattttcggacttgtccgaaaattccagctcagcaccaacagcaaagtcaacgaaagatttttcggacattccgaaaattttttggataagtccaaaaatttccaccaccaaaacatggttctggatgttttcggaaaagtccgaaaatcactttcggacaagtccgaaaatacacagaagcgatttctgcctttgctgaagtttttcggaaactctgaaaatcaatttcggaaaagtacgaaaataaacagaaccacatttgccttcacagtcattttcggaaagtccgaaaatgtctttcggacatatccgaaaatttccagaagcaaaaattggttctgtgcattttcggaaagtccgaaaatgactttcggaaaactccaaaaatttccagaacatatcaaactgaggggaaacacttttaaaaaaagattttgagcactttgatcactcctcatatgtcaatgcatcatccctcttaatagtgcggcattcctattgactcaaatgaaaagaaaagttacaatataccatttgctcatctgccgcatcgcatcacatcaacgtatttggcgggatatgcattatggtaactcattgaggacataacaaactt

SEQ ID NO: 15182 - DNA, 2606 bp, Oryza sativa
ccaagagtggaagtttgagcagggttggcatgattggcccatgttgaaagcggctttgttaggggaatttgaggtgcatttgaagtatgttaagatggatgagttattgttgttgactcagacgggttttgtctctgattatcggtcgaagttcaatcagttggtatatcagattcgtctgtatgatcctctgttgtctcccaattttcttattcgtcagtttctgttgggtttaaaggatgaattgcgagttcctgtgcaagctcaacaacccacttcagtcacacaagctttcttagtggctctagcttatgagagtgctttgcctagttctgggagtaagaaatctgtttctaagaagaactttcaggtgggacgaggtggagagaaacagaagttggctcctggtgaattgtggaaggctcagcagttgaaagagtaccggagagcacaaggattatgttttaagtgtggtgataaatatattccaggtcatgtgtgctcaaaacaggaaactcctcagttgaaagctatggagttacaagaggaggcaattgttctgactgatgaacttttggatgctgttactgggttggagttgtctgaagacagtgccaatttgtcgcttcatgctttggccggcacttctcacaccaacattgtccaactcagggctctgtctagcaatcaggtgcttattgttttggttgattctggagttctcatagtttcattaattctgctctgtgtcatcgtttacaccttctgtctgagccaattccacccacttctgtcagagtggctaatggagaagttctggtttgtgatgcaaagatttctcaatttgattggtgggtgcaaggccatcagttttcttttccagtcagggttttacctatggggggctatgatcttgtattgggaatggattggctaactcaatacagccctatgacatgtgattgggctgctaagtggctgcagttttcgtatcagggttctctcatcaagctgcagggaattcagtcttcttctgacttaaccactcctcaagaagctactcctgaacaggttgtgaaatggacaaagggcaatgatgtgtgggccattgcagtgttggaacaatctggtggggtgactatacctgtgtctgaatttcctgagattcagtctttgctatctgaatttgagtctgtttttcagaatgtttctgatttacctccccatagagctttggatcatgctattcctttgctccctaatgccattcctgttaattctcgtccctatagctattctcctgctcagaaagatgaaattgagcgtcaagtgtctgaatgctgtcagctagactgattaccactagttgcagtccttttgcttctcctgtgcttttggtcaaaaagaaagacaattcctggaggttttgtgttgattaccggcgtttgaatgctctcactgtgaagaataagtttcccctccctattggggatgagctgtagatgagttggctggcactaaatatttttctaagttggatcttcgcagtgggtatcatcaaattcgcatgctggagtttgatgagtataagacagcttttaagacacaccatggccattttcaatttagagttatgccctttggactcacaaatgcacctgccacttttcagtgtttaatgaactccatctttgctccattcttgaggaagtttgtgttgcttttcatggatgacattttgatttacagtaaatcttgggaagaccatttacagcatttgaaatgtgtcttgcagttgctgtagcaacatcaattttgtgccaaattatctaagtgtacttttgctgctagtcagttagagtatttgggacatattatatcagctcagggagtggccactgaccctgataaaactcaagtaatgcggcaatggccaattccaacaaactgactgagttaaggggttttttgggtttaacaggctattatcgcaagtttgtgcagaattatgggattttggctaaacctttaactatgttacttcagaaaaatgctaagtttgtgtggactgatcaagctcatcaggcatttttggccttaaaacaggatatggttacagctcctgttttgatatcacctgatttttctaagtcattcaccattgaaactgatgcatgttccactggcattggagctgtgctttctcaggaggggcaccctgtggctttctacagtaaggctttgggagtaaacaatcagaagttatccatctatgagaaggagttcttggctataatgatggctgttgacaaatggagagcatatctgttaaggggaccatttgttattaaaactgatcatcaatccttgtgccatttggatgatcaagttttgggttttgaattacagaggaaggctatgaccaagttaattggtctttagtataggtttcagtataaaaagggagtggacaataagtcagttgatgctttgtctcgggtgggacatttcttttctctccaggctatttctgttgtgcagcctgtgtggatacaagaagtgttgaattcttatgttgtggattctcaggctcaattactgctgat

SEQ ID NO: 15183 - DNA, 574 bp, Oryza sativa
cgtgtgtacatatatatacactcatcagtcatctaaaattgcacaataatgtgcctgtatatatgtacatgtagttctacgaccatttcttcgattgggggttaaaggagcagatcgcggcgctggtggcggtgaggcagcggaacggcgtgacggcgacgagctcgctcaagatcatgctgcacgacgccgacgcctacgtcgccgagatcgacggcaaggtggtgatgaagatcggctcccgctacgacgtctccagcctcatcccgcccggcttccacctcgccgcccacggcaacggctacgccgtctgggagaaaatcgccgccgccgccgccgccgccgatcatcgcacctcttccagcgcatcgctctgattgattagcgatatgatgcttgtgtgccacctcttatgttttacttctgctgtatatggaacaggctcttctacctttaaaggtacgtactttcgtcactgatatgtgggatcgataaaccatgggtctaactgttagtgataaagccatgatgactttgaagatataggatttcaatccctgtatatagataagta

SEQ ID NO: 15184 - DNA, 1381 bp, Oryza sativa
aaatttggggaaatccattttgggagaccactgtctacgcggcgcatactctccaacctcaggtgcagaagtagtaacaggaacacgtgatacctgctcacgaggggaatcaccatgaggtggtggtgttgccgacgtagacgcaccagaagtagcagtcggggtcggcaacagcggcggcggattttgaggtggagttggcagagaagactccggagccgcagctgcggtcgccttgagtgcacgcgccaacatcgtctgctcctgctgaacctggccaagagaagtcatggagagatccactttggtttgaacacgatccagacgttccccttgttgcgccaacttgttgtcaatcagatgaagacgcttgccgatgtcctcaatggtgttcaccttcaccaacaactccttcaggacctccataacccgctcctccatggacgccatggccgccaccatctggcgaacttgagcactgggctttgcgggtgccgtgacgaatctcgcggaaacccgatcgaaccaaacacgagaattactgcagtttaccggaaagcaaaccacaaactcagtgccggaatcaccgatcaagaattaaccgacggagaggaagcacccgggatcaaaagcgactaataccaagttgttgtgacccaaatctacggcggaatccctcgccggaagttcgccggagatctagaagagaagaggcgagaagaacagggtagaaaggggaaacacgaggaagcagttggggaggaggatatttttcatttctttcatgaattgttttctcaatacagctggagtatatatactcacgcactccacccctcttgcccttagggcccaccttgtcatagacacttctatctataaagagtagaagatgtattcacttctgaaaagcgtcaatgtagaaaacgccttcaccctgttgctcgccattgctgacacactgatcgcttcacgcatcagtcgtgacaggaggacactaggccgtgggccatctcggctcccgactagccactagatctaggggtcggacggctaggcagtggggataggattaatatgattttttaaaaaacaattttcctatagactttttttataaaaaaatacaccgtttaactatatggaaaccgtgcgtacgaaaaacggtttcgttttgaaacttatgacatgtttcattaaaaatgtgataaatcgagataacaactaatttgctctataaaaaccacacaaaaaaaaggaatctttttaggcggatggaatcaattctactcctgttcttttacttctgtacagaaaccggtaactggaagaagtaaaacccaggcaaggcagagagccagcgaaagcggcaaaagcatcg

SEQ ID NO: 15185 - DNA, 1583 bp, Oryza sativa
tttttctcctacagaaatgactttagttgaagtcataattgaggtatgcaaggaagaaaaggattagaaactgtagcgaatgcacgaaacttgacatcaggaaatgcagatatatgtggtttgtgtctttgtgatactgctgtgttagtgtggtattaacaccatgacactcaaacgatgatatgtgttatgcaaacaacaagtacacttggctttgcaaaataatcatatcctgccatgatgagctagatttaccttttcatttttgtggatcatccaagcacaattgattgagcaattagattgtttaacatactaggatgtacttctaccctccaaacttgtgaacttgtgtataccaagtgtttagtacctgaacagcctctttttgtgcttcaattcatcaagttctgatcattcgaaagcatctgcatcattattctatcatgagggcccatcgttaaatggcagatggtattatggtcttggacacattaatggcaaagaagtagaaaggtttttggagataaacagtcttaagaaacatttgacgccttaaagggaaggttgtacaaatagcatgaattaccacctttcaatcagcagctgaagataaaatctaaatcttcctagttcctacatactttagacattctttagattttggcattttgtttcttgattgcttgggtaattttaaggaaccatttagtgagtttgtatcaatttgcttcatgttcttttttctgaatcatcggttgatttatttatctttgtatattccttgagctggaaatgttctaacacttgctgatgaaggtgctcaaagaaagaattgaacgtgtcaaagctaagaagaatggggcttttacatctaagagcgaattcactgaagagatgttagagatacgcaaagcttttgtcatcatccatggggagatgattcttctgcaaacctatagctccctaaattttgccggtgagctcatcaaaccaagttggctagtttgaagtatgttatcagtagtatacttctcatgcaatgccttgatattgtgtgcattcaggacttgtgaagatactgaaaaaatatgacaagagaacaggtggtttgctcagcctacctttcactcaacgtgctcgacaccaaccatttttcacaacggaacctttaacaaggcttgttcgagaatgtgaggctaatcttgagctcctgtttcctatcgaagcagaagtacttgagtctgctagctcctctgctaagttgcaacctcagaatgatgatgcggctagccatgacccagcgtcatctgtcgatgttgaaacctcggacgtgtaccgaagcacactcgcggcaatgaaggcgattcagggcctccgcaaagccagctctacttacaatcccttgtcgctcgccaggttcttccatggagaggacggtgaagcctgctctggagccatcacctctgaaagtgattcctattctgattcccagattgaagatgctgaagatgatgataaagaggtgcaatcaagggagcagaatacggctcaaaatgctgcagaaggccagccacgtgatg

SEQ ID NO: 15186 - DNA, 728 bp, Oryza sativa
tagtctctgatttgatctcaccagcgatgttcaattgttgcgactgtccttgaccagcggaagaagattcaccaatttggagtggcctgatatgctgcctctggctactaccttgtgcctcctggaatacagtcattctccgtttacggttatccatcctgttcttcttgtcttcaagtcgaattgctttgtcaaccagctgctgaaaatcaacatagtcatgggagatcaatgtaactgacagttcatccttcaggccttccaggaacttctcctgcctttcttcgtcagtacgcacatcttctggagcataacgtgccagatctattcgaagttcaaatggataaaaaaactaacttcttcgtacataattgtaacatcttacgcagacatatcgtccaatgtgcaacttcatcgagtgggtagacatggagaacccacaaaacgacggaacccgtgcttacccacgtagtgaaacaagatcggactacctaaggtggaaggatgagcatgaacgtcgaattgctgctgaggctttagaatggcacgtaaatcccctaagactccccacgtggcgtgagcgtccggagtgtcgttgtggtgaccgttgtcaggtcataaggtccgtaaggcaccgaactcgaggacaaaggtgtttcgtgtgtccaaacattgtcgacgatgatttcgtggtaataacaactattcttttcatcactcctcagtac

SEQ ID NO: 15187 - DNA, 2144 bp, Oryza sativa
ccgccgcatttggtcaagatgtcaccggagatgccctccaggcttcgggtactccgacgggcaatgctccttctgaacaccgtcttgaagaacagctctctggactgatcgtttgcagacatccatgaagtgaacgcgatcgccgggaagcgagcagcagctctcatcaacctgacggttccttgtagtgattattattcgactatgcttgtcattgtcgggaaaggctggcttcaagcttgcccagtcctccagactccataagtcgtcaacaacaataaagtatctgcacatgaaaaggaatgcattacatattcatacttaatacttataatattgtgatttttacggtttctgaagagatcctgaaaggcaccttctttgtctgatgttagttaatttatagcacctccagatttcttaacactagcaagataccgatggaaaccaaatctacactaggaattgtgtgatatctcctactagttgctcatggatagtaaaagattctcaaaatatttgacaaagttctgacatcccctaagtgattagaatccaacctcctaataactactataatagttttcgacgactatttcctcatctaaactactacttcctccatttcaaaatgtttgacaccgttgatattttagcacatgtttgaccgttcgtcttattaaaaaaaattgtgaaatatataaaactatatgttcacatgaaagtatatttaacaatgaatcaaatgatatgaaaagaataaataattacttaaattttttgaataagacgaatggtcaaacacgtattaaaaagtcaacggtgttaaacattttgaaacggagggagtataagatagagggtgtatgcgttatcaaaatttgaaaagatgaaactgtctgaatgtaattttggcaacaaaacaatcaaccaaccaaaagcattttcagttgaaaattaagtaggcagagacagagacaataatatacctcttgtcgctcagatgagtactgcaatgggcgaggagttggggaatgtccttggtttcgatgcctctgagtatttcatccttttccatggccatgatctccttcctggagcagcgtggatctcgcgccggcgcgaacagctgctccagcagcgactccagcatggcgcgaaggttgcagctccgggtcaccgtcacgaacgccctgtgatggatcccctgcaccgccgggctcttgtacaccatcgccgccagcgtcgtcttgcccaggccgccgaagccgacgacggcgaccaccttccggcgagccaagccgtcgtcgtcgccgtcgtccttgtgttccagcagcttgaggatggctctggtcttgctgcggacgccgacgaggcgggactcgtcgacgctgagcgccggaaggcgacggtcgaggtcgtcgtagcagcggggcgcgtactcgccggagctcgacgccgcggcgggcggctccagcctgtacctgagcctccgctcgctgaccttgagcgcgcgggccttgaggctctggacctccacggccagcttgtacatcgcccgcagcgtcgtcagcggccggagcgccgtcctgcgcagccagccggcgacgacgaggaggccctcgtcgtggttccggtcgccgccgacgtggtaccggaaactgtcgatgcagtcctccgcgtcgtacgccacctccctcacctgcttcatccacgtcctagtctgcaacccaaaaaaaacctatgattcatcatttcaagaacacgaagaaccaattgcgttgtataaaaaaactcttttctttttctaatatgttgacgtgcaatactttttagcgttcgcgaaaaagaaaaaacaaggcgcgacgccacggcgaggggctgacctgctgggactggtggtagtcgccgacggcggcgaggtcgcggaggcaggcgttcatgctctcgaggtcgtccttgagctcctggatctcgtggcggacgccgctgaggaggacgtacttgtcggagaggaattcgccgagcttggccaggaggatgcgcaccacgccctcggtcgagctcaccacggcggcttccatggtcaattgccgcagctaccgcaacccgagtgtagagtcaatcagctggcctcttcgaat

SEQ ID NO: 15188 - DNA, 628 bp, Oryza sativa
ctatagggcgaattcgagctcggtaccggtggttcgtggcttttactctgattttcacagtggcgggaggaccagccgagaagatattatcttgcttttcgcctgtgcctgtacacatatacgtaagcattacggcaccttttccccggttcgcggcagcgcgaggcgaggggcgaggcggtcgcgacgcgccaaagcaacgagacaaacgggaaaaatactgcgtgcctagtacagggggggagcacgccgaatcttgtcgtatttttccccccattttttttccccgtgcggcccgtgcgttgcgttgccgtgcagctcacatgcggcgctgagccgatgcatcgcgcgcgacagctaagcttatcaaagctgccgcgccctgtacggcgcccatgcatgccatgcatgggccatggccacaccaccggccttggcccccttgctcccgcgattttttttcaaaccctgcaaagcgcagctgtttgtggccgcgtgtcaatggcgcctggctgaccggtcggttttcttctttttgtgtgtgtggttttgcgtgcaggggtgcgacgcgtcgatcttgctggacaacgccgggagcgagaagacggcggggccgaacctatcggtg

SEQ ID NO: 15189 - DNA, 1160 bp, Oryza sativa
cccagtcctttagactccatacatcatcaacaactacaaagtacctgcacaataaaaagagaccatcacacatcgtccatgcttataaaaacactagctaagctaatccttccttaaaaaaccaagcctccgacaactacatcctctcaaatccgaactacaagaagcatatccacacaactggcaagtacattttaatttacaactttcgatggtaatcaataacaatggtttgcatctttcttttcttttcttttcttttcatctaagcgaccacatatgttcttttgaattttaaattatatataactatttattaaaattttataaaaagaatataactatttcaaagcaaatttgatggcaaattaaccacatgattgctatttggtgcacgtgtgttttactagcgtacactttttcatataaaagtttttctatgaaagttttagataaaaatttgtttttcgaataaagtttttgagataaaagtttttagggaaaaaaaagtgtgtgctaggaaacgcacacgcgtacgtgatgcgtcaaatagcagtacccaattaaccaagcaatagaatttcagttttggtgagcaacatgcgtgccaagtagtaagtacctcttgtctctcaaatgagtgctgcaatgggcgaggagttggggaatgtccttggtttcgatgcctctgagtattcgtcgtgatccgtggtcgtcttcttcgtggagcagcgtgaatctcgcattggcgcgaagagctgctccaccaacgattccagcagagctcgaaggttgcagctccgggtcaccgtcacgaatgccctgtgctggatgccccgcaccgcggggctcttgtacaccatcgccgccagcgtcgtcttgcctaggccggcgaagccgacgatggacaccacctttcggcgggccgagccgtcgtcgtcgccgaccatgtccagcagcttgaggacggctctggtcttgctgcggacgccgacgagactcgtcgacgcttagtgccggaagacggcggtcgaggtcgtcgtagcagcggggcgcgtactcgccggagctcgacgccgcggcgggcggtttcagcttgtaacgcagccttcgctcgctgaccatgagcgcgcgggccttgaggctctggaccttcacgg

SEQ ID NO: 15190 - DNA, 1389 bp, Oryza sativa
attcgtcgtgatccgtggtcgtcttcttcgtggagcagcgtgaatctcgcattggcgcgaagagctgctccaccaacgattccagcagagctcgaaggttgcagctccgggtcaccgtcacgaatgccctgtgctggatgccccgcaccgcggggctcttgtacaccatcgccgccagcgtcgtcttgcctaggccgccgaagccgacgatggacaccaccttccggcgggccgagccgtcgtcgtcgccgaccatgtccagcagcttgaggacggctctggtcttgctgcggacgccgacgagactcgtcgacgctgagtgccggaagacggcggtcgaggtcgtcgtagcagcggggcgcgtactcgccggagctcgacgccgcggcgggcggctccagcttgtaacgcagcctccgctcgctgaccatgagcgcgcgggccttgaggctctggacctccacggccagcttgtacatcgcccgcagcgtcgtcagcggccggagcaccgtcctgcgcagccagccggcgaggtcctcgtcgcggtaccggtcgccgccgacgtggtaccggaagctgtcgatgcagtcctccgcgtcgtacgccacctccctcacctgcttcatccacgtcctcgtctgcaaaaaaaaaaaagattcatcgtgtcaagaacacgaaagcgcacaaccgattgcgttgtataacaaaaactattttcgttataatatattaacgtgtaattctttttagtgttcgttaaaaagaaaaaaataaggggcgacgccacggcgaggggctgacctgctgggtctggtggtagtcgccggcggcggcgaggtcgcggaggcaggcgttcatgctctcgaggtcgtccttgagctcctggatctcgtggcggacgccgctgaggaggacgtacttgtcggagaggaattcgccgagcttgccgaggaggatgtgcaccacgccctcggtggagctcaccacggcggcctccatggcttcctagcgcagtgtaagtttggtcgatgagctcttggcttcttctggtaggaatttatacagacgatccgcgccgaattggttgagctcaaacactgaagtgataagactgatagatgctgttcaactgggatactgtacttcactaacaatttattcaaataattcgtgtcaaaaaaaatattcaaattattttacaggttcaattagtagtaatttttattggggttgttggatcagccatcatgtgataagttggggtaccaaggatgtaggagtatcaatcaatacattacactgtcattactcttaaaaatatgggaatgattggttcatggttagtactatttttcgccttataatacgagatctctcatgagagtgttg

SEQ ID NO: 15191 - DNA, 792 bp, Oryza sativa
gagttaaccaccatatgcatgagctgacagatcgactataaggatctgtacagtaagcagttggttgtattattagccttgctctaagagcaagtataatagtatagtcaattattggctttaaatcatctataatcaatttaatagccaatttatacaatagttacatatacacatatactacataattaacctttggtatcacctgtcatacacacatgtatcttgagttcatgttgcagctggctacagatctgtagcccgctattcttacatcttttcttttatcgttttaaaatatatttatagttggcttatagtctgctattgtaccaaactataagagcacccatcagtgtcagagtttagctgaagttgctcaggcgctgagcccaggaaaacggtatataaaattgtgattcgaagaggccagctgattgactctacactcgggttgcggtagctgcggcaattgaccatggaagccgccgtggtgagctcgaccgagggcgtggtgcgcatcctcctggccaagctcggcgaattcctctccgacaagtacgtcctcctcagcggcgtccgccacgagatccaggagctcaaggacgacctcgagagcatgaacgcctgcctccgcgacctcgccgccgtcggcgactaccaccagtcccagcaggtcagcccctcgccgtggcgtcgcgccttgttttttctttttcgcgaacgctaaaaagtattgcacgtcaacatattagaaaaagaaaagagtttttttatacaacgcaattggtt

SEQ ID NO: 15192 - DNA, 600 bp, Oryza sativa
caccctcagagtaacggataggtcgagagagcaaacggtatagtactacaagggattaagactggtgtctacgactggctcatgtcacatgataagaagtgggtcgaagaactcccctctgtactatgggccgtgcgcaccacaccaacaacgtccaacaaggagacacccttcttcctcgtgtacggctcggaggccatgctccctaccgtgttacgacatcagagtacacgagtacagaagtactccgacgaggatcaggaggaacagcgaaacgacgacgtgaacctactcgaagaacatcgagaacgggttgccctcagagcagctagctaccaacaggccctacgccgatatcacgagaaacgcatccgagcacgcatactttcgttcggcgactacgtcctccgacaagttcaaagccaagcagggcgaaacaaactctcgcccaaatgggaaggaccgtacacgatcacacaagtcttgcggccgggcgcattcaagattgcagacggcgatagtcgtgagttagcaaattcgtggaacattgaccaattgcgtaaattctatgtataagtcaatagtgtccatatttgtaag

SEQ ID NO: 15193 - DNA, 591 bp, Oryza sativa
tgtggtactcttttgaggttgctatcataaccccaatctttagaggttgctgtcataacccccagctgactgcattcttatcagatgttcagtttgttgaaaatgacgtaattttgaaaggatgtttatttattttgatttttgagttagaaggctggaattttatatctttgctaaaattgctcgtataaggactcgatgagtaagtgcatactggtttatttagctgatgtaaattgtacagcttacaacattttaatttgtaggttccctctctttgagaggacttgcaaggagctgaatggagccgaaactagcattcccccaggatagtccaccacttgccatcctctgtgctgctaaggtcgcaggtgtttccctcaccctcgatccgaagctcgcctcgggttcagcacccacacttcaccttggttctgggtaagtggatactgatcagtctgtagcttctctctgagacgaaccactacttttttttccctttcttttaaagcttatactatgataatttgctccatcatcatgcctgcatcttgaatcgtgcttggaatggcaagttcggtgcataatatt

SEQ ID NO: 15194 - DNA, 547 bp, Oryza sativa
aacaccctcgactcgtatacctatctcgtctgcaaactaccttcgcttcaaccaattctttcgtaccctcagctctactcacgttagcttcggctatttcaagtgcctgttgagcttcttccggatcaatgtcactacccagttccgcatcatttcctaaaatgatgatctcattattaactattctggcaaaactgctccacagaaccgccgttaaccatttatcgttgaggaggcgtattctcaagggacccatatctacagctgtgttaatgggggcgtggtttggtaatacgccaatttggccactattagtagataaaatgatttctttcacttcacaattccaaataattcgcttaggagtcagtacataaagatttaatttcatttcttcaatttgttctcctcttctaagtttatagctttcgtgctagcttcatcgatgttacccaccaaataaaaagcctgttcgggtaggccgtctaattctccggaaaggattagttgaaatcccctaatagtttctgcaagaccaacatacttt

SEQ ID NO: 15195 - DNA, 1215 bp, Oryza sativa
  unsure (1)..(1215): unsure at all n locations
aactctacttgccttgagatcgatgggggcaaactgtttattcacgcaacaaacactacatatcgtgtccttacagacacgcaacatttaaaagattcagtgatcattgaagattttatgccggtttcgcctcttctggtgtctgcataaagcgtggaacttctccgttcatcaccctccatggcccccagtagaatttgggcggcatgagcggcacggcctcgcccggatgatcttcccagtacttctcctgctccaaaatgcggtcacaatcaggcaaaagcaactgtanattgaggtcaaattgccaatcctagttatttcaaaggtatattgcttgcattgttttgtacaacctgattcatataggacaatagggcgatctgattctatatatatatcaccaatcaaacctggccaaacttgcttgtagggtaaattgacagtcctaaactcctaatcagttcaacaaagtatgcaaccaaaatttgttgtgatccagctagctactactaccgagtacatgttaatcataccatacgggaacatatgctaaacagacctttgatcactgaagcatgcgaaattcatgtccaagtttcgagaccaaggggcctaagcattccgtcgagcaccttatgcgcggaagccccaccgagggcaaccacaaggagtgaagcagggaggggggaggaggagtggaggagcggtctgttcctagagtatcctgaccttgtaaagctgctcggtgatggcggaggcgacgacgccggtgtagaaggcggcgacgtaggtgccgatgagtggcgcgaacgagcgcggcgggcggtacggctccaccatgtcccagagcaccgtcttctcccacctgttgaattgccggtccgcgtaccacctccacaaccgcctcgccatccctctctcccctcgccgccgccgccgctcgccttcgcctccgcctccgtccccttgccgccgcaagcctctgcaacgccgccaccggcaaagaacagcgccaccgctcagcacgtcaccggattaggctttcaattgggcccaaatgagactgcagatcacgtgggcccgcacgttgcgttgcagtccaatttcagcccgacccggcccgtactcgaggccaacttagacccgttctacccagcccagccttagcccagacgggcccgagaacgggaagtgaaaacgcaaaggcggggg

SEQ ID NO: 15196 - DNA, 1913 bp, Oryza sativa
ttcgtttcttttattatttttttgaaacctttcattttgaaaacaaatatctaaaataaaaatttccaaaatctgaacatttgacgtggcaaaataatactatcacgccactcgcaaaggacgtggcgattttattctgccacaccagctaaaatgacgtggcttgtagagtgatgtcaataacgttgtcacgccatttaaaccgatgtgatcgcgttgttttagtaaaaagatacaaatctagaaaatactacctccgtcttatagtagttatcgttttgattttttccttacaacgtttgatcattcgttttatttgaaaaatgtgtacaaatataaaaaggataagtaatacttaaataataaagtaagtcataaataaaataaataataattttatttttttaataagacgaatgattaaattttttaaacaaaaaactcaaagcagacaagtagtaagtattaagagttaaaaaaagttctgaaaataaaagaattcactttcctcttctctccggataacggcatgcgtggcactgtaccacactaaccccccctggaccatccgctcctgggtcgctgaaacgatggcacgtctgcgccggtgtcgcttgcgcaaccagaattaattgcctcctcctcctcctagcgacaaagtgaggggtggccaagttactatcaggtgagtgacactaacaaccccagctgcggtaagaaacaaaaacatgcttcaacatatttagagagaaaccgagagtgcatgcttaaaaggagataattaacccctttttttctctaaacaaacatgcttcagcatatgtagagatagaccgagagagcctgcttgaatggaggtaattaacttcttttttttcttttgccatttcgaaagggtgagtggcaacaaatatcactttgtaacaagagaggcaaatagttttaaaaaatatttttgacaaaggcaaatagttaaatttgctgcttaaaaggcagttgtacgattataagccatagacatgtgatcgaagtagcggaaggggacaaaatttacgcttataaaccgaagatagtttgtttaagacatcgattaaacatttttatacttgatgatattttttaataccgattgtaaagcacttggttttcataaaaccgctagaagcagtttatgaaaaaccaaacggttttagctattcttcttcttactgaattaaccgaaagtcgttggttttacgggctgctttcgatgcttttctgtaaaccaacatagactggttttgacatcagaaaatagtgctctcactgatgtaaaacgtggattttggtagatgtgcggtttaatgtggtggtcggtttcggcatagctttcaccacgtccctctcactctcttgtgcagtgaccaaccagggagtggtacagttgcagctgctgctgctctgcacaatctcgtcgtgttcgaattcttttctttaatccttttctctcgtccttttaatttcaggacgccacgtattggtcgctgatgctggtacaaatgaccaaatcgtagggtttttttgaaaagcaaatgaggagaggattattgtaattgatcacgtcgttagtcaaaaggacactaaataaagaagccaatcaaggacgatcgctgcaccaaacctaaaatgtttacccggtgattgtgatgagagcgaccaatcggcgagagttatggcaattgtttgagcaatcagacgatcggcaatggcatgtcatgtgatctttacggaagatgataaacgttgcatcattctcattgtccccaagctagcattcataattgatatatattcaaacataagaaactgtcaccatctccaattagaactgcagctctttattatactactacacagcatttagggataaaaag

SEQ ID NO: 15197 - DNA, 587 bp, Oryza sativa
cttcctaaatgtacctgcttctgtaagttaagcagtgtaagtatctcattccgtagttcaagatgctcgacgcaaactgctttcgtcgggaccttgggcttcaaattcacctacagagaaacaatgcatacaatttcatgtatctaattgtgttattaaattataaaagaaaatgcactgcaaacctactagacccaaaaagaacttgaacaacatcagttcggtgcatatcaagtacagattgatgtctaggaaacaaaccccgaggtcttgtaaagtctggtcaacccttttgataactctaaggcccgccgaggcacttgctgcttggaccatttgatcaagcgcttgggttctcaaatacactcgaagctgtaaaagaatgtatagcgagtaaaaaacatctaaaaagaacagtgtgaagagtgatataccaattttcatgtgattcataggcatccacagttaatgagaacaagaccgctagtaatataattaacataaggtctgcttgtgatgagttcggcacaatcctataacagccacctcccatgcaatgagcaagaaaacttacactatctttgttt

SEQ ID NO: 15198 - DNA, 999 bp, Oryza sativa
  unsure (1)..(999): unsure at all n locations
ggaaatttattaaaaaaatagtcataccagagaagtttttattaaatttcaaagttttaaaatgtttactttgcatactattgatgagaaaaaaaaataatggagcaagcatcaattggtgttacaaccctaataaacnntggctggacattgnnaagaacatgctnngaaccatctnncttccgttnnggtgganntgattgannnttttcaccaannntttcattttttantttgtactnaagttgagagtanaggaacttttgaaggttcacttttctnngttaaggannnacttgaaggttattttgtatgtttagaattttcctggatactgaactacagaaatatcctaggctgtacagttgagaccaggaattgaaatttcttttttgtgctgtagctgtatatttcgtgtaattcaatcagctcttttattattttgctacaaacaatcatcaatcaggctggataacactttttgtttttacaaatcagggtactatttgtagaatactaaaggaacagtttcatcatcttctgtatgagcaaataaaatgcaatattttgaagattgggcaaaagtattacttacaacaagtagggattgctcaaggaagcaagttatctcccaacctgtgttccctgtactatggccacctggaaaattcagtgctatcaaaatttctgcatgatagcaagcttaatgcaggagaggctttttcggaacctgaatatttgttaatgaggttcattgatgatttcatatttatctctttctcactggagcatgctcaaaaattcctcaataggatgagaagaggttttgtgttctacaattgctacatgaacgacagcaaatatggctttaatttctgtgctggaaatagtgagccttcctctaatagactctacaggggtgatgatggagtctcattcatgccatggagtggtttgctaataaattgtgaaactttggaaattcaagctgattatacg

SEQ ID NO: 15199 - DNA, 699 bp, Oryza sativa
aacagtagtttctgcagtacaccaggaaagcaacttctagtttctagaacttaaatttccagaacatagacgagtgagaatcatccacagcatagcgcaaggtatcacattcatgacctaaatggcaatatctcccaagctctgctgtcaacaaagtcagcatatccttgtaacgtgattgtttctgctgaagcacacgaatgtatgcagttaaaccaagccaaatggtttcttttcgcctaagcttcagaactggacgcacattatagtgcagctccacatcttgcatccgtctgacaattaggctatgcatgtatctgcttaacagcaaagtataattattaagaaagacacatgatttccaatatatcgcatgatttcaaagcatgttcttctacgccatacatcttaaaagaataaacctgataattacttcataggttttagtaggattaaaaaaagggtataattcaggtacctgaaggttctcttaattacttgcagcagttctaatttgcttacgttggcatcggaaacgcttcgaatataacagtggaacttcattgcacataacaggaaggcttgataaatatttactcttatggtaccaggtgaattgatattggagtcatagaaaatgggatggcattttggacgcatataatggcatagcttgctgtggatatactttgttgaaga

SEQ ID NO: 15200 - DNA, 2117 bp, Oryza sativa
catcggtgtatttgagaacatccgctttctgcaataggaaaaaacaagcaaaaactgagtaagcatcaatgcaggatatgaaggatgtacccaacacaatatacttcttaccttgttgtattttgcaaagtgatagtcaccagtgggtggagcaccatttacaactctaacctgaaagatcaaaagggtgactttctgagtttttttttctaagatatgtatgccatactacaaattcatgagaaacagacccaatggtaaagttgaaggttgtcagtccgtgcagaggacgtgaaaggtagccactgccatgctatctgcagaagtacttcaaatggtcagatttagtacaagctccatcaaaatgggagcacgaaacaccttgctgcaattacccatatgactcaatggacatgaatatgtgaggtggattcaatctgcttatttgggttgaccaccaatttcaaaacagaagttgcacatgatcaaatcatcatttcatttgtcccatattaatcccatgagcaccttacccttaatgcctaattcctaataggtattaagtatacgagtagctaaactctcagctcagttcatgtgcttctactagagttatcaaattttcagcacatatcagctcaccttctccttctcaacagctggtcgccgcttcaggtgcgaagcctcgatggtcggcatgagtggagccatccccacccctccagtgagcgcgtacacctggatcatcaacaaccatcagcacttcagcagcaacgagaaacgcggggtcgaagtgtgcgggaggatggcggattaggccgcgccgtacctcgcgcgagacgccatcgggcttccgctgcggctccttgggcgcgcggggcttcttctcctggacggacgggaaggcggtcttggggaggccgaggatgtccttcgcgtccattgccgccggacggaggaggcggacctagggttagggttttggtctagtgcgccatgggagagagatcgaggtaggccgaagccgccgcctgcgtctgcgttgcgtcgagctgagctctacctcaacttggcctcgcgagagagatggattggagaagggaaagcctgagattgtatgggcctagtcatattgggccggcccaacttcttatggcctttgctagaccgagtccgagtccgacttcttggcacggtagctttttttatttcctctttcccgtgtctcacggcgaaccagcgaggccgaggcgcggagctgagcggaggaggagacgcgccacccctcacggcgctccggcgaatcggcggtgaacaccggcggtaatgcccccctccccttctccctcttgtagactgcgtcttccggccgcttggggtgggtaggattctgcttgtttgctctcgatcgttgggcgtggaagctggggtttgaatcggcggcgaacaccggcggtaattccccctccccttctctctctggtagacgcaccttctctctctggtaggctgcgtcttccggccgcttggggatgagattctgtttgcttctagcatcgtctcgatcgttgcctcgttgggaaactgcccttcgggtgaagggcatttaggtaattcacattagtactaaactttcaatggaaatataaggatgagtttttttttataagatagagggaatatgccatatctcataataacttattttgggagacagagggaacttgcatattaccctctcaaatatagtagtaattatttttgggacggagacgataaaaatatattctttgtgcgtcgagaatctcccccatcctctctgcgtaaaaaaaaaaattcttcccgtattgtctcgcctgtgccgatcgagcaggaaaatttgataatttaacacttttttcattgtccaattgttttagttgacacttgtgagaatgacatgtgggatcatctgagtgaatgaaagtgggacaggatttcaaataatcaaaacccattttaaggagtgttaaattatcaaatctctcatcgagcatagtgcaggggagaagccagggaagagggaggtgacgtcgtcctggtgagcatccacagctgggtcctggtcttttctccaa

SEQ ID NO: 15201 - DNA, 1975 bp, Oryza sativa
ttaggctgaacatcttgagcaacttcttgagccgctaggcagacatgttcgaagcttctatggaaatcaggggggagggtcacttcctaaggatacatcagttgctgtatgtaccatagagaaggccaattctttggtaaacaagttgttggaggaaggccgtctttctgaacttggcataatagtaatagatgagcttcatatggtaagttaaaccaatttggtcctcaaaatttctccattttctttactttcaagatgttgcattggcttcttgcttatgtttacttttgtgagtcatgggcatgggtcccattcatggcggatactcaaacacagtatcttccgctgacataacctattcccatgacaaatttctaacgtgtattgggatttaacttttatttcacctaataggcatctgtacacttaagagatacatacatagtgacattaagtgcatggatgtaatcatatctaagtaattcagaaattacatagctatttgacatgatcttcaacattttcaagctaaccattgacaagacatatagataagagatttatactagttgatcttagtcttatagaattagtacttattgttctgaaaatcagtttatcttaatgacagtatttgttgttgttccatgtaaaatggttttgaaaaatgggaaattggtttggtaccaacaaaatattacccttttaggtttgtacactgatatttttggttcacttccattaccttatttgaaatttctgtgctctctttgcgagaggaacacttgtaaaatgcctgacttactactgtatgttcctattacctgttgccacttggccagctgatgctggcgagtgaagtgatatagattcatgagagagagatacagaggggaaaattgccatgataagagcaaattgggcaaatttgagagcgctgaagtaggtaaagcgatttaggtgggatggaaaattcaggtggtataaaactaaacaaatcaaaatttggtggtatgaaaaattaccttttcatttgaaaaacataattctgccatccaatatattgtaaatgcggtacttccagaggacatgccaatgtagtgtacatacaatataatacatgtgatttttggcctatactcaatatttgcaagtttgaaagttcttgatcacactgcgaaatgaatctcttcacattacaatatttgaagtactaacagtgtgcatgtgcattacaaccgaagttggtcttcattatattggaacatattggtgtacttttttttttttaaaagagaagatgagtttaccataacatattggtcaatgcttttgattagggaccagtctagcatttctcgttgctttccccattttttttgaaaaattcaatgccaaaaatataacaaaataaaagtgtttcgagaagcatttgttatgtcaagaatattgtgtctctgagtcccaagtcctgacctattcctgtttacctttcccctcatgcaatttgaagttcttttcttcttcctttggaagtcctttggatgttgaagaacatgcaatttttgagtgaatcgcacattgtgccacctattattaccaaagtttcactttgtaccaccacctgagcaatgcctttacttcagactaggttagatatcatttccattgcactttggaccacctcttcctcttcacccctctcagcctttcttctctccaaaactttggctcatcaacatcactacaaagagaagagaggaggaggatattgactgacaggatcaaattcagccactggcagtgccatgagttgaccaattgacagcgtgaggaggcggtctggtttgactagttcggccaacacaagcttgtccacggtacctctattagcagagccctgccactgtgcccctttgtcaatccctactgctatccgctgcactgttagacacagagttccagatggtgg

SEQ ID NO: 15202 - DNA, 514 bp, Oryza sativa
aaaatcctcttattctaattcatgacaagaaaatctcaacgatgaattcacttcttccagttttagaaatgtctatcaaggtgattatgtcccataatgtctcagcttcttttgaatatggcaatggtaaattggtttagtactaaccagtgtctcatgtatgcagaatcgtaggcctcttctcatcattgctgaggatgttgagggagaagctctatcaatgcttgttctgaacaagcatcgtgctggattaaaggtgatattaactactggtcctactgtatacaatactgaattgcgtatacaagctgcttgatgatatgtgtccgttgttagttaaagtgcaagcttcttaccttcttcaagctagagctatggatcgttgatattctggtaaattagtaattatcatgcatcgattatagatatgtgctgtcaaagctcctggatttggtgaaaacagaagagccaatctggatgacgtggctgtgttgacaggaggagaggtcagtca

SEQ ID NO: 15203 - DNA, 732 bp, Oryza sativa
ccggcgcactctcaatttacaatggtcacaatgacatatgaagctcgactctggaacctgaaactatttgttgaacactactctagatgtgagtcagtcagagagatagttgttgtctggaacaaaggcaaccatcctaccagcgacgcctttgattcaacagtccctgtcagaatacgtgtggaagaaatcaactcccttaacaaccgatttaggggtgaccctttgataaagacaagggctgtcctggaactggatgatgatatcatgatgacttgcagtgatgtagagaaaggattcaaggtatggagagaacaccctgagaggatggtgggcttttaccctcgaatgatagacggtgatcctttgcagtacaggaatgagcgatatgctcggggcaagaagggctacaatttgatcctcacaggtgctgctttcatggacagtgagttcgctttcagtaaatactggagtcaagaagctaaggaaggcagagactatgtccacaagaacttcaactgcgaggacttgctcatgaattttctgtatgcaaatgcaagctcttcgaggactgtggagtatgttcaccctgcttgggctatcgacacttccaagctttcttcagttgctattagccgagacacgcagaagcactatgacatcagaacgaaatgcttggcgaagttcgcctccatatatggccctctcccccagaaatggctatttggcatg

SEQ ID NO: 15204 - DNA, 915 bp, Oryza sativa
gggagatcgctgatttgcgaatcggaaccagttatttttgcgcggcaaagccaattttgttggtccttcatacactacgcagcaaccaaaccaacactacaaatccctagtagagaagagagacgtactacatagatgaactagtattagacgaagttctggacttctggtttactaggaacatagaaaacatcagatggaggatgagttacaaacatgggagttaaaattgaaatgacacgtgcaggaggtcttgttgatgaatggcacaatcgaacttatttcttctttccgccggctccctttgttttcttgttagcgactgctttggttggtttttctgaagtgtcctgccattatatcatagaaacaaatcatgagacataatattgctacaaaaatataattatggccacaacatttgcaagcctacatatagtatagcactatggttgcagttttacatggaacagtacaagatctgcgagaaaatcatgccaaacaaggctataaccttctcatagtagaaggattttagcatggcttacaagattcagctttggctattgtatctgcctacttctggctgcttgcaaatatattgttgagtactggtctaatggacatatttttatcattcatctgtgatctgttatttggcaggtacattggacaatcaaaacatcaaaccacgtgattcaacattgttagttgaatggacagataaagtacgcaattcaatgacatgaattggttgtatatcatgctacaatggatgaacctggagaaggctaaaagttctaaatttaagcacgacaagattgatggcattcaggttaaggtacctttcttttcagaggcactgatgtgctaacaactggcttgaagaaggattcgagcctggtcacattaatt

SEQ ID NO: 15205 - DNA, 8645 bp, Oryza sativa
  unsure (1)..(8645): unsure at all n locations
tacggtgatcctaaatttgccaaccaccctaatctaccaagcgctaaatcaagatgagttttgataaactaaaccggcttgtggagccgatcttgttgttcggtagataattacccgtctggtgggcaaaacggaaggttttcaggacaaacctacaaagaggtgtcgcactctcgtngccgtggcggacaatttacagcacaaatcgacaaagatggacaaactaaactagaactagaagcaatatgaaaaaacgattctattgattgattgtatgattgtctttacaattgaaccggccttgtcccttatataggggttggtcttgccctctacaggccctcctccacgtccaactcgggataaaaaccaaaggaaacccgaaacatgccttcccaagcaaggaaatctcgagacccgacaaaacagactcgggctagaactttgccggtcagaccggccacacaccgtcggtctgaccggccaacacacggcggtctgaccggccttctcagaggaaaacgggcaaaacttccgaactttggcaatttccctatttcaatcctaggtaccaaatttaggtgtaaacaagaattagttggagttgcatgctatagtccttatttgtatggtattatttgttcaagttatgatatggacatacctctttctttttttaggaaaaagcaagagatgtgcatacaaagaaatgaagtaatagcattttcatatccatttgaatttatgcttcttggagttctaagctactatgtattttaaatagtactgctaaatcataactaaatacatgttttttgtatgatggattcactatatttaaagtccttaatttcatgatgatgctatgtcatcttggcatatggttaattaattgaaatatgatttacttggtgggttgtgggtacatgcatgatttcatttggtggtcgtgcccatgacaattaaggaccagttctcgagaatctctggaagatatactcatactaaccacaagccagatgggctctaggctgaatcttaagtataatcttttctagctgacacaccgttggcaaggtgttaacaatgaaatttggtaagcccctaagagaattatcacattaccaatagtcaaattcttgctatattcggttaaggaaattaatcgaataaaaggatgcatatccagaaatgaccgagttcaaggaggatgcggcatggcaagttatctattaattagaaatagtttgttagtttccttttatctttaggaaagtgtgtttagtgtcctataaggactttatgttttccttttatctttaggaaagtttctttcttgtcctacaaggactagtatctccccatgggtataaatatgtacacccggggtcatggtaatttatctctcgatcaatactactctcggcgcatcgccatcctctctcctgaggtttttacttatcaaccggcggaatttggcacctgacgcggggctgcatcgggtcagttcgatctccagcgaaggggtaagtcctacgttccgccgccctagtgaatctattggctaaattggtgttgttcaaggctgcattgctttcgatctcttggatcgctctagtttggttgatatattttcttacctgatatctcaattctatccctaattgcattgtgtttagagacacatcggtttagttaggactgtctcggtaaggtatgatcttttgtcttagccgatataaagacacaactagctcggatataaccatgactaccttatgtattaatcaactaaaggtgcatatgttttatattagatttacttgttatatatttgaacaaacgttgctacacaatgagtttcatgtgtttttgtttgcagaggtactcgcttgggcgaaggaaaagagactgagcgtaacgaattcatggatgatcaaagaagttgattgggaccaaaccaagaccttcttcaagtccacttccatcttaacatgtcacttttggtccatagaagacaagagataaagttctacatgttttgaattcggattcgggcctcctgacagcatcaacttcaaacggatctagccgctaatctagaaggaatttcggggcccatgagtacttgttggaaagcttatggagtctactttcatatggatttggtcccacgtcaaaattcctaccgagctgtcgagaatttgcaaaacaagccacgtatctcatccagtccgaatctgatttgggttttgggccttgtaattatgtcgtgggcttagcccaagcgggtgtgcgccctaggccaaccctaggacgtccctaatcacatttattcagtagccgtcatcgtttagagtcaggttttgcttagattattcagtcaagaacagttttgccgctagatcggtttgtggaaccccaaattcgagcgcttaatcattcatatgcaattgtgttgcaatctatcttgttattgattgtgttcttcgattcgcatgcaaggattagccttctcggcgaggtcaaccgggtttcggcatggttgataactagaggagacgtggtgctgtgattgcagggctcagtagcgtgtttgttcagaagctggatcgagttgtgtcgcaactccgcccaaatcattgtttatcagaacctttcggaagatcgggacctgacatcccctcatcaatagatttgttatatccatcacattagacagatctatcagcttatcgaggattagattatcatatccaatctcgtgctgcatcggttagtttcgacctactagattgttgttgataatataaaccttgttaagctgacagattcatgctaatgttttatcggggtgctagccgataaattatctggacgttgcatcggcttacaaggattacatacaagttggcttatccaattgcagcaaaactttcactgtttatctaatcgtttggattttacgacatcggaccttcagccgatgtatgctttaaccttcggatctttacatgttctatcatatcattgttagccgattggtttctactggactatattattgttatattatattatcaacagtcgattgcctttatattgttatttatatcaagcgttagaatctacatcagaattatagccgatagctcaaaaccctatcccaatcggctagtatcggcatcggccggaattaatctatcggcttgttagctgatcggctatttgatccgttgtttacatatcttgtcagttgcagggtcaaactgactggcatgcccgcatctcatcaacctttggacctgtactaaagctaagcagatctctcaggccagtgtgtgtttttcgcatcaacacaagggtaggcgtgatggagtttggatggacctggattttggtctatgctgcttccgaatttacctaggcatgagcggggttgcccgcccctggattttggggtgggggtgaaaccgaaggtgggtgtgctagttagggtggttatatggagggttttgtcatgatttccccctttgcagtatcatggtggtacttcgggtatggtttcatgtgtagaatcgtgtcttgtggttaaagttgtacacctctgatcagagtaaaactattcgaatagccgtgcccgcagttattgggcggtcaaccagctcaccgtgatttttgctgggcctgtcgcaacgtggtttagcgttggacagtgatgatgttaatactacttaattatctactgttttactgctttcaacttatgatttacaaatgttgcttttactgcaaaaatatcctatgagccaatcctttaattatccttgcatcataccttccccttggtatgacttgttgagtacagtggttgtactcagtcttgctttattttttccaatcccccagaagtagaagttggttcaaatggtgagttctatgaagattaggcttgtgccagccgtcaagagtttgcctgtggagttttggaggaagcttcgctttgctgagaagattaagtttagttctctagtttttccgccgcatatgagttttatcttgttatttttgtaagacgtggaactgtatcaaattgtcatctatgtactctggttgatgcctggacagaggttaaatgcacagatagccggtgattcgggttgtcgaatccctgggcatgacagagaccaccatgcctcctcccactgcagccacagtcgccacagcagccgctgctgccgtattccaaccacctgctgtcgccggccagccgctaacgccaccgtcaccacgagctctgcgcctgctatcaccaccacgacgacctctcccgccgctagtgcccccgttgccacagcagccaacagtcgctgcacgtcggccagccactgctgccgccgccgtccagttgctgtcttcgcgccgttgcctccgtgccgtcagctgtcacgacaaaaaatttagcccaaatttccagactattttatgtattaaatccctatccaggaccaacaagggtacataaacgacaaattaatatatagatccaagcgtaaataaagcgtaaaatacttatagaagaggcacttagtcctcacatcgaaacaaaagcagcagcaatggaaaaaggcgatcctagcagggcttcagctccactccataggcagaactcaactggggtctgagccttggtcctctaacttcgtcttcagctcagaagcactatagttctgaaaaatggggaaatagcaagctgagtacaaccatcgtactcagcaagccacaccaatgatgcagacgtgcaaaaggagacaaagggaggtttgcggttgtttgcataaaggcggttgtaaatcattttattgagcaaaatagtaaaatagttgattaattaaggtaatattaaatctccactgatcaatgctacaccacattgaacaggcccaaccaaaccacctgaactacaccggttcattaaccaattattaaggatgggactaatcacggtgaatttggtcaatcgcccaaaaccgcgggcacggctattcgaatagttttactctggccagaggtgcacaactgtacacacaagacacaatccatcggcatgtcaccgcgtcatcatgtgcccatgatgagcatgtcaccatatcgagtgattgtgataagacccttcgcataactctcccctaaccatccacaccacgctaaagtttcacccccaccccctaccccggaggtgggcagtcccctcgtgcgccgtggtgaattcagcagctggacaaacgaacacccggccgacccaactccattacgcccagcctcgccaccggtgcctaggaaattgtcgagctataatatagatcaagtagttactcattccagcttgtggtaagcacagtaagtcttccagggtttcttgtgaaccggtccttaattgccatgggtgcaactagcaaaaccatgcacccacagcccaccatttggtcgcattttagttggataattacgaccaatgaaacatgttcggatgtctcgagcacgcaactcgtcaaggtactataggtctaataatgtaattatcccattatgtgagctagtggtaattaagcatggctaagcatatatgattttagctagatcaacataagtatcacgagctagataatttatcacctaaggttgacaaaggacgggtaacaagtaaacatggcaaaagcgagcaaataggttatacctgatcccatgtaattagcaaaacatgcatatttatttgcaaacagtaaaatatttataaattaggctcaatatgcttaaggggaatgtgtgacattccttgcttcttcacttggatcttctgaactctttccctcgcgaccgcgaacttccggaacgacggagtctacacgctggcacgcaaaatgaggaaaaactctaataaaaaccaagtaaatagtacataaaaagtaaacaaacatgtagagctcaattttagatgaattttacaagttgaatggaccaatatggagttcgtatgaattagatatgaattttagaagttttgagccatttaaatcaatttctagaattaaatacgatttattgcacaattattaattaatttctcataagaaaagggctgtcgctgacatcattaaggggagaggcgcgccaacaggcgggccccgcatgtcagtggcataaggggaggcacacggtggactcggttcaccgcggcgggggcggcaccgtggacctggaccataggaccgacggcctagattggcctgaagccgatccaacgggcacgggcggcgcgacaggacacgggcacggcactaaagccggcccggccgagccacggcgcgtggcggcgcggcaaccaacggcgatggccggcgacgcaagtagcggcggtgcatggcacgggaggtgggcaacgaagggggaaggaggaaaaagagagggggagtgctcaccgagcgccatggcggcaagggggcaacgggcagcggtgaggccttctcaggaagatgacgcggcggcgcctcagcgatgaccaacgaaggcggtggagcggctgaggttcagagaggggcggcggagccgatagggtggtggcgcgtcgcgacgaaggcccgcggaagtagcgggaattggcggctagtgacagggaaatggcggtgagggctcgggtgcacgctagaagtggtattttggtggagttccggcggcgatgaacggaggccggggtgtggtggggcgctgcgaacgctgtggaggcagtagcgtggccgagcgaggcgatgctcgccggcggggagcggctggaggcagtagaaacagtgatggcttagcctcgcggtgggagcggcgtttcggtggcttttggggaaaatggagcggtggacggggtggagttcggcacggcgatggcggtggcggcctagagcagaggtggctagggcaacggtggtgagtggctggagctcgccggaaagaggcggaagttggttgcgcggtgggagcgatgtttcggtggtggtggggaaaaacggagcggtggccgggcttgatctcgcagcggcgaagccggcagtggaggacccaggatttgaacccagggtaggcctagccaaagaaaatccaaatacaatacaatatgattcgatataaaatatggtaaacgatacgtatataactctaaatggttcgatacaattagaaaataacaaataagtttaacttttaggataaaagcttgtaagtctaactattttttttatcaaatgaggcaaatgaatcggacggattaaatgctgacatataaagaagcaactccatactaacttcatcaaaccgattctcaagctcttgacgaattctatcgatgacaccaatgtacacttctctcctatagtggtcatcaattgtttgttccaggtaaaaacggtgggatcttccatgaggcatatatttagcatccattgcgggaatatcaatggaatatttgatgcaaaatgatgtaacctttcctaagaaaccttcccaaccatgcaaaaatgtcatatgaagggggtagtatgctagtagtggtctactactactagaactctagattctagaagggggagagggactgagggactgaggaagtgaggaattgctcactggagaggcggactggtggagagccgaagaaggagtggccggtagagcactagcgctgggctcttgggcggctgccggctgggcgcgtgctgccaccgacgcacgtcgggcaggaccgcgggagccaggaggccgccggctggtcgcgccgacgcgggacagagagagtgtggccaggcggggcgcgccggcgaggggcggagagggcgcggccgcacgggctccgacgcggcacgaaaaggcagtaggaggagcggcgctgtgagtcgcggcctcgcgggagcgccggccaccggattcacgggctcgcgggagcgccgtggcctgtcgggagtgggaggccaggagagtaagtggagaggggagataagagagttagagttttcttttgttgggccaggctttcttatgggccaagaaaaataaatacctgttcttatctgggccaaattatagggtagtcctgggcctacctagactactctttggtcccgccactggaagccggtggtggcggtggcgtagcacggcaacgacaggagccgcggtggctcgtggttggaggacgccggtgggcggcggagctcaggccggcgtgggaagaacgggagagcgtggggaacggcgaggaggggaaacaagagaggatggccgggatgcgttttatagcgctcggcggccgggattgtggccgagagaggcggattcggggtggcaaccggtaggaggtggggcgccgacgtggaggaaatggcggccggatttcgcgggaaggggtgggggaagtgggcgcaaggtggaggaggaccacgtgcgcgcggtttgatgcgggcggggagcgggatgatgcttggaatttcggtgatgtgggcggccatggcgactgaagctgggcgactggaggaaggaggaggagttgacaggtgaagtcgctgcgccctcctgttggcgagggagggaccaaggaggtcggg

SEQ ID NO: 15206 - DNA, 805 bp, Oryza sativa
agccttcctctaatagactctacaggggtgatgatggagtctcattcatgccatggagtggtttgctaataaattgtgaaactttggaaattcaagctgattatacgaggtatgactgttgaaatttgtttttagctcattggtcattctatatttgttaaatataaatatcaaagggcatagtatcaattactagttatcttttgtaatcctgaggcataaattgaccttaagacatctgcaaactgtttttttcctttactattcaatgaaacgccagaaaattatattggctaaatatttgtgaaaaattgacttggacgatgtgtttccttttagtctttatttctttttgggagactcaaaggttgttgaaatgttaaccttagatatgtgcagcctaataccaacctggtttctatccactttctgaatcttgctttcttagtgagcaagaaaccgtagttacatttttcttgttttaggcattaatgtttgaggagtgcgagaaataactttcctaaccaagtgtggagaaatagtaacgaatgggtgcttttcttaaacaggtatttagatatcaccattatctccaccatcactgttaagatgcattcttcaacaaagtatatccacagcaagctatgccattatatgcgtccaaaatgccatcccattttctatgactccaatatcaattcacctggtaccataagagtaaatatttatcaagccttcctgttatgtgcaatgaagttccactgttatattcgaagcgtttccgatgccaacgtaagcaaattag

SEQ ID NO: 15207 - DNA, 1036 bp, Oryza sativa
cttatgtgttacggctcatcacagctgcatcttgcattatcaatttaactcagatagggcaaaacctgggttattaaaaagcaaatacctaaaatctaacttgcaattcattgtcaaatacctgaattttcagaaaaggttgtatcaactgctgctaaaactggtgttttaagtatcaaaatgttccatttgaaaatctgaaggttttcacagatcaggcacttcaacatatcaaaaaggcatgatgccagtataagacgctcagaagccaagtgtaacaagagtatttcatcaaagaaccaattgatcggttggccttcttatgtgttacggcttatcacagcagcagttagaattagcaatgtaacaaaaacagggaaaaaaagatggttctgaaaacgaaaaacaggaattctcacaaactaacttgcagttcattgacacctaactgtttttttaacagcaagttataccaacttctgtaaaaaacattgtatgagttttaattgttccgtatgaagatctcacagttccatcctaacgtctgaaccccacaaatgagagccacttcaacatatcaagacaatacaaaatgctcagaagccaagcgtaacaagagtatttcattgaagaaccaattgatcggttggcctccttatgtgttacggctcatcacagcagtaaataagaaaagagtaatgaagccaaaatataggatgctttatgttcatagcagtgcatttaaagcttctagcatcgcaaggcataacaaggacaagaagctatgcaaagaagtagtttcacgtgctaatacctggttcttgacagccttagccattttgcggaactccttgcgcatcacagactgtggtagagcttcgctggggcattctgcttcttggtcttggttgtggagaggaccacggccgcgtccttcacgcctgatggctggatcgtcacggtcttgttgttcgccaagccttacaaaacacatcatcacccaagtcagcactttgcatatgctgaatgaaatgct

SEQ ID NO: 15208 - DNA, 1544 bp, Oryza sativa
accccattgataccatggttcaagtacagtggataattgcagatatactgatcataacagaagtctccatgcattgtatacacaaaatactccctccgtcccataatataaaagattttaagtttttacttgcaacgtttgaccactcgtcttatttaattttttttaaaattattatttattttatttgtgacttattttattatctaccgtactttaagtataacttttcgttttttatatttgcaaaacaaatttgaataaaacgaatggtcaaacattgcaatcaaaaacttaaaatctcttatattgtgggacggagggagtacttcctatccagtcaatgtcgcccacttgacactttggcagcaagtgtgcctgagcatttcagcttttggattggtaatagtacatgatctgttccaacagcaaagcaaaaacaagcttcgtctttgcctgcacgggaaatgcattgcatcttaattagcaatagctcaaagaaagcaaccaccccagcacaaactacaagctcatggaataagccctcggaagggaaagggatttggcgcaaattaagcagcagcgcgaggaacagcagtacaaagccaagggaggccgcagtaacttttacaacagcactggtgctgaggagttgaggtatgtacaaagccactgtacacaccttcatacaccggaaaaatggggattgcagatagcaaggggtggaaccgcagctcacgatattcaccatgtcaagtgaacaagattgaaatcaggaagcctttctccggccggtgccgctaggacttctggggctcatttgcttatcctgtgccatcagagaactggtgccactagtcccatgatacatcaagcgacgaggagaatcatttctcatgctctggttctctgcctcaagttgtttagcctcctccattagcatagataactgttcacagaaccaagtagccattagtggcaactccctttaagagcagtgtaataagatgcaggctccactcacccgaagttcattttccttcagacgatcctgaagtacagttatagcagggctcaaactagaatagcagaatgcaagataagttagcagagggctgcacataaataaacatatcagccaattaacagacagagattgtgctactaaccaatattccattaatttgcagagagatgagttgtatgtagatgcatggtgaatagatgtaagtgggtggatcttcccatcactgcaaaagaaccatacaagatgtgcattttaccacataataaacacgtagtactatataaggcaaagtaagtaactttagttaccgaatattttgatgcatggcttgattatatgctgatttttcctcttcgaaaacgacatgttgcatatcacagtaagaagttaatgtggtgtccagctttagcagatgcctggtcggaaatacataaagtggcacctcctttcttacatattctgcaccactattggcaacacattctagttagaagttaatatatgattatattgcacc

SEQ ID NO: 15209 - DNA, 1426 bp, Oryza sativa
cagcagggctaattaaatgtcatgggtgccccaaactagaagtaaacatgatgtgcatatgaagtacaagaatcataccttttgagcatcttcgctaaaacaagagaatatcagacccacaaaacctggctccatcaactgaaacattgcctgggtccgaacatctgcagtatatgactcatgtaagtcagatataacaagcaaagtccagccctcactgcaaacgggcagcatctcataagagacaaataaagcataaaagcagatgcactagcgaattccctagatctacattgtcatcgtcaatttgtcctgatatggaccctctactgccttcgtactcagggaagtataagttggtgccataacggaaaaaatggagtaaacccacatgcctaaatatagcattcccaaatacaaaaaaagcatacattaccaccaacaaaaaggaaatgggctctagcataattaacattcgttttccaaacatcagataggataacgaaaggtttcacatcacttcaaattcaaaatggcattagtacaataacacaattgcaatcaaatttcaaaaccgtgcaaagttccatatcatctcacgacatcacaaatacggaatgcgacaaagtactgcacaccaagggggttatcagaaggcgctccagccttagtgaagcacagcaaattggaggtaacttgaaccacctacctacatgggaaggcagaacggtgatatgcgggtgcgagtggtaccatccaatcaccctcgttttctcgccgatggtggccgacaagctgtgcgaacagagttaagtccaactccaactcccgaaaccccaacattaggcttctcaacacaaaaccaaacacacaaaatcacagaaatggaggggaaaaaggatatctcggcctgcgccgtcgccgccgcgagcagctcggggttgacctccaccctgtccttcttccgctcgcacctcatctgcggcgacgccccccatatcagagcagtcaccccgcccctgctcgaatgctgcgaagcaggcaaaaaaccaccatgatctcaacaccagcaagcgccacgcattcgcgctggaggaggagcaggagaacggggagagaggagaagcaggtgaccttgatgtcgccgaagaggaggcccatgacctcctccgtctcggtggtgagggcgtgggagaggcaggtgagccacacctcctccccgatcctgacctccgtcagcgacatctcctccgcccgccggcctcctgccgccgccgccgccgccgatccggtggggtttcgggccgcggcggaggaggggttgggtttggtttggtttgcctcttcgatttggcttgtagcgctgcgcctctttgaagctcggttttttttttcccttttctttttctttctcgtgcgaaatggg

SEQ ID NO: 15210 - DNA, 606 bp, Oryza sativa
  unsure (1)..(606): unsure at all n locations
cgcgggggnnnnnnntttgtttatagacatactcaagctatgcactgagagatcccctcataatttccccaaagcgtaaccatgtgtgaataaattttgagctagtagggttgcagccacgagtaagtcttcccttgttattgtgtagccagaatgccgcaaaacttccatgcctaagcgaactgttgagagtacgtttcgatttctgactgtgttagcctggaagtgcttgtcccaaccttgtttctgagcatgaacgcccgcaagccaacatgttagttgaagcatcagggcgattagcagcatgatatcaaaacgctctgagctgctcgttcggctatggcgtaggcctagtccgtaggcaggacttttcaagtctcggaaggtttcttcaatctgcattcgcttcgaatagatattaacaagttgtttgggtgttcgaatttcaacaggtaagttagttgctagaatccatggctcctttgccgacgctgagtagattttaggtgacgggtggtgacaatgagtccgtgtcgagcgctgattttttcggcctttagagcgagatttatacaatagaatttggcatgagattggattgctttt

SEQ ID NO: 15211 - DNA, 520 bp, Oryza sativa
atagattaactgcaaaagcaatatcaggtcttgtgcaattggctagatacattagtgctccaatggcgcttaagtagggaacttcaggtcccaacatttcctcatcatctttcttgggtttaaatgggtctttatccgcttccagggatcggaccaccatgggggttttcaatggatgacatttatccatattgaacttaccaaggaccctcttggtataggtagactggtgcatgaacactccttcagggaggtgctcgagctgcaggcccaagaagaacttggttttcccgaagtccttcatctcaaactcggtcttaagataagccattgcttctttaatgtcctctgtggtgccaatgatattaagatcatcgacatagaccaagatgatacaaaatccattcagggattttataaacacacagggacaatcatcgttgtttaagtaacctctcttcaggagatagttacttaaccgattgaaccacatccttccggattgtttcaatccgtataa

SEQ ID NO: 15212 - DNA, 560 bp, Oryza sativa
  unsure (1)..(560): unsure at all n locations
acgactgttntnttctgactgctacgcatatccgnctnnnnnnnnnnnnnnnnnnnnnnnnnnnnnnnnnnnnnnnnnnattaatcagatcatgtgcgtcttcttcacttgtgccagctgcaaagccatcaatagcatcgacattgattttggggtacagagacttggtcattgccaatgccatgcttgctcccatatttccagcctccttgatatttttgaagtacacatctagagcagtccttaacttatcaaaaatttctactgtgtccaaggagctcgtaccactattgctcaaatacatggcctagataattggggtagcagtgttggcaacttcgcctctagcttttttagcaacttcgactttgttgatcaagaagtcgaattgtgcctttgtcttccccttatgatctgcatacaacaccaatcaaggaatttagatgcaacagtattggctaaatttcatttatagttagtcagaagagttaccttcaaattctttgaccgccaaatctttctccttgggtagagcagcttcgtcttctaaggctttgatt

SEQ ID NO: 15213 - DNA, 626 bp, Oryza sativa
ccggcgaatctggttgttatgtttctttaccccctcgacgtgcggcggctcgtcgctgggcgtgtagatgccggcgctgctgacgaagaggaattgcgccacgccggccgccttcgcccagtccaccaccggcctgcgggaacgcgtcgaacaccttggtcatgacgcctgcttgctcggagcgaggggggagaataatcgagggaggcgacgtacttgacggcgtcgaggtccttgccgttgttgtcgaggacgacgtcgaacgaggcgccgccgccgaccgccgcgccgacgtccgccgggtcgccccacaccgtcgtcgccccggcactcgtcagctcctgcattattaattgcatccattcattcaccatcgccgccgtgagccctcgaacccccataatgttacctaccgagaagcgggagaagggcggcttcttcatcttgtcggagccctcgtcgccgacggtgagcacggtgacggcgtggcccgcggcgagcaggtccttggcgaggtagaacccgatcacggcgtgcccgccgccattcgtgttcacgatcagcacgctcttattgcccgcccccgccgcctcctgcgcgcgcacggtcaccgcgcccacccttct

SEQ ID NO: 15214 - DNA, 6612 bp, Oryza sativa
  unsure (1)..(6612): unsure at all n locations
cctttgcttcctccactcaaatctagagcctatcttgtgagattgagagattagattagagtgtaggagtgttttggagatggcttgaagattaggtttaattgagcactttggatatcttgtgggctgtcacttggacttattactcttggagatcttctcttagactgttaggtgtcgcccgtgagcttccaaagatcttgtggatgtcccgggaaagtttgtgaaggttttcctcacctccgcaaggaaatgatgtaagtgagtaaagattcttgtgctgagttttcagaagttgtcctaggtagagcaacttgcacttgtggtcttttctagaatgaattgtgagttggatcttggtggtcactcaattctagaaaatgacctagaagtgttgagttgaaggctgtggactccttatgggatctttgcataagtgatgcaaggggttaatcgagacccggctctttgagcacccaatggagagtaggatccgtgtgatccgaacttcgggaaaaaatcgcctttgtctctcttgtgcatgatctgtgtttgaatctgctggtatcttgagatctacatcttgtgcaactctgtgcctgatcatctctagctaggacctgttttacttcccctaatttcgcttttctctgttgcccggaagttcctggctcaagaacttcggaagttccgggctactcatcctgcccggaagttccagtgtttatcaccaggaggttccgggccctgtcaatttaaccgctgcaattgttgacaaaatttcaggaaagcctattcaccccccctctaggctacatctctgcacattcaattggtatcagagcaaggtgctcttgattcaagcttcaccgctttgagtgatccacgatgtcggacttagggggaaaggacagggaaattggaaataaagatggagcgagcagcaagggaactccatcacccaagggagccactataccttttgattacagctaacttaccattccctctcacaatttcgtctctgtgccttccggacgtgctctcaatttgatgggacacattacgccgcttagaagcacaagatgaagttgcatctaatctctttgcatccaagtatttggaaagttgtttgtacacgaattgacgcacctcatgaggacatggagctcacttcagagcaagaacaactcatccaccgcaatgctcaagcttccaatgcaattctctcctccttgagtccggaggagttcaacaaggttgatggactagaggaggccaaggagatatgggatactttgcaattggctcatgtgggatctcccgctgttcgtgaggccaagattgaattattggaaggaaggctaggaagatttgtgatggatgacaaggagacaccacaagagatgtatgataggatgatgatcctcgtcaacaagattaaaggacttgggagtgaggacataacaaatcactttgttgtcaagagacttctccgtgcttttggtccaagaaatcccactcttgtatcaatgatacgggaaaggaaagacttcaagaggctcaccccaagtgacattcttggaagaattgtgtctcatgagatgcaataagaggaagcccgtgaagtgaggcaaatggtgaagaatgccgccatgatcaaaaatcaagaagttgctttgaaggcaaaacaagaagaacagtcaagttgtgaagaaagtgaagatgaataaatgacttttattgtcaaaagattcaatcactttcttcgcaagagtggctatggcaaagggaggaaggatgatgacaagggaaagaggcaatcaaagagagcgtgcttcaattgtggcgaatatggccatttcattgccgattgtcggagcgtgctcatgttgcggaggcacacatggtggaagtgtggtactccggcgatgaagaagatcccgaggtcaagcccaagcccaagtcaaaagacaaggttgaaggagaaggtggtgttgctaccgtcgccttcaagtcatcttcttcaagcaaggagcgtctcttcaacaacttgagtgatgacgacgacgactcctaccactactcttgcttcatggcccaaggctgcaaggtgatgactcaaaagccctctcaaacttctcttgatgttgattctagtgatgaggaaagtgataatgaatcagatggtgtgcttaagagctttagcaaacccgctatgcaacatttggctaagttaatgagagctttggatagtaaagaacaatcactcgaaaggcaagaagaattgcttactcttgagaagaaaagaaaccttgccttagaggagagcttagctaaagaatgtgctaaaaatgaacaacttgctaatgagcttaatttggctaatggttctttagctagccttagagatgtcaatgaaactcttcaagagaaatttgctagtttagacaaaagtcataaagatcttgaagttcaatttgacactctttggaatagcacctctcaaccaaatgtggtttccaattcttctaacccttctactagcaatggttgtgctaggtgttacaatattgatttgaactcttatgccactaatgttgatgctatgcaagctcttaagaaagagaatgaaaggtttggcactttggtgaaatatgggtgcatgaagacataccattcaaaagatgccctttacaagaccatcaccgctcatcctaacaaggatggacacgggcttgggttttcgggtggaagtcctgtgtctaagcgtgtgatggtaaatgggaaagaatgcttgatgtttgtgagagaaggtaaagctccacaagcaagtgaggtgactagtcttgtgagtagccagggacccggaacatccggacaaaccgggcgaaacttccgggtgggagtctatgtctctcaaaaattcccaccaggaagttccggccagtttgccaggaaattccgggccaatggccgtgcacaagacatgaccggaagttccgggcataatgccaggaggttccggtcagatggtcttcactatgattcatatgtaatttccaaaaattcagagggcaaagtggttgcttattttaatgggaattacaatgatgagtaccgcacttgtgtgtgggtgccaaaggctttggtaactaacatcaagggacccaaacttagacaagtttgggttcctaaatcctaagcttgatttcttttgtaggcatactcctccggtggttcaagttgggttgtggacagtggttgcaccaatcatatgactgtggagaggagtatgtttacaagtcttgatgaggagaacggaactcgtgagaatattgtgtttggagatgatggtaaaggaaaggtaattggtctaggtaaaattgccatctccaataatcaatctctctcatgttcttcttgtcaattcattaagctacaatttattatccgtttctcaattatgtaagttgggttacaattgctcgtttaccgatgaggatgtgaccgtctttagaagggatgactcctccgtagcattcaaaggcaagttaaagggtgatctctatcttgtcgatttcgatgtggatagagtgaatccggaagcttgtttgattgctaaatcctccatgggttggctatggcatcgtagactagcccatgttggaatgcagaatttggcaactcttctaaagggggaacacatcctcgggctcactaatgtcacatttgagaaaaatcgtgtgtgtagtgcttgccaagccgggaaacaagttgggaatccaaatcctatcaagaacatcatgactacaacacgccctcttgagcttctacatatggatttatttgggcccgttgcttacataagtattggaggtatcaagtatggttttgttattgttgatgatttttcccgcttcacttgggtgtattttctccatgacaagagtgaggctcaagatgtcttcaagcgcttcgctaagcaagcccaaaacctctatgatctcaccatcaagagggtgcgaagcgataatggaggagaattcaagaacactcaagtgnnnnattccttgatgaagtgggaatcaagcacgagttctccgccccctatgacccccctccccactcaaaatggcattgttgagaggaagaaccgaactcttattgaagccgcaagatcaatgcttgatgagtacaagacttcggatatcttttgggcggaggccgtgagtaccgcatatcatgccatcaaccgcttgtacctccacaagatcttaaagaaaacttcatatgagctcttgagtggtaagaaacctaatgtttcatattttcgtgtctttgggagcaaatgcttcattttaagtaagaggcctcgctcatctaagttctcacctaagatggatgagggattcttacttggctatgaatcaaatgcacatgcctatcgtgtcttcaacaagacctccggcattgttgaagtcactagggatatgacatttgatgaatctaatggctcccaaggagagcaagttgttgtacatgttgtaggtgatgtggatccaagtcaagctataggtactaaggctattggagacatacgaccagtcgagacacaggatgaccaagaagatagggatcaaccttcgtcatcgacatccaatagccctacagtgagtcaagtgttagttgacccggaagttccggaaccacagatggtcggaacctctggacctctccaggccaggaagttccgggtccatctgccaggaagttccgggcagaggacagtcaaggcgtgcctacggcacaagtggatgggattgatgccgagggcactgtagagcatcctgatcaggctcaggtcccctcggtgcaccatccaagaatacatcacactgtccaaagagatcatcccgtcgacaacatacttggtgacataagaaagggggtaactactcgttctcgtgtcgctaacttttgtcaacactattcgtttgtctcttctttggaaccaaccaggggtgaagatgcacttggtgatccggattgggtgatggctatgtaagaggagttgaataacttcactcgcaaccaagtatggacgttggtggagagacccgaccaaaatgtcatcggcaccaagtggatcttccacaagcaagatgaacatggagtggttgtaaggaacaaagcccggttagttgcgcaagggttcacccaagtcgagggtctcgattttggtgaaaccttcgcacccgttgctcgctttgagtcaatccgaatccttttagcctatgccgctcaccatgatttcaagttattccaaatggatgtcaagagtgcttttctcaatggatctatctcggagttggtctatgtggagcaaccaccggggttcgaggatccaaagttaccaaaccatgtgtacaagctccacaagacgctctacgggctcaaacaagccccaagagcttggtatgaatgtctccgagattttcttttgaaaaatggttttgaaattgggaaggcggatactactctcttcactaaaaaatctaagagtgatttattcatatgccaaatttatgtcgatgacataatatttggttctactaattcctctttttgtgaagaatttagtagtatcatgactaaaaggttcgagatgtctatgatgggcgagttgaccttcttcctcgggctacaagtgaagcaagcacaagagggcactttcatctctcaaaccaagtacgtgaaggacattctcaagaagtttgggatggaagatgccaaacccatcaagactcctatgcctactaatggccacctagacctcgatgataatggtaaatgtgtggaccaaaaggtatatcgctccatgataggatccttgctttacttatgtgcatctcgtcccgatatcatgcttagtgtatgcatgagtgctcgctttcaagcggagcctaaagagtgccatttgattgccgtcaagagaattctaagatatttagttcttactcctaatcttggcttgtgatatcctaagggttgtgactttgagcttttgggctattccgattcggattacgccgggtgtaaggttgatagaaaaagcagaaccgggacttgccaatttcttgggcggtcccttgtttcttggtcctccaagaagcaaaattccattccattatccatcgctaaagctgaatatgtcgccgccggttcttgttgtgctcaactcctttggatgaaacaaaccctaaaagacttcggctacaacttcaccaaaatcccactcctatgtgacaatgagagtgccatcaaaatagccaataatcccgttcaacactctcgaaccaaacacatagatattcgccaccagtttttgagagatcatcagaccaaagaagacatatgccttacacatgtgagaaccgagagccaattagccgacattttcaccaagcctttagatgagaaaagattttgcgagcttaggagtgagctcaatatcttagattctcgcaacattaggtgatgggtggttggctaatttatagtcaaacatgtatcactaaaatgtaaattaaaaaaaaattgagcttttgt

SEQ ID NO: 15215 - DNA, 588 bp, Oryza sativa
gcaaattacaagtacaaggaaaattactttttctcatctggagttgacaaaaatttaaataaatgtcattcagtgctggagaaaaaaaaaatcatatgatcatctaaacagatgcagaaaaagcatttgacacaagtcaacattcttataaaaactttcaacaaattaggtatagcaggaatacttctcaatataataaaggttatatatgacaagaccacagcttacatcatacccaatgatgaaaagctgaaggctctttcctttaagaccataaacaagacagggatgctcactctcaccactgctattcatcttagtgctggaggtcccagccggagcaattagacaagaaaaagaaaatgcattcaaattggaaaggaagttatgaaactgtctctgttttcacatgacatatatcttatatacagaaaattctaaagactctaaaaagactgttaaaactaacaaatgaattccgtaaagttgcaggatacaaaatcaacatgcaaaaatcagttgtttttctacacactaacaaggaactatccaaaaaagaaatttagaaaaccatactatttacaatag

SEQ ID NO: 15216 - DNA, 11185 bp, Oryza sativa
gactaaaaatggatttttactcccggttttttcacccgggactaaagatagtgatctttagtcccggattggtagtcccggtttgaaaaccgggactataggggggttacgaaccgggagtaaagcccctttctccaccagtgatacatatatacatatgtacacatatatatacatatgtacatatatatacatatatacatatatatatacatctctcaacttacaaaaccgttcactttagatccttttgtggtttttatcctgattttgtcttacatggtggctaagtcagcgcagaacccacatgggctccatatgtcagaatgccaggtcatctctctccctcctcttctctcccttcctcatctctctctctcacttctctcctctctgcatggcggctggtgggtggggacgaggtcaccagggcgaggcgggagaggagattctgtggacgtcgcgtgcgacctcggggtcggaccgtcgacacgagagaagggaggcggcggcggctgcgacggttgagaagggagaggcagacggcggcgaagcagggtcggcggctggcgaccacgcgggaagaagctgggcggcggcgtgggaagaagctatcttatacgtcgtgcccgttccgcccacaaccgcctgctccactcgccgctccttcgcgctcacacactccttcccgccacgccaccctcgctctccccattcggctccccatcgatgccatttgcctccgcctcgtcgatgaggttcgaccattgtcgaggcggagatgtataactggacgacgacggattcgctttcttctttcccctcgcttctcctctctctcccctccagatggtcgacattgaccgtcgcctgccggtgccgcacgaccttctgcacccgcccttccacatcgccggcttcatggcctctgcacagccaaaaccaaacacttcaaatggtgtcgccgcctcccgcgcacgcaccgcggcgccgacggcgtgtaccttgctgccacagcctcttcctctcccgcagcgcgcctgccagccgctcgtctgctccgcagaccaacagctccccgtactgtcgcctgctccgtcaaccgctcgcccggtcctccggcaggccaatgcggcgggcgcagctaccgccgccgctccgcccaacgcccgcccgctccgccagccggctgctccccgcgccgtcgcccgctcctccagctggccgctccaccccgcgtcgtgccctctccagcgatctgcttggaggggaggggagagaggatagagagaagaagggaaaagagactaaggtttcacttacatgtggggcccacgtaggtcctacgctgacgcaaccgccacgtcggacaaaactggagtcaaaaccaccgaaggacatatagtaaacggttttctaagttgagggatgttatatatctggttttgagattaggggacgattttgtaactcgatgataagttgagagaccttcggtgtacttttttccgagacagaaatacccctctattgggccgacccattaaaatgggctaggaaaatgttatcccgacctccaaggattaacttttaatcttaacagtccagtccattcatgtcaccttatttcattctaatgttctattcattttcatttcccattccacccttcataacccattatcgaaactcacgctccggcctctgggctagtagcaatgtgtttgctttaggcgtatatttggtagtgatatgattgcaaatgctcttgtttagcacaactctagattttaggtcatgttgaaagtttatatatgttaaattatagttgtttaaagtttcgtattttattttaaataaaagtaaaattatttatccaaatgttacagagaaaatttgatctatagcaatgggaaaaaaatcagtactaaaaaatagcacaaaattttcccttttcaacaagaagcatatgccacttagtttttcttcattcatagcactcctgtcatatgttccgttcatgtatgtaggtttatatactatttttttttgttacctttattttctgtgctacagaaattttctcaactaggaaggtagcccgcgcattcgagcgggcatgtaccgtatgtaggatgaatttaagaaacttataggagcggtataacagcgaaataatatctgcaacgtttaaaattgtgattgtttccatgaattttcttcgttagcatcacaaaacgaatttaattgttatttataaaattatctattgaagattggggttggtatggtaccttaagagtctaagacatatgactcttgaagttccatatggaaagtgtaaaacttaagttataaaagatattacatatacaaccatatataattaatggttgtactgatttatgtagaaaaattgatactaactttattatttggcagatatcgattggccatagctatggataattcctcataggaaattatgaatatgtgtacagtatagggatacaaattagaaaaaaaaagtagaagttatgagaaaaaaacaaaatatatgaccctcaatttttacctaattcggtagtccatcatttctaaccattggatattcagatgatctaacatattgtgtatagtccaaccaaccaaattattcgtctttcctcattacagatgttggacatgttaatccggataaatctatgtatctatgatttacatatataaaaatttaagtataataaaatatacaccctactctaccaatgcagcgaacgatgtgtgcgacaggttcgccacggctggcttcaacacgaacatgatcgcgtacctgacgcagcagctgcacctgccgctggtggcagcctcgaatctcctcaccaacttcaccggcacggctgattccttcgccggccacctctggaccaccgccgcccccagcgttctgtcccagctcggcatgctcggcctcgtcgtgtccgcgctcgtccctgctccgccccgcgccgtgcagcgctgccgccgccgccctgtgacaatgactatttagagtatgtacaaatacatatgtacgcacgcactgaggagagggtgggcctatgggagaataggtgggctgtgggatttttttttctaaagataaatataatagttgaaaatagtaggtctagcgatttattattatagaaatagtgggtccaccaatttattataacgccacgtgatggcttagaagcgtttgtaggattctcacgtggtagcttgagagcgtttgtaggaagtttaatggacttttagtatataatagatagaagatagataaatagatgttttgacatagtcgtaaattcagattcatgaacttgtgaatctagaatacccagccccaaaacatgttggatccggagttgtgccaaacattcccctattaggggaaactacttcatttattgatcaaatttattcagtccatatgcgtccctaaatcaacagcagatgaacacggtcgccaaggcaaaacaacaacatgccaagaacacaacaacagagattattcttcttggttactgatgattatttttgtatcgcattgatcagattttggggacggcggcgagggcttcctgcagcttctcgtcggagtgggagaggtcgaccatgtcgcccctcaggtacttctcgtaggacgccaggtcgaagtggccgtgcccgcacatggccatcaggatcaccttcttctcccccgtcctcttgcactccatcgcctccctgatcgccgccgcgatcgcgtgcgtcggctccggcgccgggatgatcccctccgtccgcgcaaatttcaacgcagctggagttcaaagcaaaaacaattatgcaatcacatacatcagctttcgggagaacgaaatcatggataatttcagattataatactttctagtattacccacatttatatagatattaatgaatttagacatacatatatgtctagattcattggcatatatatgaatgtgggcaatgctagaaagtcttataatataaaacggagatctagcattataatataaaacggagatagtagtacggagtaccatcgaagcattcagtttgttggatggcaatggcttccatgaatccaagctcatacacatgggagattagtggcgccattccatggtagcgaagccctcctgcaattgcaaacaatggcttgggtttattagcaaccaagaacttcaaattggagcaagaactgaagaagtgtgcattgttgagatcgataaaagaattcgagacctgcatggatggggtcggggacgaatccatggccgagggtgtgcatcttcatgagcggcgtgaggccggcggtgtcgccgaagtcgtaggcgtagacgcccttggtgagcgtcgggcacgccgccggctcgacggccttgaacgccgggctcatcctgccggcgagcttctcgcgcatgaacgggaacaccagcccgccgaagttggacccgccgccagtgcagccgatgacgacgtcggggacgtcgccggcggccgccagctgctccaggcactcctccccaatcaccgtctggtggagcagcacgtggttgagcacgctgccgaggcagtacttggtgtcggcgtccctcgccgccacctccaccgcctccgagatggcgatcccgaggctgcccgggctcgccgggtcgcgttccaggatcctcctccccgactccgtcgccgccgacggcgacgggtgcaccgtggcgccccacgtctccatcatcagccgccggtacggcttctggtcgtacgacgcgcgcacctgccacacctcgcaggtgagcccgaacaggctgctcgcgaacgacagcgcgctgccccactgcccggcgccggtctccgtcaccacgctcctcaccccggcggcggcgttgtaccacgcctgcggcaccgccgtgttcggcttgtgcgaccccgccgggctcgtcccctcgtacttgtagtagatcttcgccggcgtgcccagcagcttctccagcctcctcgccctgcatcaccaatatatccgccattgcaacaacttttaacaaagaactcttctgaattccagcgctgagattggcaacaatgcagacgaagttctagaggctcattggttgaccacatttcctaatagcttatccacgaataaaaattactgcctcaaattgtttaacataaattaaattaatgtttgagaaaaaagaaactatagtgaccgtataggtaagagtggaagtctggaagggtggttaaaagtataataggaaaaaaaacttaatgaaatatgattgacaagacaatcagtacttcattgtgataactattttgggacaaatctgaatctaataaatacaataattatgagatggagataatgatttataggtgaaccttttgtatgtgcattcttaggcagcgttagttctgggagattagagatagaatgcacatcgttttccacgtgcacgcttcccaaactattaaacggtgtgttttttgcaaaaattttctataggaaagttgctttaaaaaatcatattagtccatttttaaaatttgaaataattaatatttaattaatcatgcactaatagctcacctcgttttgcgtatctttccaatcttctctatctcccctttctcaaacacagccttagtgatttaaaagccaatatccaataaaaactacgttgaaaatatttcaaaatcagcttcaaaattaagcttgaaaattcacattttggctttaactttggtttattaggcctaccgatggagatgctagtgttctacctgatcagcggcgtcgggcgccagagcttgtaaacctcggcgacctcctccgggatgtcgatgaaccgctcctcggtcacctcctgcctgatcagctcgtcggggaagagaggggacaggtcactagggttcagtggctggtgcgtctgcgggtgcagcggcggcggtggcttcaccggcaggtcggcgacgaggttgtaccattgcttcgggatgctcacaggattcgagctggccctggcagtgaagcttcttcttctgacagaagctctctgctttggtttgcaaaggagtgaggctttttctgaacctgctgctgcaatacaggtagtagtgttcatcaggttagtgtgtgtgcagatttgcagctccagaattcagaaattagattgaaggcctgttcactttgatgccattttcaaccttacttttagtaaggttgctaaaaaagtggctacatttaatttgctgccaaattttaataactatataaaaaatcctgccaaaattttgacaactatactaaaattttagcaatgccaaaatttgataaggtttttttggcatcaaagtgaacaggcccgaaaaaaaaagatatactactattaatttccataagatctagataagcatttttcagccacatatctgatatctcaaagtgttgaaattgttgcatagaaactgagtgctaggagtgtggtacactgattaatatttaatttggacatgtactaccaagatgatgtctactcctaactgaaacatttatgttttgccttgcccccacagtactgcaatttggtttaagattcccaattctgcaggacggttagaagggagagaaaatactgaacttacataatctgtaccaacatcatcatcatctattatgttcatctgtaatcaactattgcacatttagaaggaatgaaaatcaatcagaagtgcccaactggggtattctactggttagtttactttatcccactttgtttttctctaaggagagaatgctactgattaatttaatttaattttatgctaggaggtcatactactgttgatgggtttgggccggatagcagacagaacaggatcacaactaacaactgataacataataaattccttgagatccaagtgcacagaaacacaagtgtaaaataaataaagtaatgggttgagttcttgggttgctctacaggagtaacaagaaacataaaccaatccaatccaatccaagaacagcagcaaaacacaacacacccgttgctcccatctcctccaagacgatatctatgttgggccatcaatcaaatcaacccaatctaaagaatccaagaaagtactataaacccaatagcacaagagggcacgatgagatgcagggatccaccttgtcggagcaggggaggtcggacggaggcggtggtggccattctttctccctctcttccgctcccgacgaccctcgccgccggcgccggcttgccgtcggttcgccggagtaactggtcaaccccaaacgcgagctggagagctgcctctctgcctgctctctcctgtgatgcagctggtttttgtagtggccagctctgacggatgcagcaatttttattgttctatctaggtggtggtgcttctcccggcttgcgtttgatggcaaagggaagggagggagggagggaggagaggagactcggttttgctactgcgccatcggatcaacgcaactgaatgcgatggcaatggcaactctgcaatcgcaagcgcaagcacggcggcggatgcagcgagatggcacgtggggaaattgactggggcattggatcctctgcatctgtgtgaaatgtccctaagtttccgtgtctaaagtttaactgtccgtcttatatgaatttttttataattagtatttttattgttgttagatgataaaacatgattaatactttatgcgtgacttatctttttaattttttttcataatttttctaaataagacagatgatcaaacgttggatacgaaaacccagggtttgccttttttggacggaagggagtactactgacttgagctgatgatgctaatgacacaacaactcctcagtacacattttttgatgctaatgacacaacaactcctcagtacacattttttttcctgcgaagacgcaaaaagattgcacgtcaatctattagaaccgtacacatgcaatagaagtcacatgagatatgtttaggttgatagtacttattctaaacattctactatctagatgtttatagactactggtacgagatacgacacattctagtactatgaatctggatagggaatgttccacatcctatattagatttgtttttatgggacaaaggagtagtattgcacttaagagtatgggtgaaattatggtcgaatcacaaaattcctatatcataaccatattttccatttaaactgtaaccgacacagatggtatcagataataaatcacttatcccgtatcctatcaattttatatttctaattcatagattttaaatctagtgaggcaattagtcttaaaaagatagtcaagaaaaaattaagtaatattttttggtgagctcgtaaaaaaatatgaaccaatctttcatcatattcataataaattttcatacatgtttgatcaaattggatatacgggtagatacaactcttcgcttatcctaacccatatttgtttgcaggtttggattcggatttagactcgaattagaatattaccagatatctcattttctctctcgtatccttcccacgagctttccgtcgagcggacggtcaggaaatgttcgttctgttttcacccatactacatactcaatagagaaaaactatgtacagcaaacctaaaaattcatcgaatatataaatagacgtctcagacgtctcatatatatccatgtcttctgagtaaaaggattagttacatataaatctatgagtaaacaaactactcactgttaaatctggagtaaaaaacataggtgaatctcagatgttcatttgtgaatataacgacagttgttaagtacacatatgaagtatgcagtatactgccagtatgtattttcccaatcacaaaggatctctcgttccatggctatataaaacaacaggagtacatgtcactgtttgtactgtgtgaccgttttactgttccaacaaaagcaccgtttagcttcacttttctaggagcggctgtagcatcttagtttcttcttcaatgctgagcagaggatccgattcccggaaaccatggagatgggatttgtacttatcaggcactaatatatccgagtgaactcatacagtaaattttatcttaactaaatcatataacaataataagattaaaatcaacttcgcccgttgcaacgcatgatattttctctagtattatttaaaataataaaaggcacgaataatatggaaggatctaatatcaaataattagaaggtgtgaggcttcgaacccaggtcatctagcccaccaccttaaggagctaagccggaaccagtcgtgtctatcactcttggtagatacttcctccgtcccaaaaaaaagacaaaccctggtttccgtgtccaatgtttgaccgtccgtcttatttaaaaaaattatgaaaaaaattaaaaagataagtcacgcataaagtattaatcatgttttatcatctaacaacaatgaaaatactaattataaaaaaattttatattaagacgaacaatcaaacgttggcacgggaactcacggtttgtctttttttttttgggacggagggaacaattagattgaggatttaagacttcttttctcactaaatttcctctcttcttattcaggtgagctacatataccatttttttttaaatacgcaaaaggcttgcctaacaaaatttggtacagaatttgcccacgcggagctatatacagatcacttagaatatagaaattttacctgaataagtttatttcctgtgaagtttgttttgcttttccaacaaaaaccgcaaatctattttctcaaggttgattgatctcatctcttacatcacacccctggcccgaaaatattaaatggttggtcgcctcaaccgttgcccgtatcacgtcggattcacctacccttaatcctaacattcaaattagaactggaataatactctcatttttttattcagtcagaatgaaaagtgaaacgagcgagaaatcaagttttgcctttgtgagaacacggttattctcagaaacaacagttctcctttgctaaaaggccattgaaaaatcgttgcaaattgcaacaagttagcacctaatcttccccataaaatgtccatcaccttgaccttatctcctaattaaaccaaaaggacagtactttcagaatgctgacaaatatttcggtgttagcatgtagccgtctgttgctgttgctttctcggtagccaatgtgtccagctcatagtgctgccagaggaaaaagcaagacagagtagtcagagatcaaacgcataatttgatatcaatatctcctaagacaaatcaagattagctaagactagtaaactataaatcgtttatgcgatgtgcatgtctctgtcaacatttcttctgccgttgatgctgtgttcctaccaactccctcaatcttaaaaacaaaccaatctaaaatagaatatgaatataatgaatttggatagcaggttgatttattttggaacggatggagtactactgttgtagtagtgacaccacactgcaaatatttgtagtagtgtctctacttaaataattattcagtcctaggaaaaacctaaatgattattcagagtaataaaaaaaacatgtctctgctcacaggagattatgaacaacaggttaactcttgtttcctgatgaacatagtttgatgaagatacaagaagaaggttcaataatggacatttctgtagccaaaatttaaattttaaaacttagttgcagacttaattttggttttctttttcatggactttatttttagcacttacttttaaatcggtaagaatatataaaaattttaccctgtgcggccatatatgggcgtgcatgggctaagaagagagtcctgaaggagcaggcatacggtgacacacactgtagattcagactggcccattaattagatggcatttcgtttaatttaggaataagttcaccggaggtccctcaacttaacagcgagattctttgaggtcccactggtggagaaaccatttttcatcggtcggccgaattccacaat

SEQ ID NO: 15217 - DNA, 24747 bp, Oryza sativa
ggggctaaagcggaaactctgtctggctctccggcactctgtattccttcacacacagatccaccagaacacaggagtagggtgttacgcttctcagcggcccgaacctgtctacgtcgcccgtgtcttgtgcgcttcctctctcgcggacgttcctcagatcgagggcgaagaacctcacttagcgcccctggccgaaccggcaaaggggggcctgtgcggtctccctgtgaggagccccacgctccgtcatctggcgcgccaggtagggggcgcgtgtctttctgagccctcgtcctcctttcgtgtgcgccaagcttctcccgctcagcccaatggccgaacgggcagtggcgcacaacctctctccgagcgctagcggtgacgacggggagcagaacccgcgccgtcgggctcgcaccccaccgtccccctctcgccgaaatcttgggcgggggaaggcgctcgagggggtcgaaggatctgcgacttcgccgcccgcgagcgacgggggaggacggcgagacggggcgcgtcgccgcctcgtctacggcgatggcggcatgccccagggcgcgctccaggctgcgggcgcgctcctgcgtcacccgcccatcgtccccgatccagagactccagcccggcgttggctggatgacgtggccgacttggtcatgacggcgcagcagcgcctaggcgccggcgggcggtcctccgccaccgaggcctctggcgctgccgccgccggctccacgtcgtcaaggcggagggcgcggcgagcggcggccgttacccgccgttcgtccgccattccctcgtcaacgcctccgacccaagaagatgtgcgtgggggtcggatgcccgcctcgatatcgagcgccggcacgacgctcgtcgcgccacccacgcaacggagggcgtttcctcgtccggagcgccacttcggtccgggcacgggggccggccccccgtgtccccggttggtggtgccggctgtcgagcctttgtggcgagccttcggaacgtccgttggcccccaaggttccggcccaccgtcaccgaaaaatacgacggaagcgtcaaccccgtcgagtttctccagatctacacgaccgggatcgaggccgccgggggtgacgacagggtcatggcgaatttcttccccatggccctgaaaggtcaggcgcggggttggctaatgaacttgccacccgcgtcggtccactcctgggaggatttgtgccagcagttcaccacgaacttccagggcacatatccacgcccaggtgaagaagcggacttgcatgcagtacagcgaagggacgatgagtctcttcgctcgtacatccagcggttctgtcaagtccgcaacaccataccgtgcatccccgcacacgcggtgatctacgcgttcagggggggcgtgcggcacaaccgcatgctcgagaagatcgcctccaaggagccccagaccaccgcgcagctttttgagctcgcggaccgtgtggctcgcaaggaggaggcctggacctagaactcctccggttctggtgtggcagctccggccgcccccgggtccgccgctcggtcagggcggcgggacaggaggaggaagaaggggtcgacccgttccgacgacgagggtcatgtcctcgccgtcgagggcgcttcgcgggccccccgaaaggggaggcctgcgagcgacaaaaagaaggaggccggcgctcccagcagggagcgcccgaccggcaagtggtgtaccgtgcacaacacctccctccacgacctcgcagactgccgcgcggtcaaaagtttggctgagcggacgaggaagtgggaggaggagaagaggcaggagcgccgtgagggcaaggccccggcggctcccgccggcaaccggcgaggtgaggccaagcagaaggccaccgccgaggacatcgacgatggcgacgatgacctggggtttcaggagcctgaggccaccgtcgccaccgtcgatgggggagcgtgcgctcacgtttcttgccggagcctcaaggccatgaagcgcgagcttctggccgcggcccctacccatgaggctacgcggcgggcgcggtggtcggaggttaccctcaccttcgaccagaccgaccacccgccgtgcgttgcccggggaggacagatcgcgattgtggtttcccccaccgtttgcaatgtgaagttggggaggtgattgagcaccgtctcgccgtgcggccaggcgcaaggccggtccggcagaaagtgcggcgacaggccccggaacgtcaaaccttcatccgcgaggaggtggcgcgacttctggaggccggattcatccgtgaggtcatccatccggagtggctggcgaatccggtcgtcgttcccaaggcgaacggcaagcttcggatgtgcattgactacaccgaccttaacaaggcatgtcctaaggacccttaccccctgccacgcatagatcagattgtcgactccaccgcggggtgcgaccttttgtgttttctagatgcatactctggttatcatcagattcgcatggctagggaggatgaggaaaaaactgcattcattacccccataggaacttattgttatacgacaatgcctttcgggttaaaggatgtgcagtgcgtcaccggctgcatggccgccttaagtcggttcatatcgaggctgggagagaaggcgctacccctatttaagctcctcaaacgctccgggccgtttacctggacggaggaggctgagagggccttcgctcagttgaaggcgtacctcagttctcccccagtcctggtcgtcccggagccagatgagccgttgctactctacctagcggcaaccccgcaggtggtcagcgcggcgttggtcgtggagcgcgacgaggacaaccctcactccgcgcatccccaccctgtgtcgactcgacccgggagagagcagggaggagaggcccccgagccgaacggcggcccaaggcccccgacggccggagctggccctccgcctgcttgtccgacggtgccaggtgctcccgacccccaggatggcctcggggccactgcgggaaggccacgcctgtcgccctctgaccccgaggtcgtcggcacagaagccgagtgcgccccgcgcggcctctcggacgaagagcgccctggagatgcggcccctggcgaagaggatcggccccgccgaaaggtgcagcggcccgtctacttcgttagcgaggccctccgagataccaagacccgataccctcaggcccagaagatgctttacgctattctgatggcttcgaggaagttgcgccattatttccaggcgcatcgggtcacggtggttacgtcttaccccctcggccaaatcttgcataaccgagagggtaccggacgggtggtgaaatgggcaatcgaactctctgaattcgatttgcgctttgaaccacgccacgcgatcaagagtcaggccctcgccgactttgtggcggagtggaccccagctcccgagcccgtcttcgcccccgaggccacctcgggcccctcgcagctgcctcacaccgcctactgggtgatacagttcgacggctccctgtctctttagggcgccggtgcgggggtcacgttgacctcgccgagcggagacgtcctcagatacctggtccgcctcgactttcgggcgaccaacaatatggcggagtacgagggactccttgcgggactcagagtggcagcaggactggggatccgctgcctcctagtgttaggcgactcccagttggtcgttaaccaggtctgtaaggagtaccggtgctctgacccgcagatggacgcttacgtgcgccatgtgcggcgtatggagcgccatttcgacgggatagagcttcggcacgtgcccagacgggataacgcggtcgccgacgaactctcaaggctcgcttcctcgcgagcccagaccccaccgggcgcctttgaagaaaggcttgcccagccatcggcgcgacccgaccccctaggggagacggacgcgcctgaacggcccccgaggcccgtcggagtccaggcctcgggacccgaggggagcgctcccagctcccctagattgattgcttggatcactgagatccaggcgtacctcgcagataagactctacccgaggaccgcgaagggagtgaacgcgtccggcgcatctccaagcgctacgtgctggtggaagggaccctctatcggcgcgcggctaacggagtcctcctgaagtgcattcctcgggaacaaggcgtcgagcttctcgccgatgtccatgaaggcgagtgcggagcccactccgcctcacgcaccttggttggcaaggcctttcgccagggtttctattggccgacggctctcaacaatgcggtcgacctggtccggcggtgcagggcgtgccagttccacgccaggcaaacccatcagccggcccaggccctgcagaccatacctctttcatggccgtttgctgtctgggggctcgatatcctgggtccgttcaggcgggccccgggcgggttcgagtatctgtatgtcgctgtcgataagttcactaagtggcccgaggcttatccggtcatcaagatcgataggcactccgcgcttaaattcatcaggggcatcactgctcggttcggggtgcctaaccgtatcattacggataacggcacccagttcactagtgagctcttcggtgactactgcgaagacataggcatcaagctctgcttcgcctcccccgcccaccccagaagaaatggccaagtggagcgcgccaacgcggaaatcctcaagggcctcaaaaccaagaccttcaacatcctcaagaagcacggcgactcgtgggtcgaggagctgccagcggtgctctgggcgaaccgaatcacgccaagccgagcaaccggggaaacgcctttcttcctcatctacggcgcggaggcggtcctcccatctgagctcaccctgaggtcccctcgggtcaccatgtattgcgaggcagatcaagatcagcttcgccgagacgacctcgactatttggaggagcgaaggcggcgcgcggccctccgagctgcgcgctaccagcagagcctgcggcgctaccatcagcgccacgtccgggcccgatcactctgcgtcgacgacctcgtcctacgccgcgtccaaacgcgtgctggactgagcaagctctcaccaatgtgggagggtccgtatcgagtgatcggcgtcccccggccgggctccgttcggctggccacgggcgacggcacagagctgcctaacccgtggaacatcgaacaccttcgtcgcttctacccctagcgggggtcgggtgtcatgtatcgggctcgggccaaccccgcacccccccccccccgggcgtgcagggttggccgggggctaccacatgcatatactcatcttttttctcttccgtatttcaataaaagcattttcgatttcctaaggactgtgtctgtgccatcgttttccttttgaagaatcttggcttgaattagcacgctcgtgctcgaccctgccctcggtggcccgggtcggctaaaatcgccaaacggggcccagaaccgagccgtgccccggggcgtggtgaactccgggggggaatcggcaaaggcccacaatcgggtcatccataaccctcggtcaccgcgctcccggcctggccagtctcgacacgtggatctccccaggcactagccccgacccgcgccgtttgaggatgggacctgggcacgagcccttgttcaagccaagacatagaagtaccacggcacagaccatcctcgtctcatacaaacaacaaacagaactgacgcagaaatttcctctttacttgattgcagattaaatcagtctatacaagaagggggcccgaaggcctcggaagaagaaggaaaagttattaagattggcgggggcctgggggctcactccgacgcgcccgggtcgccggcctcatcgtcgctgttgtccgcaccgtcgtcgccaccctcctcgtcggagtcgagggcgaacgcgagccgaggggccgtaccctcgaagctgtggacgatgtgatcggcggcatcccggacctgcgcgcgcgcgccgtcctcggttccgggagggaactcttccagcgctgcccacggggagaagtcagggtccctggcctggtagcttgccagtacgagctccaccgccccccgggcgaggtccctcgaggatgacttgatcgtctcctcgagctcctcggggagccgcttgagggtcccggccatctctgagaggcgctaggcgaggcccccctggttggcggcgtacttcgcgtaccgcccgccccagaggcccgcctgccgcccggcgcagtctagacgggagacggcgtcccgaagcatgccgggccctacctcgttcgccaagcggagggcctcaacctccccggcggacgagtccagcgcgccctgcagctcggcgatggtgtgttcggcggctgcgaggcgggcggctaggtcgccgtcgcccgcggccgccccgccgctgtgcgctctcgcgtccagttccttcgcccgcgcctcgagctcagcggcccgctgatccagtgcggccctctcggcgtgggcgccttccagattgtggcgcgcctgctcctcccgcgctgcctcgcggaggaacaggctgtccgccagccgctgcgccgcggcctcggcctcctcgagagctcgcccccgctcggtgagcacgtcctcgcggaggcggagtgcggactcctcttcggcgcaggcggcctcgtgcgccgccagtgttgcctcccgggtggcgacggcggcctcgcggcccgccaggtccttctccttcgtgtccagggcgcgggcgcgctcctccagcgccgtggcgcgagcctcaagggcctcttcgcgctgccgagacgccgcctcgatctccgccgcccgccgttctcgggcagcggcggcgtcaaggactccccgggcggcgtagagcttcttctctagctccgccgcccggctcctgtattggaggcggaggtcgtcccgcacctcgtcgagcacggcggtggcgatgagggcagtctcccgctcctcctccacctccctagcgatctccgccaggtccctacgacgggcctcgagctcggaggcgtgccggcggtgtgccttgcggcccgcctccaccatggcctccaccgagcaccgcccctcctcgacgcgcgcccacgccgcgtcgagctccgcccgctctgcctgcaggacctccatctgggcacttaacccgtccagcaccgtggtgttcgcggcggctaaggcctgcaggaggggctccgcgctcagtggagcagcggaaggcagaggggagagccgcctcggtgtgggtgccgcgcagctcggcccgccgatcgacgtgccggacccgggggcgtcccccgaagctggctcgtcccaagcatcgcccgaggggtcgggccagagcggcgcgtccgcggcctcgtcgtgggtggcctcggaagtcgtcgtcgcctcgggcggagtcgggtcgggggcttggcaggccgcctggcgtgcgcgcgccgcctcctcctcccggacggactccccggcccggcggagtctggcctcctcccgagcggcctcctcagcctggcgaacccggacggcctcctaggcagcctcctcggcttcccggaggcggtctgcggcttctcgccggtcagcttcccgcctccgggcctccgcggtcgccgtctcctcggcctcaaaccggccggacttggaatggcgggggggcgcgacgggatctcgctgaggcagaagaaaaaccagaagacaaaaagaaacgggcgagtgaaaactcgccttgggagatgggagaatgaacacggccgcggtgggcgcggggacgaacctgcggggaggtcggctaaacgaccacctcggaggcgagatgaggttcccccggcatggctcggtcccccccatcttgcggagccgtttcttctttcgctccccctcgggctgcggcgtcggcacggcaccctccgggcgcctgctgctggcacgcaccgccccgccccctcggggaggagatgggggggcgtgccctcctgcttcctcttcccccgggcgtcggcagggcggctgccccccgggcccccgtcgcggggcccagaagcatgaccccctcccggggtagattgtttcctcctgcggctcccgcccgcgccatcgtggcctcggggggcccgctcccccgacgccccgaccgcctgcatgatgatcaggatgttggcgcgatctggatcgctgcagagggggaggacaccttgggggataagggatgcctccacggagctgagattcagcacccgttggaccaccatcctgaagtcctcagggacccagtcccatttgcgcccctggtgggtcctcatgtagtcctcgggcccggtgtactcccaggcgccccgggcgcgccgctggagcggcgcgatccggcgacgaaggtagtcgccgaacaccatggctcccgtaagcccctgggatcgcagacccgccaggcggtcaagaacggcgtcgtagccgtctcccagatctaccgtctcccgccagctggaggcctgcgccgggggctggctcggaagtcggaggcgcgcttcgtcggcgaggggggtgtagaaccaatcgctcttccagtcgtcccacttcttgcggaggacgcagggaatgtagcggtgcagcacctgcccccgcggctggaagtagcagccaccgactaccgtcggcggcgacaccggctgtacggtgaagaaccaccggaacagccggagagatgggcgcaccccgataaacatctcgcacaggtgcgcgaagatggccaacgtcattattgcgttgggggtgagatgcgccatctggagatcataaaactccagaacatccatgaagaaattagagaatggcgggaccagcccggccattgcgaaagagaggaagaagacggaccgccccgggtagtctggcgccaggcgtccctcgcccagcgcgaccacctcccggccggtggcagattccggcatgaatcggcgcggcagcccggcctgcctctcgctcacgatgcgggaaggcggcagcacgctaccatcgagcggtgcggagccccgtgccatgacgccggcggaggaggagcttgagagcgagcgagtgcggcaagggtagggcacaggaaacgaagagttagagcacaggtggcgaaggcaaggggaagagtggcgagaggaaggaaacgaatcccttcctcggcgtctttattcccttgccaacgctatgcccggctcctcgcttcccgcgcccactatctcgccccctcgtttctcgcgcccacgcctccactaatcccactcgcccgtttgcggcgcacgcggcagatgtgcggccgtggcggttgagatgggacagatcgtgcgcgcattaactacgtttgccaaccgagaagagcgccatcatcatgtctccaggcgaaacgaaccggctcgtcccgattcgcgcgctgctcgagtaatgtagcggtcttgaagagaccgctcattattgtcggtcggttttcccttgccgatgcacgcgatttgcgaccgctgggtttctgcccgcctgtagagaccggccccacctgtcaccaggcctaaggagtggcgtcacgcccgagcgcttccctcgaggggggcgatcgccctggcgtaacgccgggggctactgtcggtgacatgggaccgggggtatcatgactagaggcttgggcagccgcggtcacccacgtggcctgacccccttgggggggtcgggcccaagggtgacgtggccaccccacactctgtctccccgaggggtcgggccgctcccgtttcggccccgagggctggggcgccccgactccccgtggtattggcgccacgtgtgtgggttaggtgagcacagcggcgctcacctaaccgcatttatagcggattgaatgagcgcgtcacgccgcatttaatgcggcgcagcgcacgtttatccggtccgtgaccagtcgcggtgtgtgaccggtcacagaccggtcagatcgcgggttaggtggcaacaggcggcctgtcacacgcctcgccccgtcccgtcggaatgatgagagcttcctggctctcgtccctagccggagccggcgtgctaactcctggagttggtatgtcagtcccggtcagattcattccagggttcagcgcaagtatggcaaggaagtcgccggccattaaatgaagtttgaaatgggcgtcctccggaaaagctgacgagcggggcaggagacgtgcgctctgcttgtcaaagatcacttccggctgtagactagccctcattgtaaaaagcatgtttcctttcttaggcagctagaggcccatgtggtgacccctgaccagataaaaaggaggcccaggcctaagggagaaggggggaggacgggggggggggctaaagcggaaactctgtctggctctccggcactctgtattccttcacacacagatccaccagaacacaggagtagggtgttacgcttctcagcggcccgaacctgtctacgtcgcccgtgtcttgtgcgcttcctctctcgcggacgttcctcagatcgagggcgaagaacctcacttagcgcccccggccgaaccggcaaaggggggcctgtgcggtctcccggtgaggagccccacgctccgtcacacatgtaagtgagatgaaaaaatatcgggcccacatatcttattttttcctttttttctcttcttctcttttgctttttttgtctttgccaaaaaaggggagtggcgacgtcggcgggcgagccggaggcaggcgaagcggcggctccgggcgcggaaagagcagaggggcaggggacgcggcgggcgagtggaaaaggagtgccagagccgccgctcgcccgctgccgctgcactcgcccgttgagatcatcaagctctgctccgagttcctcaacgctgacaccgacacgacgtccaccacgttgtggtggatcatggccaagctggtcaagaacccgtccatccagtcaaatatccacgacaagatcacggcgaagaccggtgacgaaaaggtcgaggtctccgaggagaacgtccacggtatgccgtacctgagggcagtggtcctggagggtctccggaagcacccaccggggcacttcgtgctgccgcagaaggcaatggaggacatggaggttggcggctacctcatccccaagggcgcaacggtgaacttcatggtggccgagatcagcagggatgagcaggagtgggcgaagccaatggagttcatcccgaagcggttcctccctgatggcgacagcgagggagtggacgtgacgggcagcaaggggatccgcatgatgccgttcggcgtcaagcggaggatctgcgtggggctcaacttcgccatgcaccacctggagtacttcgtggccaacatggtgagggagttcaagtagaaggaggtcgccggcgacgaggtggagttcgtcgagaagcaggagtagcggtgggcgagcagagcgtggtgggcctgaagaagagaatagaggaaagagaagagaaggagaagaaaaaagaagaaaaaaaatgtgcagctgacatgtgggccctatgtacttttttttctgactaggatgccacgtcagctaaaccacgcatatatactggcataggaccttgtgtgcatggtttgtgtgagtttagggtacacagtgatagggctggatgtcgagctggctcggctcggctcggtctggctcgttaggataacgagctagctcggctcggctcgttatcctaacgagctagaaaccaagctcggctcggctcgtcagcaagctcgagctagctcgtttagctcgtgagctttggggacgagagaaagcgaacaaggggagaagccgaggaggggcaccgggaggagccgaggaggggcgcccagaggagcggcgcgggcggcggcgtccacgaccggccgcgtcagcgccgggaggagcggcacaggcgacggcatccacggcggcgtcagcgccggggaggagcggcgcggccggcggcatccatggccagccgcgtcggcgctggggaggagaggcgccggccgcggtgtcggccccgggaggaacggcgcgggcggcggcgtccacggctggccgtgtcggcgccggggaggagaggcacgggcggtggcatcggcaccggggaggagcggcagcgttgagggctggcgcctggcggcggcttgggtggggattggggatggggacaagccagaaggggattcactcactagggttttgagaaggggatgggctgttgggctgggctgggcgcctgagcctcatttgctctggctcattaaggctcgcgagccagctcaagctctctaacgagctgaaatgccagctcggctcgttaggaaattcaaatgagccaagtcgagcctatcacgagccgagctaggtaacgagcgacaagctttctgtccacccctcaaaacatctggtaaggcctttggtggttttgtggttaaagaacctcaaaacatctcaccattaaggaaaattgaggggccttcggtgaatttattcctttaatttatgtagcataaatatattcagcccaccaaacatttggtaaggcctcatttagagcctcaataatttgagttgagaaatgttttgagcttgatggtgaaggaaactgatttgagttccagtggctaagaacgcacctgaatctaaatgcatgacctagcttggatcaaatgactagacagcaataagttcatagcctttactacagaaagcagaagagatcgagaagataaacaaaagtgataagaaaaataaaaggttcaaactctagctacgcttgagtgggaacctggaatatgttaggccctatcatcgtcttgggtttaaacattaaacccctcgatcagagtaattaacaaagatgtcaaggacaaagaaagggtataattaaagaaattaatgtaaaggcaagcatcttttagggcatgcaactatgcaagtagaagagaaactcctcaggtttattagaagaacctggaaaaaaatgctcatagcctaaacactctcttgtcccggtgctgctttattaaaaattttcttttgaaaacatatataggtgtactttattcccaattacaaggcaatttgcaatgcacatgcatgcatacgttggctagctctctgggttgataaggaagaatgcacattattgatattaatttattaatttggttgtcatggcaacatttctcttccaatgttgaaattaatctgtaataatattaaatgatactccctccgtcccaaaataagcgcagccatgagtttctgtgtccaactttgatcatccgtcttatttaatttttttaaaaaaaagctaaaaacataagtcatgcataactaatcataaaaaaaattcaattaagacggacgatcaaagttggacacgaaaactcatgaatggacttattttgggacggaggtaataaattatcactgaagtacttgatcacaaccattagtttgtcaagtaaaattaccattccttttgcctatgaaaccgtttaaattttagttcagtttttctaaaccaggattttggagcatgcgtcttacttaggattattgactcgattcatatattttcctagcactaatgttcctatagggtggctcttgcgtgttactcttaacatttaattgattgatgtatcaaacaatttgttgttctttatttatttttcttacagttttaagtttataatcaatatatatccaaatatttatatttttaatatatctcaattcatgtccatttgtttccaccttattcgactcatgtttaacttaattctttaattaaagagattatactaatttagttaatgtggtttttcaagtgttgttaaaagtgtttctaaattcccgttgcagcgtgtaggcatccataagtttgtagagaaaacggataaccatgtccatccatgtgattttcattaattatgctatctatcaactaatctttttctaactgttgatggagatatatttcaacaggcggtgacacaggtggctagcagagaagaggagggaagtgttttggtaaatatcataaaaaatctaggaaaatgttctatctgcaagaggaaaattattttggccaggattggtctctactagtgctaggccggctgagtgtaagatggggtggttgtttttgctgatggaggaaaatatctcctatatccttttatccttcacatttgttgagaaaatggataagatccatgtatgagagtttcattatctctatcaactaattcttcttctttattgtagatagagatatatttcagcccgcaacgatatcacaattggtgtaactttatcagccgcgtaatttagagaatatatggcttttctccgtataaaaaaaagaagtgttttacacttctggtctctgcacaacgtgcacacaaaccaatgaggaatatatagctaacactacatcgatccgtcgtccacaggcatttgctctcgcctaacaacggctctagctagacctctgaacaagtgatcattatcatcataagattctgcctaaaagctagttattatatataagcattgtggttacagcatgcaagcattacatgcacgatatgatggcactacacgatcgagagagagagagagagattatatatgcagtttggcgtccagaacaaaccaaacactgcaactctagctttctcaaaaagacagtgaaagttctactagctagctaggatcgatattatgcatccaatttgcactttgaaatgggaatttaatgccacctttttgactggtcctacctgattaggtagtactaattaatcttttatgttagttgcattgaccttggcgaaataatgcatgttaaaaggaggaaggtaccatttgaactgtgaaactttgggctagttagggtggttagctaggcaccgaatatggtaaagatgaagagagctatatgaaagatatttctctctctctctctctcaaaagcttgaacatttcgtttcttcaatgtaattaagctatagtcatcgtttcatcgagcagaggtttaagctgataggtaaaaacggggaaattttcttcggattggtatgcattgctttacatttagacgactagactgtacatttatgtcttttataaaattatatatatatacaaaagatttgcatattattgtgttaatataagctaaactgtagttaacgagtggatttaagttgtaaaggtgaacatatttctatttgtttattacaactgtataaacaagttgtacacattgcttttattagttgtagacacaactagacatatgaacgtgaaaaaccctggaaaattaccccattaagagacttactagctagaggccatatacagtacgcctgcatgtttgcaaatcaagcagctggtttttttttgcaagtagtgagtgatcgcctgcatatatagctagaccaaatcttgatgaatgttaattatatataaaaaaaattggccttgaaatgaccgaacgtattagtgactctgagatgccggcttatcgccataaacttttcttatctgaacagttgctccgtatctgaattcagaaaaggaaattatttcctcaagttaaaatgcttatagacagcttcatgtgaaacgaaaccaaaataccatttcgccaccattattaccttaatatattcatgacatttcatatccaagatatccaatgcgtgcatcacgctatgcctatactacatcactactgtcattgtctgtactagcgccctgttcattcagatcaggcttgcaggattcagagctgagtgcagacagctttggtgaccaatagaactctcattgttacatttcgaaagaaaaaccatggaaacttttcatataagtttatatttatcaggaaatatattaaacattcaatcatgatagcaggaagaatgaaataagtacagatataaaattttaagaaaaatcctatttctaaattctaactctctcattgtgtacttgttggccacagcaaaaaaaataataattatatacataatttagagttgattttaagatcttttcatcaaattctattttctatcatcaaacctgtagcaatagaaatataaaagtttaagtgaatttaaaaaactgcatatagatatttttcacaaaactacagatttaaggtgttatatcacaaaattacaaattgaacattaaatttatcataaaactatagatttaaggtgagataaagcaaaattacagatataatagtgaagttatcacataactacacatttagagtttaaatctttagcactactattatgttggagttatatatattatagttttgtgattaaattggcgctaaacatgtagttttgtaataattttaccagtatatctatatttttgcgatactcaatcttaattccattttttcataataagtttactactaaatctattgtttcatgattttttttagataaggaaaatgatttatatccccgacctctgccaacaagttgcatgcggccaatgactcagaaaagataaataaatacttgaggttatgagacaaacccacatctctctcctaattatatctagctgaaaaaccgaaaatagaacatataaaatctataacgatattctataaaaactacaacatccaaagtggaacaacagacatctagctatcgacttcaagagtgtgtagctacactgcacacagtatcatgctccttctgtgaaagcatccagaacaaaaatggagtcaactggaaggaagacatgaagataacctgtaatggttagaaaattttttatcattgaatagtatatcattgcgataatgccaaattaaccaatataagacacttccaaacaaattagtttttttagtggatctaggcactccctttagacaattactaaaaatatttttttagcatatcactatatcagggaggagggattttgaaaggaaaaaatatatatcgctaagcacactttacaatatggcaataaaaaaaatatgctgtataggaactttggactttgggcatttggatggtttgtacgaaacaaattaaacgacagaaggttggtgaaaataatttaatggacgagagatactagagagagaaaggggaagagagagtgcatgcgacttctcaaaacatgagataagacctcatgtttgttttcatttagaattgggacatacgtaggaagcaagttatttttcttaatcatatactccctcattccttaaatgtttgacgccattgacttttttaaatatgtttgaccgttcgtcttattcaaaaattcttgtgaaatgtctaaaactatatgtatacataaaagtatatttaacaataaatcaaatgataggaaaagaattaataattacttaaattttttgaataagatgaatggtcaaacatttttaaaaaaatcaacggcgtcaagcattttagaatggatggagtatattccttcgttccaaaggagttaatatataagaaaattttcctaaggattaatgaaatcgtttcaaattaatttcctctgaaattccttccacccagaagtctgaagaagctaggaactttgctgatcgagtttcacacgcgccgttgtcttccgaagaatctacctgaaccccagcatcaccaccaccaccaccaccacccctgcgcgcggcgcgcaacgtgcacaacacgcggtacgcacgttctctgcagcaatctccaccgtcagatcacggcgcggccgcggttcgagcgaatcccggccgtccgtgatctccttggggggttgccatccctcccctataaattggagagggccaagccatttacccttcaaaattaagcagagctagcttcctctacctgacaagtgtgttccaagtgatcactaccagctacttgacaagtgtatttaagtagctaattaagcaagcagctgtactgagtacacaatgggaggaaacctgtcttgcttcgggtcggcggcggctggttcaggttacggggacatcgccgacgaccagccggcggcggcggcggcgtacgagctgcgacggtcgtcgaggaaggtgcggccgagcgacgaggacaggctgtggtacgtcggcgagcgggacgtcgacaggaaggcggcggagttcatcgccaagttccatgcctcggctaggttcgtggaggcttgaattgagcctaatttgatgacatcttcagatatcttggttcttggatctatacctgggtcactctctctagctagctgctgctcatgctggtgatctgcttggttcgtttagtttacttctcttcttgtataattaactgtgttaattagctagtcctatgcatatatagatatatgtatgtgtatatcaatgtatgtacttaatcggtgtaattaaggacgtgtaaatctgtattattattattctgctaaataagagcaatgctgcacaagctgctgttgtatgtaagtacatgtttcttgcaacgagttggtctctgaaatctgaagtgaaatgcaatgtttattgcttgatgggatttgagaggatgcagtgaattaataattacttgcattaggagaacagaagttccagtaaggattaattatttatcagtactaagtagtgaactctacaaagatgttgtggctggtcaggtaattaacacaaaacttatttggcacgcagtttatatgtgaattaagtgctgattcagactggcatcctctcgctagccatatcaggaatgctgattttttgctttccaattttccaattttgaccaagaaaatatttatgtaactagccttgcccttcatacaaatgcttatagactatgttacccacttacctggctacccttcacgactaaattaacaatgcaattccggtagttttactagctagctgattcgattaattcctttgaaaactagcaaattaacaatatataatgatatacttgaagcctcgatcggtaagctcatcatcaagactagcttatctgtaacggattacaacattatgttcagcttaattaaagtcagagaaaaaggaaattccacagtggatctcctcaattttacccttctgctattttcactcatagcactttaccaagtcgaggtagagtttccaacatttacagaaaaacgatggatgttttctttggctaaatacttgtcaaagagatgacaatttaaggacttactgattaaaagttatgcaaacctcagcctttgcatccaagcattactattgatgccttgattagttcatcttcttcagatatttagaaggagatctgctatagattgacagtaaaatgtgatggtgaacgttaataaagttaatgcgaaataattgaggaatcacattattattggagtaacagttttgattgaacacttagcactatttagtagctgatatatgtttacttccaattatacatccatgattgagtaatattaacccttgcaagaattgtgatgatattcgatcgcatctcattttcaaaaaataaaaaaaaaacatttatgttgtttcagtacttaatttcttgcctctaactgaatttctgctgcaactaattttcttacaacatttatgaagttaatttgttttaaaagacatgatattactgaaaattgttatatttatgtaagttgaaaaggtttgacatatggatacaaaagattcaagcttatcttgggaaaagatgatcaaatgctcggctcgctggacgatacttatctaaacagtctcttggatgcaaatattgcatagtaaaacaaaaaatcaattgcctactatttcgtcagtacaatggagttttggtgccataaaaattaccaggattttgtaccaacagatagtaccaaatatatttttgccgtatggtcttttcagtgcaatgaacatattctacagctacatatcaccaaccattttaaggacctaaccaaaaaataaaaacatttaaaaacaaaacatgaaaggcgcgacaatctttcccgacaaaagcttttatcataaacatatttgtcgcattacttgtccccgtttcatgtacggtgggatctcataggccagaaccatgttccagcctagcaatgtaaccatgttcctgcctagcaatctgctgtcacactaaatcattaatcaactgtcacttgatgctttcattcatgacatttcctccaaaccatcactgatcagcattctaattctatttttaaaaatcagtgtgatgtgttgcctgtcaatctgttaattaacttttacatatatctgttcagtcaatttttttcacttgcaacacatctcttccatatgaatatatttcaccgaaaacttcaaaattcaggttagtactagtaagctgtttttcatacggaatgttattaattgcagtaaaaaaaaacgcattcgacaaggatcatcagcaacttaagctcccaagaacctgtgatacacactttccccggcaaaattaagattcgatccaacttagagggatcacttgaatttgtctctgaactctcatcctttctttcccttaacgtccgaaaattccccttctcaagccatcatcaatactttagggctggggtatcaaatcctcccatggcaagtgttgctttaggtagataagaagaaggagccaatgatttgtgacaagtcactggaccttgtgtgttggaaaattatcagaaaagatcgttgctttgtaccaatggcaccggatcatcgtcctcggaattgcgctttacatataccgtttacattacattcttcagtggagttgcaattacccaattactatatctttgacctgtcaatctctgcatgtttgagaggacagggctggtgaatctgaatattctcaagaaatggtggagatatcgttttgagaaagcggaaattcctttggcatataccgcgctttcgcttttctactgtaccaaactctgagattgtccgcgagatttcctgttcatgttcatctgcaaataatagcctgtgtatgtgcttgccactgttgcatgatttggacatcatgatcaaatcaatagacaccgccatatgtgccacaaaattgcctatttgtgtcacccttgttcatggattttcagaagctgaatggttgcttgtagaagtatctatgacacttcctggatttcaaattatcaccaaatttcaaacttggcaagggacatttttttcaggacatagcgtcaaataggctcagaaacagtcttttattctttttctcatttttccccttgttgataggaacaaaaacgtgcaaaattatgtcatttctttgggcagcattggacggaggagagcaatcttcacatggtgttgcacagctgtgagcacatgatgtgtgaaaaggctatcaaagaaggccttttttttcagtactttggaagtaccagttactatggaaaaagtacatccatagtccaccaggtttctggaagaaaaaaaaacaaattttgataaatgaatgctagcctaacttgttaggactttctagttataaactattttttacaatgagattgaacctttgtacctaataaaggtttcccttttatgttttcaaatgatcctttaagcatcctgaagctaataaattatggattcttgattttgacatcataggtattggtattatatgtattggttcagtgaaccaaacatgagattctaattcagatagctccttgatggggcaatatgcattaaatcttacataaatacactatcattagacaagtgacaagaacctggctatagccaagatttgcattggtccttttttgccaagctgtatcccatggaatctgaaaaagaaaagagggagttcttctttggggcaattaccagcagattgctcagtatgcatatgtcagaattcagagattgttctcatctataaagtgccgcaaaattcattccaccatgacaaatatagatcgcagatcgagcttgcgttcgatgatgagaacaagttgcactttgaagccacacctgataattttgctttcaatcaggagaaaaggctgcccaaagcatcgattctctgctatgcaacaagcgcatgtagcatgtgcgtagctctcttatcttctctgaacctctagctgaattatgaacagattttagtatcatacacactgatatgttggcagaagcagaactgcagaaggttggtacgggacaagtaaagagatcagtactacgtatttcagtacatgatacgtctactggcgtaccaacattcaacaaaaccattgttcagacttatctaactgggctaccgatatatacagctggttttcagtgatatgttctaccacatattttcaaacctacaactgggattggcattgctaggcaaagtagtgggactattttttcgcgttcttcattttttgtgctagcaatgcacaataacaacatgccagaccgttgtttcaatggcgttgaaggtgaggcgatcaccttcttttacctcattttccaggcaaaattttctccaacctggtccatttatgtagccataggtgttcgctgttttgaaagccactcgccaagatccttttttcttcatggatatcttcagtgtgatcgcacaggcttctagcagaccaatttgagagcaaaaggtgcctctcacagactgcaatgttaaagcaatataaagaaataaaatagtagtgagatgtttcattatttttgaaaaaataaacgttcacaaaaatcagaaggattgttattgtcaacacactgtagattaagaatatgtatggcatttctgtattgccttccctaacaaaaaaaatatattgagaaacacaaaagaaattttcattttcatatcagaatcaataacaagtactacaaaatggtcaaaataaacagccaaggacttcttgtcaggaaattctcgacatttaactgatggtatttaaccaaaattctcatgataaactacatttttagttgatatcatgttgtagtgtcctttttctctatgtgtatgacaattttacaattacagatttggttctttaaagcaaaaaaaatcatccatatttagacctaacagatagtttcagaaattgaagaaacaaaagtcagtgattttccatgttgataatttctatatttttttccttaagctcgtattaaaccaaaaaaatcatccatatttagacctgaacagatagttttcagaaatagaagaaacaaaatgtcagtgatctttcatgttgattaatttcatttttttgttcttaagctcataagcagttaagctagataaaaacagcagaagctgaagcgctcacaagtaggctatgaatactataggccgtcatttcctttgtgaatgaattctgtgacacaatgctgacatgtttcttatgtggttcaaccttcacggaaattggggaagccctagatttcctgtttggtccctctaagcatgtaccctcaattcttcgcgtccttttccgcttgacaggtgaaactccaacttttgctgcacctgcataattacattttgaaaagaaacacggaaaatccatagttgaaactacaacggagctggaatgctactggcttactttgttgaggcgcattgctcggtccttcggtaccatcagttaagtacagcgctgccgttttgtactccttcaggcagccgttctgtaggaacacctcaaccgtgaacaccatgttaccttcataccggaacagcaggatgttgccttcggagagatcatgagcagccagaaatggcgcccagccgtctcgcagtagcacgtccggttgctcccgttgtagttcgactcgccagaacttgccaagagggcaaacaataatggcattctggtggttgtttgtgtaggtttcagtcaggtgttgctgcacaaacttctcagggattttctgaaagaatgttgacagcaaaagaaagagcatgctgtgagcacataatacatataactgcatcaccttcagagctaatagcctatcaattccacaaatacatagtactactagcactagcttattagctgaaggcggttttcccctgttcttttcatctcattcatcgaactattgaaacggggttatttgctccactcttcgaaaaatacgttaccacttgttttaagttatttgtttaagtttatttcttaaagcatttaacttatccccataatccaatcgatcgataatccgcttaacaatctaaatcaaacaaggccagagtgcattatcataagaagaagagaagcaggtaatcaaccagaagagcagaacttgggcggaagttgcaagggttatgacgggtgaagcggagctgtggcggctagctagagctgcaatccctgttttggtagctcatgttagtggagaagggtcgcaaaatttagttggagatt

SEQ ID NO: 15218 - DNA, 807 bp, Oryza sativa
acaaatcggagggggcaaaaaggttaacaacttcatcccccaatgttttttttgtcatattacatttggagctatgttttgcacaattttttgtctctaaaatttagttgtagttgatgagagagaaaatttgtgtggggaagaaagaatatatagaaatttagtttatttgctaaagaaggttttataaaatagttgagaaggaaaatatagtgaaagttaatcttaaataatagaaaacaagctaaaatgaaaattaaaagaagtacaacacattaatattagtttaaactttagaaatagtaaataagaattatttggtgtaatattttataatttttgtatgaataatgatatgtcattattgtatgactgttgaaagagtttgttattattttataattattgtatgactgtcattattgtacgaataattatttgtgtacgattttttccatctcatgtagatggatcggcaatggatgtacgctgaccggtggtccaaagagtttattgacggcgtgcattattttttgagagtggccgaagctaacaggcataagggttttatttgttgtccatgcaataagtgtaagaatcagaaggagtattctgcatctaggactattcatttccacttgtttgagtcggggttcatgctaagctataactgttggacatcccacggagagtaaggggttgaaatgcaagaagatgaagtggaagtcgacaatattcaggatattggtcagtacgctggatttgaaggaaatcaaacgggcgaggaggaaagggatgctgatggta

SEQ ID NO: 15219 - DNA, 3379 bp, Oryza sativa
aaagaataacgacttacacaaacttgtaccttgtttcaaaagtttatattttcatttcttagagtacagtttgagtctgagtcggtggaaactcgggcacatcttctaaagaacccagaagtacatctttctcattgtcagcagtaagtctaaaaggttagtcgatgcttctttcaagtggcataggaaagtgcatactgggtaacattttctagatatttttccaattccttttctccactctcaagagtctcccaaagtgatttcctcaattcctcgtttccttgactttttgtaacaaggtcataagcatagcgcataacatggctgcagtatgcagcttcatcatccatacattcttgataggatgattcatattgctttggattaaaaacacacttcttagcacctttggtccacctcttcagtatataggtttctggaatactgcacacattcttgatgctaagagctttaagagcatgtggacaaagcaaacccattgtttcaaacttactacagctgcaattgagttgcattgtcatcatatcaaaatgaactgtgcagactcttgatcctcgcccttgcattgtcatctcaaattgatatctgttattgtcttcgcaatgaagctccttgaattttgtggctccacatccatcaagaaaatacgtctcaaacaacttgtagattctgtatgtataaacttttgctgcatgattcaaaatatcactgtgctttataatacaagcaggaggcttttggctgcaccgcgtgtcttcatcgatctctttttcacgccaatcttcagtcaacttgttcacaacaacaacaattgtagacggagaggtaaatttctcggcaatgcagttaaagatgttactcagactgtcacattgtggctcatattcaaccccaccatcaaaagtgtgtttgttgagagcaccacaccacttctgcttgagtttataaagtttcttaagccatttgttatcctccaacttaaactctctgagcatcccagcccatgtttcctcaaactcagcttctgagtcacatccctgcatacacttggtgaacagcttattaaatgctttggaaccattaagtgtaccaagacgagaagcagcattcttttgtatgtgccagcgagagatgcgatggcatgtatttggaaatacttcctcaattgcctttgacataacttgatcttgattggtaaaaatagagcgaggatgccgattgcccattgcctccaagaaagatttaaatagccacacaaaagatgacatagactcgtcagctaatagagcacagccatacatggtgttctgccaatggtggttcacaccaacaaacggagcacatatcaaattatgtttgtttaagcgataagttgcatcaaacacaacaacatcaccaaaacagtcaaagtcaatcctgctcctgccatcacgccagaaaaaattagtcatccgaccgcctcggtctatttgaacatcccaatagaacataccatcttcatttgccctgctcttaaggtgtcttacaaggttctgcaaatctgcattccctatggcaagtgtccttgccatactaatgtagcatgagagtgaatcttgctttgacgtctctacagaacttgacctccctgctataagtgatcttgcagaccgtaaaagatgtcgttcttcaggtcttgccaagttgtggttgtgatcagagaccagccggataaccttccactccccgtggttattcactctgaagcgaaccatggccttgcaattcgtcctagtatgtgggtcattgaagtttgcatcagtaagcctctccccttccttcaggccctccttggagcagaagtaatccttggtcctgatccttttcgtgccagtaaagtaggactgcttcccctttcggatactgaaccccatgcggtgcccatagtcacagtacagcttgtacgccgcctcctcgctgtacactaccttgcggagtagttcctcggtgccctccttgctgccatgaaccgttgctgcctcttcagtctcggcttcatcaccatacgccctcatccccatttcatcaccagagttagtaaccgccccttgtccttccatgaccctgtcgccaccagcatcgtcatgctgcgacccaattccttgatctacaccaacgcccgtctcaactgcgacgatagcattatcgtcaacacacatcggatctccacccccgccttcacagccaccttcaccgtcagtgttcaccatcactgcaaaaccccgagataattgggatcaatgtgtcaaagccacatcataaggcaagtgtaacaacgacacacctatcatcattcctatatatcaaccgaaaaaatcccaaaccctcacatagatagaaataaaataaagaaatgcagcaccttcctaacggacatagtggcggatctaacataggacatggggggttcagtttttgggaaaccatcaaactgttagtagtattaaggttaaggcaaaatttctagaacagaagttagggttaacgcaaattcgagaaaacaaaagtgcgtgggtagagagagagatgggagcgtaagcgtaacggatgcggcggaagcagtgggacgagcgacggcgaccctgctcgctcgctcgctggctggtgcgacggatggggatcggcgcaggcggcggtggcggaggacgtgctcaccaggatggatgcggcggaagcagctggacgaacgacggcgccccctgctcgctcggcgggatggatggggatcgccggagccggagccggaggcggcagcggtgggcaagggcaaactgacgaggaggcctctgtcaggattactccactcacgctgtcacgcaagcacgacagaggcgtcgaaatggcgagggtaacgtagtaatttcgcctagcactcaatccacccggattgcttgcacaccccaccaccactctacccaaacggtgaaaatatgaaaaataaaaataacggaattgctaaacttcaatcgacagaaaacctacctccaaatcttgcaaattttgcttcactagatatgcttcacgattcgtgctccagctgcttcttatccaactccgacgaactcctcttcttgtctggtgccggcgacaacccaatctccgacgaattagggtcctggggtgagatggggtgggagggggaggggaagaaaggggagttcgccgggcttagagggatggtcgtgggaggcggcggcccggcggtgggcggcagaacgggtgggcggcgagcgtcggcgccggtggcggagccgtcgggatcgaggagggtggtggccggtgttggtggcggggggcatagcgagcttgtatcttg

SEQ ID NO: 15220 - DNA, 867 bp, Oryza sativa
gcaaaaccctggttagagttcgtcttgagcgaaatcaacttgaaggagatatctccgagatgggccttcatccaaaccttgtctatattgacatgagctcaaataaactatatggacaattatctcatcgctggggtgagtgcgccaaacttaccactctacgtgcatcaaataatcgtattactggagtcataccatcgagcatggggaaattgtctcagttagggagacttgatgtttcatcgaatgaaattgaaggacacattccaccagaaattggtaacgtagtgtctctattcaatttgagccttgcaaacaacatgctccagggaaccataccaaaggaagtaggttctctacaaaatttggagtatttagacttgtcatcaaacaacctaagtggacagatacatggatcgattgagaactgtttgaaacttagattactaaggctaggccataatcgcctcgatggaagcattcctgttaaactagggatgttggtaagcctccaagaattgttggatctaagtgacaattcattttctgggatcataccaagtcagctgggtgctttgagcatgctcgaagctctgaatctttcacacaacacactgaacggcagcataccatcatcatttcagggtatgatcagtctctcatccctggatgtatcatataataatttggaagggccagtgccacatattaacttcttggaagaagctccgattgagtggttcatgcacaataaaaagttgtgtggtacagtcaaagctttacccccttgcgaccttaatcagaaaggtggccagggaaagaaattcaaatccattttacttggtatagttggtgctgctggcatgt

SEQ ID NO: 15221 - DNA, 5659 bp, Oryza sativa
gggggagggggagtgggaggagcccggcccgggggggtgggcctcgtcggcgccgttcacaccttccggccagctggcgaggccggacagcggcacgctggggcggcggtggaggcggcgcgctcgcgctagggagagtggcgatgtgaggaggaatcgggagatgaggtgatgttttagggtttggttgcctgcacgaatcttaaagcaatcggatggtctaaaatttgcaagatttctaagggggttttctatcaaatgatctatagacagtcccaaaaaaaaaaaaaagagtgtccatcagtcctaatcccaaattttcaaatgaagcctctggagtcttgactggctcttatgaggcgtggctttttattttaatttttatagggttgatatgataggtaaatataataggtacggttggatactgctcgattaggcatggctcatcaaacagaccgtgccctgttggcctacatgctttaggttggagctcaggcatgacctagtgagatgttgagttatgtcatttggcctgacacgatgtcacaccctgaaaattcaaaatatataaattgttgtttaaatggaattttttagaatttattttttaaaagtcttgaagagaagatctaattttaattaataaattccaatataaaatggggccagataaaatttcattaaatactttgcttaattctataattcctagatttttctgggatttatttgagctaaggaagtatttttaaaaaatggaattgcatttaagaaataatttaaattgaaaaaggttttaaaagtcttcttttggctttgggccgaaagtcggcccaaaacctctcttctctctctcctcggcccagccggcccagtccgccgcgcgcgcgcgtccgcccgctgacaggtggggcccgcctgtcaggtcgtcgtcttcctcgcgtcggccgccgcccggaaccctagcgcgccgccgccgccgttcccttccaaatccggccgctcctttccttctccggccgaattgatagaggggaaatgatcctcgggatctcctctaccttttctcctttggaaacatcggctaaatcggtttggaatgtgtttgattcgagttcgaatcagatcggtctctttccttcaaaccccgatctttccttctcgtcgccggccgccgtgggccttcgccgccgcctcctagcccctttaaaaggctccccggtgtctcctctacccgccgccaccctcgccttcgcctctcgtcgtcggaagcgccctagcgccgtgtgccctagcgccgccgtcgccgccgtcgctccagccgtgcgccgccgccgttccagtcgtcgccgtcgctcgggaaggtcgtcatcgtggtcgccaagtcgccgccgtcctcgtccgccgcttcgccaccgtcggagaccgccggagcatcgtcgccgtcgtcaagccgaagaccgccgccgtttcaacctcgtcgccgtcgccgtccgttggtcttccgccgtcgctttggtcgccggtgagttcgccgcgtcgcgctctacccgttggtgccctccgttcgtgccgaagcgccgccgttcgccggcgagcatgcgcgcccgagccgccgagccgccgccgccggtggtgacgtcaccgctgacgtcatcgggaccgtccgccgtgagccggtcgtggaccaatcgatctcggccgtccgttttggatcaagtcgatctcggccgtccgttcgcgtgaaccgccgccgtgcgcccggtccaccgcaaaccctagcccgctgacgcaataaatccctttttccttttcaaaaataattcattattgcgtcataattcaattaaaatcaatttaagtgttttaatccgatttaatcttcaaaaattcataactaattcatcttagctccgatttagttggttcaagtctctaaatttttctaaaattgagatctacatgttaaaaatatccacatgtactgttcatgcttgtttatgtgcttttgctcttttctgcttagattccgtcgtttccggagagtccgttttcgccggagaagagtttgaagagttccaaggccagcaaggcaagtcacacagatcccaaacaactctttgagcatgttgatcccgtttaaagctattgtttcttttcaactattgcatttattttcgaatgtcattgggtggaattaacctattgtttgttatggcccttttgttcttgattaccttattccttgataccttgggttattataacttgactggttgagctctatatattggttcaactagatattagatataattgcttagccctgcttagaaacattagcacactattgggataacttatgactcactattatttaatgatggcttaatgatagttcacgatggtcaatcgtgattagttaattaattcatgtgccaactaaaacctggtaatggtgggttgtgagcacatggttttgatggtcgtgctcatgacaattaaggaccggttcacgagtttcggttgtgaaacattaaccgtgccaaccacaagccagcatgggcaacggctttatcttttgtatagcatggttcattgcggggcaccagactgagaagtggcggagataagcccacgggggtcgctggggagtccatgccttgtttataagggggtgattatgatccaggaaggtgcgctgcagtggattgtgttatgcaaggggtattgtcacaactcctttccgaggtaccgtggtggtattgaggcacatggtgacatgatgtggggttgtgtcttgtgggtacagtagtacacctctgatcagagtaaaactattcgaatagccgtgcccgcggttatgggcgggtctaacaatgtctttcgtgattagtctcacacttctcaccatagtaaatgatgctataattggtaataatttgtttagctcctggtttggaatggtacattcctggtttggagatagaactgtgcagccgggatggttgttcagaatggttgggcctatacaacagggtatgttgtatagcgttggattaatattgtttaatacttaactgttttactaaattctcaaatgtttgctaaatgctgcttttgcgaatgcaaccctactatgccatcctttgttatcctgtgcacttgcatatttgctgcgtggcttgctgagtatgtcatatactcaccttgcaatcattcatcagaggaagagttctacagtgaagctgatggtgtggaggattaggtgtagccttggtcaagctgcctgtggagtggagccgtctgcgccgtttatcttattttccgctgcttagatctttattgtttgagaggaactatctacctctgtaatgacattttattcgcttattaattagagtaataattgtactctattatcaatttgttattgtgtgcctcggctgattcctggacgagggtttacacacatgtaagcgtttggaattttggatagaaattccgggcgtgacacacgattaggttacgttggctacgtggaggttggttagcccaaatttgatatataccaagaaaaaaatgtgaacatagtctgttgcatcctgctgcacaaacttcgatgaagctttagcgaggctctccgctcaccgatagcacattcctcttcctcatcaagaaccaccatggcccttcacttcctacttccttcgtcccgagccggtgagctcccaattgctgacatgcttagtggttgtgctcgtgaatagggttggccacaccacaatgctactatgcaggcctacgccaatgagcgttcatcattacttcctctttcctgatcccctagcttcctcgattctttagttctcatttccccctatctcctgctcgcgacatgcacttgtcgtgttggcatgctgggccggtaacaacccaagcacaacgtggctagatgggctatgccaacacaacccacagctaaatgaaatgtgttgttcttgggctgtgagttgcacatgcgtgcctgggtggacacagaaagacccaacacatttgacaacatataggaggatttggtaaacgcataaccattcttatgtttctacgtatgagatcaattaagacacctcagtcgcacctaattaatttgattagtgtcaaattaaaggaaaactattctttaaagatgttctcttccattatactccctccatctacttttgattgtcatatttccaaatctgaaaaatttatttttgattggcatatttcaattcaacaacctatcatcttaattactttctcggatttaatgcatgactctccatttttccacacaagattggctacatggatattgagaaatgtaaatattaatgaatcgcttgtttatgagggatgattagtagcatgtttaaatgaatgataagtagaattacttatccttggtctgtgtgtcaagatgaaatatgactattaaaagtagatggagggagtagcgattacgctccaactaacactaaaaaaataacactctttttcccaaaataacatgcaagcacaatataatctagaaaacatatccattttcttcttgtttttattagatcaatttcaactatgtgtccagaggcaaaaaaattatttcaatacgtggaatgaggttaaacagatctcatgcatatatacacatttgtgttgcttatctcgttggtgaaaagaaaaaatattgtctccctaaataaacacttgtcaagaaataaggtttattccacaagctatatacaaccttgctatcttaaccatccaaccattacaaaggcactggagagcctatttggtagtaataatttacggtgttaacatatcacaagataaaaaaaaagaacaggataaaagaaaaggaagacccaaggcaacaacagaaagttaaaagctacaaagacaaactaataacgaaaaggatgcgacatctcatcacccccacaactaccacaaagtacaaacatgcacaaaaacaccctcttgccggcaacagcaaagcttgaactcaacatcttatcagctcttctgcaagtcacagctggcatgggcttgcttcacctgcttggtgtactcgtcctcgctatcgccttcctcgccctcctcctcatccctgtctccctcgtcgtcgtcgggattcttaccgtcctcctgctcttcttcctcggtccaaccgaaaccggccactggagtcgacgatggaggtggtgtctttgcctcttgtacaatcttcatgatctcgtcgacggtctgatccgagaatgtacgggcactgttgtccttcttgtagtacttcgcttgcgccgcttctgtaagctcccgcggcaagttcttcataaaccaagggtggtttctgatctctcttattgttattctctgcatgacatggtggaaatggtattatgttaaatggaacataatggaacatggattgaagttccgcgaggttcacctttgcaggattcgcgacaaagattcgagagaggagttgtctacaatcttgggatatatggacgtactctggtattttgtactgaattgatacgattctctgcaaaataaaaatgtgagcataatatatttgtacattcgtgtggcgtttgaagttgga

SEQ ID NO: 15222 - DNA, 637 bp, Oryza sativa
gctccagagcttaccaggtattgatcggacatgctgcatatactaaaagggagttggggttttttaaatttccaaaaaactgggccccctttttttggggtttgcctcagacctatttaacgcaggaattgagctttacagggagagattagtaagagctctcgcacacgagttgcaggtgccgctgctggtcctggacagcagcgttctagctccatatgtaagatactgcacctttatacctatcaaatatataagagtggctgcgaacttaatgtaactcctaacttgtaggattatggggatgactattcagaaagtgacgaagaggatgaacatgatgagtcagaggacgaggaatctgatattgaatatgaaggtgatgaagattggacaagcaatggtgaggctataaccgatgaaagtgacgatgaggatgctctgaaatccgtggaagagctgaagaagtctgtggatcgcctcagacaattggttccatgtactcttgaggaatttgccaaggttatattctgttagcctatcctacattccaaccataacgagaaataagtttttgtatttctcttctcacaaaatatttcataattttgtctatttttctcggggctgcaggaat

SEQ ID NO: 15223 - DNA, 680 bp, Oryza sativa
tttgtgattagtgattatagcaaaattgttgtaagaaaataaacatgaattgatttgaactaaatcccaagcaattaccactgaagacagggggggaaaaggaaaatgggaagggaatttttggtggggggaaaaaaaacccaaaatcagtcgccggctgtacatgtccacaacagaaataagaactaacaaaaactgttttattggttaaattcaaatgcatagaagtttgcagagcttacaggttccttatccttgtccttgggttctgcttccaatatgttctgcccacatatcattactactggtccagtaagtttgtcaaacatctcctctaccttttggataaactctctgcgatttgattttggaactgctctagatagccactgggaactgtctggaaagtagacaattgctggctgtagagatggcagaacctaaattcataatcatgtaaggcaggtaaaaattattacaggggttggccaacaacaaaatagaaatgttgggggtatgtaacaccaaaattcaatacatcgtttgataaatcacctcgcaaagtgcttcaattgcgatatgccaatcttctgacccagtctcatggtcatgaacaatgtcctgagctaagcacaaggaaacgagatgaagtcaaggcgcctgaaatgggctgcaggaat

SEQ ID NO: 15224 - DNA, 656 bp, Oryza sativa
tcctgcacccctttgagagtttgcgctccgcccgcataaaactaaaccccgataagtgtgtgttcggtgtacctgcgggcaagcttctcgggttcttggtctctgcccgaggcattgaggccaaccccgagaagatacgggctatagagcggatgcgccccccacaaacttagggatgtgcaatgcgtcaccggttgcatggccgccctaagtcggttcatatcgaggctgggagagaaggcgttacccttatttaagcttctcaaacgctccggaccgtttacctggacggaggaagccgaaaatgccctcacccagttgaaggcatgtctaagctctccccagttctggtcgccccggagccagacgagcccttgttactctacttagcggcgaccccgcaagtagttagtgcggcattggttgtggagcgcgatgaggacaattctcatttcacgcctccccaccctgtgccgacttggcccgggagagagcagggaggagaggctcccgagccgaacggtggtccaaaaggggggggggcccccccccccccgtaacccggaaacccccccgggggggcaagtggccctctgccgcttgtcagacggtgctaggagcccccgacccccaggaaggcccctgagggccactgt

SEQ ID NO: 15225 - DNA, 7151 bp, Oryza sativa
cgccttcatggatatcggcaagaagcacaacgccttgttcccgaggaatgcacttcaggaggattccattagccgcgcgccgatagagggtcccttctaccagcacgtagcgtttggagatgcgatggacgcgttcactcccttcgcggtcctcgggtagagtcttatctgtgaggtatgcttggatctcggcgatccaagcaatcaatctaagggagttgggagcactcccctcgggtcccgaggcctggactccgacgggcctcgggggccggtcaggcgcatccgtctcccctaaggggtcgggtcgcgccgacggctgggcaagcctttcttcaaaggcgcccggtggggtctgggctcgcgaggacgcgagccgtgagagttcgtcggcaatcatgttatcccgtctgggcacatgccgaagctcaatcccgtcaaaatggcgctccatacgccgtacttggcgcacgtaggcgtccatctgcgggtcagagcaccggtactccttacagacttggttaacgaccagctgggagtcgcctaacaccaggaggcggcggatccccagtccagctgccactcttagtccggcaaggagtccctcgtattctgccatattattggtcgctcgaaagtcgaggcggaccaagtatctgaggacgtctccgctcggagaggtcaacgtgacccccgcaccggcgccctgaagagacagggagccgtcgaactgcatcacccagtgggtggtgtgaggcagctgcgaggggtccgtgctggcctcggggatcgagacgggctcgggagccggggtccactctgccacaaaatcggcgagggcctggctcttgatagcgtggcgtggttcaaagtgcaaatcgaactcagaaagttcgattgcccatttcaccacccgtcctgtaccctctcgattatgcaagatttgaccgagggggtaagacgtaactactgtgacccgatgcgcctggaaataatggcgcagtttcctcgaggccatcagaatagcgtaaagcatcttctgggcctgagggtatcgggttttggcgtcccggagggcctcactaacaaagtagacgggccgctgcacctttcggtggggccgatcctcttcgctaggggccgcatccctggggcactcttcgtccaagcagcctcgcggggcgcacttgtcttctgtgctgatgacctcggagtcggaggataacaagggccgccttcccacagtggcttcggggccgtcctgggggtcgggggctcctggcgtcgtcggacaagcgggcaaagggccaactccggtcgtcaggggccttaggcctccgttcggctcgggggcctcttctccctgctctttcccgggtcgagtcagcacagggttagcctcggggtcaaagggcgataggtgcggccttcccacagtggcctcagggccttcctgggggtcgggggctcctagcaccgtctgacaagcgggcagagggccaactccggtcgtcgggggccctgggccaccgttcggctcgggagcctctcctccctgctctctcccgggccaagtcggcacagggtggggaggcgtgaaatgagaattgtcctcatcgcgctccacaaccaatgccgcactaactacttgcggggtcgccgctaagtagagtaacaagggctcgtctggctccggggcgaccagaactggggagagcttagacatgccttcaactgggtgagggcattttcggcttcctccgtccaggtaaacggtccggagcgtttgagaagcttaaataagggtaacgccttctctcccagcctcgatatgaaccgacttagggcggccatgcaaccggtgacgcattgcacatccctaagtttgctggggggcgcatccgctctatagcccgtatcttctcggggttggcctcaatgcctcgggcagagaccaagaacccgagaagcttgcccgcaggtacaccgaacacacacttatcggggtttagttttatgcgggcggagcggagactctcaaaagtttccgctagatctgagagtaacgtttcctggttgcgcgtctttacaaccaagtcatcgacataagcctcaacattacgtcctaattggctacccaaagaaattcgagtagtacgttgaaaagtaggacctgcattctttaacccgaagggcattgtcgtataacaataggttcctatgggggtaatgaacgtagttttttcctcatcctccctagccatgcgaatctgatggtaaccagagtatgcatctagaaaacacaaaaggtcgcaccccgcagtggagtcgacaatctgatctatgcgaggcagggggtaaggatccttaggacatgccttgttaaggtcggtgtagtcgatgcacatccgaagcttgccgttcgccttgggaacgaccaccgggttcgccagccactctggatggaagacctcacggatgaatccggcctccagaagtcgcgccacctcctcgcggatgaaggcttgacgttccggggcctgccgccgcactttctgccggaccggccttgcgcccggccgcacggcgagacggtgctcaatcacctccctggggaccccgggcatatccaccggtctccatgcgaagacgtcagcgtttgcccgcaggaaggagacgagcgcgtcttcctatttgccgtccagaagaccaccgatccgtgtggtcttggacgggccgtcgcccagggcaacctccttgaccgggacctcgtcgcctgtgatcatccgctgcctcggggtggcgggggcggaggcgccaagcctctcgtcgccaccctcgggcttgtacgcagcggcgaggtggtccgcgcgctgctccagacaagcgagcgcgactttgaggtcgccatggacagagatggggccaccgcggcccggcatcttcatctgtaggtaggcgtagtggaccgccgccatgaacttcaccaacgcgggcctccctaggaccgcgttgtagggcagactgaggtccgccacatcgaagttcacccgctccgtgcggaagttggcggatccaccgaaggtgaccggtaggtcgatgtgacctaacggccacgtgtgccccggcgtcacaccgataattggctgggacggccggagcaccatccccggggccttgatggcgtcaaaggccgcaggggaaaggatgttgagggccgctcccccatcaatgaggacacgcccctacttcacgttgcaaacggtgggagaaaccaccatcgcaatctgccctccccgggcaacgcacggtgggtggtcggtctggtcgaaggtgagggcaacctccgaccaccgcgcccgacacgtcgcctcatgagtaggggccgcggccagaagctctcgcttcatggccttgaagctccggcgagaaacgtgagcacacgctcccccatcgacggtggcaatggtggccccaggctcttggaaacctaggtcatcatcgccgtcatcgatgtcctcggcgagggccttctgcttggcctcacttcgccgattaccggaaggaaacgccggggatttgccctctcggcgctcctgcctcctctcctcctcccacttcctcgtctgctcagccaaacttttgactgcacggcagtccgcgaggtcgtgaagggaagtgttgtggacggtgcaccacttgccggttgggcgctccctgttgggagcgccggcctcgttctttttgcctcccgcaggcctcccctttcgggtggcccgcgaagcgccctcgacggcgaggacatgaccctcgtcgtcggtatgggctgacctcttcttcctcctcctgtcacgccgccctatctgagcggcggatccgggggcggccgaagctgccacaccggaaccggaggggttccaggtccatgcctcctccttacgagccactcggtccgcgagctgaaaaagctccgcggtagtctggggctctttggaggcgatcttttcgagcatgcggttgtgccgcacaccccccctgaacgcgtaaatcaccgcgtgtgcagggatgcatggtatggtgttgcggacttgacagaaccgctgaatgtacgagcgaagtgactcatcatcccttcgctgtactgcgtgcaagtccgcttcctcacctgggcgcggatatgtgccttggaagttcatggtgaactgttggcacaaatcctcccaagagtggacagacgcgggtggcaagttcattagccaaccccgcgcctgtcctttcagggccatgggaaagaaattcgccatgaccctgtcgtcacccccggcggcctcgatcccggtcgtgtagacctggagaaactcggcggggttgacgctcccgtcatatttttcggcgatggtgggccggaaccttgggggccaacggacattccgaaggctcgccacaaaggctctacagccgacaccaccaaccgggggcacggagggctgatccccgcgtccgtggtgaggtgacactccggacgaggaggcgccctccgttgcgtggggagcacgtcggccattacgccggcgctcgatactgatgcgggcatccggttccccacgcagatcttcccgggtcggaggcgttgacgaaggagtggcggccgaatggcgaacagcggctgccgctcgccgcgccctccgtcttgacgacgcggagccggtggtagcagcaccagaggccttggtggcggaggaccgcccaccagcatctaggcgctgccgtgcagtcatgaccaatttggccacatcgtccagccaacgttgggctggagactccgggtcatgggcgacgggcgggtgacgtaggagcgcgcccgcagcttggagcgcgccctggggcgtgctgccgtcgccgtagacgaggaggcgacgctccccatctcgccgcccttctccacctcctgtgggcgtcgaagtcgcggatccttcggccctctcgagcgccttctcccgcctaggactttggcgtggagggggcggtggagtacgagctcgacggcgtgggtttggctccccgtcgtcaccgctcatactcggggagaggtcgtgcgcctttgccggctcggccattgggctgaacaggaaaagcttggcgcacacgaaagagtgcgagagctcagaaaatccctcgcagagacccctacctggcgcgccagatgacggagcgcggggctcctcaccgggagaccgcgtaggcccccctttgccggttcggccggggactcagggtgagattctaagctctctgtatgtggaaggttcgcgagacaggaaacacacaagacacgggcgatgtatacaggttcgggccgctgagaagcgtaataccctactcctgtgttttgggagatctgtgtatgaaggagctacaaagtatgagccagccgctcccttgttctgggttccctatctggaaaaatcagtcccctctctcagtgggctaggtcctccttttatatcttaaggggataccacatgcaccatttctctcttttttgtggggacttaccccaccttttcataaatggacggagatttgtatagttgccgtccgagtcaccttctgatgagacggcccacaactacctccactttcgccgggagcaggtgcgacgtggaatcgtggctgtctgctgacgacatgaccggtgtcagaccagtcacgtcggtcattcttgtccaccacgtgtcagcttagcaatctacatgttcgcccttcttcacacaacatcttgcctgtaatggttaggatgaagcctggcatatatctgaccaggactaacgtgccatctctgggaggtaacacgctagcttcagctggggacgagcgcctagaagccctcgtcctgacgggatggggcgaggcgtgcgtcagatcgcctgtcgccacctaacccgcgatttgaccggtctgtgactggtcacagaccggataaacgagtgcactgcactgcgttacatgcggcgtgacacgctcagccaaaccgcaataaatgtggttaggtgagccccactgtgctcacctaacccatacacgcggatcaaaaacccacgaggggtcggggtgcctcggccctcggggccgaggcgggtgcggcccgaccccctcgggggactaagaggagggcgaacacatcaccctcgggcccgacgtccctcgggggtgccaggccacgtgtgcgattgtgtctgcctcaaacctctagtcatgatactcctgatcccatgtcaccgacagtgaccgaccgggaaattctttctgggtactcacgcttggcctagaacaatttgggataggtgaccgaccgggaaattctttccggatgcacacgagtgaggacaaagtgtacagaaaagacttgtgttggtctgtgagggcagactatgacctatgaaagttgccagatgtaagcgggtccggtataggagaggcgagacattacaaattgtatgtatgattttttgctgcgtagttatacataagttaaggaacaggtaaataagaccaagtaagatattggcaagagaaggttgagaatgcaagttgacaacatacaatatatggagcaaacctttcacggtaatgttcgaatagatgttttgaatcaatatacagaacaaacctgaagtttgtctacttttcttgtattcttgtttttttttcccaaggccacttatttatctcctgccattccacgattttttaaagctttgttactactagaacgatgatgttaactatgagtaatatctcttgtttggtcgttgtctcagctatggctgcaactcatatttacccttgctgtagtataggctactaaaaaatgtttatgggttataaaaccacttcataacatagataatagagttcctcataaaaagagataatagagttaaaaaaacaactcgctatactttaagttgcaataacatggttgtgtaaaagtggcaatgagcttttggtaggtgttgttcaaggttttaggatttatccccgttcattcgaatacgtagttagatggttatatatgcttacaatgtttacttccgacggtgtgcacataagcattcatacttctactagcttggaatagagtgatcatg

SEQ ID NO: 15226 - DNA, 510 bp, Oryza sativa
ctacaggagcaaacgagtgaagttacacaaataataatgattaagttcaaaatgaattcaacagatcaaaaggagtaccttagttgttgcttgcatacgttcgacatacatattcatgaggggatccaatgcaccactttctgaacaaacttgggcaagagactcgtccacaccaagaccgataagattttcttggtatttcacaacccaacctgttacctacagtgaccattcatttaatgattttgcaatatacgagaaagcaaaccaaacaagtgatattcatgaatcaaggaaaacaaaatgctgacaatgcttgcggttttcacatttcatcttgtggaaagtaaatttagcagaataaaacgatggcatttgaattcatataccttaagaatatttatatttggaatatcatttgctctatcactgagaagtcttagcatctggatgaacctttcagtatacagctttaccatgagctggaaaatttcatatctgtatagaaac

SEQ ID NO: 15227 - DNA, 1392 bp, Oryza sativa
ttgctattgaggtatgcatgataagctattctgaacccacaatcaggagcaatatgaatcttatttttttctaacgtactgaaacaatttccctaacaacattcttggcattttacagtcgtttcataagatcgagaactttgtcattgaacataccgttgacaatccggttggtgactcccaggctgactcacgtgctcagaggatacagaccttgtagaattttgatcttttttgtaccttagtgttaccttgtagcgctgttgagttatttgttcgttgtaccgacaagatgatgaaaagaaccggaagtgtattttccttgtaaactgtaaagaaaaggaataatggagctaatcagaaaatcagcgtttggttgcaataccttggggattttggccttcgttcttcactgaacagctgaacatcttagttccaaaagatgaagatctccatctgaggtctcagaaaaatacaaaatgccacaggagattctaccggaatcctgaggctgagacgaactgggcactggccttctcaatcgtccactcaccgtcgtcctccatggttttgttttggataacgatgggccaatccgtagttggcgcctaatcattgtcacagatacttcgacgtcgccgtagtaggggcgctggtagggcaggatactccgatgagatcggcacaggagcaacgcgagcatgtgctccaaattggcttgacccaccgggccaccgagcgcgtggagctgagtcagctgactaagcacgccgatctccacacaacgacggagactgttgcgcttcaatccagatcctccgcagtcctgctcactgacatatggcccgaggatctttgaagctcacatgtcagtgagcagtactgaggaccctcactcgttgtgcttggccgcagcggagaggaatacgccaacgccctgctgcttgctcttgcttgggcatcgtgaagccccttgaggcccttcctgctcctgtattgtactcgacgcaatttacacggagactgctacagatcggtgttgcagtgtgttatcaagaaatgtttcacatgtttcatccctcgctaaaaaatgtttcaacaaaaatgttccagatgtttcactaccaacgaaaaatgtttcagtgcttgagaaaaaatgtttcaaacaaatgcaacattcaaatatactgattgcaacactatgctccagatgtttcactaccaacaaaaaatgatacagcgcttgagcaaaaatgtttcaacaatgcaacattcaaacatgctgattgtaacaccaagaaatcaatgtatgcaacattgagtcaaaatgaaaatataacaccttaatacaataaaatgcaataaaaaaatacaaatatgattcaacatcac

SEQ ID NO: 15228 - DNA, 1562 bp, Oryza sativa
attggtgatatttggaggaacacatggaacgggtgcgttgattcggtcaaaaaaaaaaaaaaagcttgcaagtaagaaattaggtggtaaggctggcttcgaatggatcgaatactgcaaaagttgtgcctctttctgttgtttgcttttgctatggcgtccattttggttcagattttgagtcctattgttcggattagattgatcaaaatggataggttgattgggattattattggaaaggtaggaagagatgaagtttcgcctatgattggtccttctagatcaagccaatcctgaaaattccacgaggtgtgatttatgtcttcacaaatttcagacaaattgacgctcctcgttatattgttcctgtgcaggtcatgaaacattgcataactcggttgatgaagccctcttgctaaaggtactgcataatcaaatcaaaggcgacactggagtttgcttgttttcttccatcactctatgttctaaccatctgttttattttcagagaaaatcagaagaagttctcttctatttgaatggacggtgtatttacctagttggttagttctgaaacttctcattcctccaaattatcagcactgaaaaagatcaatatatagatggcatctgaatttctggttgataaattaaaacatgtctgcaggaatgatgggttctggaaaaagtactgtgggaaagatcatgtctgaagttttgggttattcgttctttgataggtttgtatttttgctatttgccaaggagatcttgcccttggtgctcatggtaatctaagcttttatatttctggaattgtttgcagtgataaattggtcgaacaagctgtgggcatgccttcagtcgctcaaattttcaaggttcatagtgaagccttctttagggataatgaggtaatctttttttctgaatccatcttctgctaacatgatctactatcttagcatttgtttacttgtagttatcagaaggaaaatctgagactgattattttctctgtggctctcttttatgcattacagagtagtgtcttgagggatttgtcctcaatgaagcgattagttgttgctactggaggtggtgctgttatccgaccagttaactggtatctggagttcacttctatttttcctgttggaatagtttattttgtggcttctcttattttgattaacaatattgtgatctctttgttgtattatcaggaaatacatgaagaagggcctatctgtttggttggatgtgcccttggacgctcttgctaggcgtattgctaaagtggggactgcctcccgtcctcttctagatcaaccatctggtgatccatacacaatggtgactacttggcccatgaatttatgccatgcatgaatatgatattatttcagatgtatttttttaaatttttaatcagtcaatataggctcattcattcaatgtagaaatgaaaaactgcaagtatgatcctgcacatctgcacaactggtagtgtaattctttcatttcagtgctagtatgagttgctcactggattcttc

SEQ ID NO: 15229 - DNA, 538 bp, Oryza sativa
aaaagggagcacacgtgccttgaatcttctgcagaaggtgaggtcgctccaggtgttctcgtccaattgcaaggcagcgtcatcgtcctcctccggctgaggcctccacacgacggcggtgacggaggagttgaagaccaccctctccatggtgtccgtctgcgcgcacgcctccagaatgttgtgcgccgctcgcacctccgcctccaccataccctcctcctcatcctgtttttttttttttggtaaattcaatcagttaggattaacataatacataatcaagccaagtcattctcatgctcctactccggccggtagttcgccggaggagcagtgtgtacatgcaaagcagggcaggggcattaattgattgacgcggaaaggctggttggtaggtgcagttattagtgtcatcggtcatcctcttctcggagccagctagctgaaactagaactgtggaactggaaggaggaagaaggagctagatagatgatgatgatgatgatgatatgaggcgcgccattgcccattaat

SEQ ID NO: 15230 - DNA, 687 bp, Oryza sativa
aatggcagagaaaagaaaaaggaagggagctcgggtttatagggggcggcaatgtcggtttggaaaccgactttggcggtcaaggcgcgagctggcgctccggctagcggccaaaacggcgacaggaggcaggcagtatgacgccggcggcaggaaaagggggaaaagtagggggagaaaggggcttgtccccttgcctcttcgggaaaaggaggagggagcggggcgtcgcggcagagggaggagggaggctctgcctccgtcccttggcggcttgcgcgggagtgacggggccgaggcgatgacgacggcgatgacggcggggcggtttggagcggcgcgacgacacgggcgacaggtgcgtgcatgggctgacggcggaggcgaccgggcggtcggccaccacggcacgcgcgcgcgggtcgcaacgggaggcgcggcggatggagtggcgtggctcgggcacgcgcactggctgcggggccgagcgggctacgcggcagcaagcgcggcagggcagcggggccgggcggcgcagacgcgacgcgggtgaggaccacgcgggcgcgcgcgcgaacgacgcgcggggagcagcagcgagggctcgactcggcgcgggcggggaaccacgtgggcgcgcgcgcgaacaacggcgcgcgggagccggcttcgcgggcggggctgcag

SEQ ID NO: 15231 - DNA, 1035 bp, Oryza sativa
ctttggaacatcagaaagttcagcagaaagctcgaattttgaatctagcactgatgatgtttccagccctaagagagccaaggctgagaggagtgtcgcaggaaacaaaactggtggtgtcaaagaaactattggagagaatgagccacacgccttgctgcctattccctgcagatctctaccacaagataagctgggtgaccattcacgtgttcaactagctatttctgctgttcagaaattgttgctgcagggtctgggcactgttcttggttccaaggacatcgttgggatctacagaacaccagcagtagataaccataaagaatttcgttataatcttttcaaaaagcaggcagagcatactaaatgtaagcgtggcaatgcaaatgtccgctatgcctggcttgcttgctcaaaagatgctgtggatgaaatgatgttgaatggtgtcatgcactttgagaagactgttaagtgcccagactacggaattggcacaatccttgctccagcaaattgctccaatacctggtatgctcctgatctatgaatcatccagtgggccaaacctgttgtgattataatgatcatctaagcctgctattgatacttccagtctgtttttttcttatcttttagataaattgttgctcacatgttgttaatattactgacatttttcatttatttgctgttcacatgtttttttttcttatgatatcatcaaattactacttcaattatatatttcttttgttcccaagtttttattttcctaaccattgcgaaattcaatatttgtattactttctgcagtgtgaattactctgatgttgatgaaaatggcattgtccatatgatgttgtgccgtgttgtaatggggaacgtagaaatagttcaccatggatctaagcagcatcggcctagtaacgagtatttcgatagtggtgtagatgacattaaaaaccctcaacattacattgtgtgggatatgaatgtgaatagtcacatctattctggggctgcaggaat

SEQ ID NO: 15232 - DNA, 1161 bp, Oryza sativa
  unsure (1)..(1161): unsure at all n locations
gaacaaagacatcaacttcacaaataaaaaaggaaggtttaacagatgaggcnatatcaataagtaacactatcagtgagcaagtctgaaagtcaaaagttctgtaaactgttacaaaataagaaaggttcttagcctaaaccctggagacaaggggcctacaagagtaacagcaatgagaattttcaaatccaactaccaatctcaagctagcatgggtgaatatcatatgcaaaagtggaatataaactgagctgcacaatgatgaaattacaacttattttgcaccctctacaaaagtaaattgatgtagcttagtttcacgttctgaagaagatatatgcacaaatgtgtctgttcaccctgaaaaataggttaaatgatggggccaacacttgatgcatgattttgacatatccattaatttcagctaccctaacactataaatattcagccattcccagcatagagaaaaaacaatgaaatttgggcaagagttcatcatgatcaataatcagtaagaaggcaaacagagtcctgaaagctaatctaatggttattgttctacctgaagactgggcagaagcacccacccccaccaaagggaattacacaaaaataagtaaaatcggtaaatcattagaaatgcctgttacagtgttacttaacaaaataactagaagtcagagcataacactatccagatattaaacatgataatctacaaccaacattcagaacaaacctcgtcgacattttgggtatgaaccgtaatgtcgctgtactttatctcttcagttactgacaagcctacaccatggaaggatataaccctttgctcaccaatctctttctcaacctattcaaatataaaagtcaaacaaatactctgataaatatgtctaaagtaatacagtaagaggttgcaactgaatataccttctgtggtggaggcataacctcatagcagagcagtgagagtggatatatgtgcccaggaacaccagaatgctccagaagcctcctcatgttgtccactgcagatgcatcaaatggtgcctgtccttgtttttgtaagtagcagacaagatacagacaagtggtaagttggaattatactgatgaactactgtaccatactggtaagcgcatttattcta

SEQ ID NO: 15233 - DNA, 727 bp, Oryza sativa
acgcgggtgatattctactctgttatggcgcatcataccactcaccacgttgataaacgtacagtcgacctgcaggcatgcaagctagacaatttgctttggaaagtctttccattcaccaccttgacgaagcagaagtcgcttaggtaaagcactagtcatgaaattctgatcactctgtataatctgcattttgaaatggcacttgatctttgccttgtgaccttcatcaacataaaacctaacaacagagttatcggcgggatgcttatgcaatttagaggtgttgccggcatcagcgcaacgtgcagctgggttgtcccgctttctcttgaggctacttatgtttcttccacatttatccaataccttttcgttcatcgcagccatggttgctagctgaaatgaaccagagactaataatttctaacaaactaaactccaacaagcctactatttacactaagctaataggcaagcttctgagtgtactcaagttcattatcgacgaggcaaaaaccaaaaagagtcgggtcagaaagaggcataagcgaaatgatcctgaaaatgaaagccagatattagagaacacttccaaaacacaatattttaaatcatcaatacgacagactgcatgccaaagttgcttcaaacaatagccactggtactagcattaaccgttgttgtgtggtaccttaggccgcccgagattgattattggataaa

SEQ ID NO: 15234 - DNA, 847 bp, Oryza sativa
tccagtaagtcatttatttactacttaatgtgtttcacattctttaacatggccaaaatttcatgattgtattacactcatccaaaacagggagtaacagatccaatgctttatatcgggatgctcttcagcatgtttgcttggcatgtggaagatcattatttgtacaggtataaattctcggttctccatggttactctttcttttttgctcgtaattaatactggtgttctgacattttattcatatgaccagcatcaattaccatcattgtggggcatttaagacatggtatggcataccgggtgatgctgctcctgggtttgaaaaggtggctagccagtttgtatacaacaaggatattttggttggtgaaggagaggatgcagcatttgatgttctcttggggaagacaacaatgttccccccaaatgtcttgttagaccacaacgttcctgtttataaagctgtgcaaaaacctggggagtttgtcattactttccctcgttcctaccacgcgggtttcagccacggtatgtatctttcagtttgtgcatgtgttataacgccactatcatatgcatagtattctaaggaatgtttcaactacccaggcttcaattgtggcgaggctgtcaactttgctatcagtgactggtttcctctgggttctgtggccagcagacgctacgcgcttctgaacagaacacccttgcttgcacacgaggagttactttgccgttctgcagtgcttctgtcccacaaactgttaaacagcgacccaaaatccctcaataaatctgagcatccacattcacagcgttgtttgaagtcttgctttgtgca

SEQ ID NO: 15235 - DNA, 2513 bp, Oryza sativa
cagctgtggaatacagtggaaattcagattctgaatctgaaatatttcgagtcaagcgcaggtctggcgtatcagtaaagcctgcatctgatgccaagacatcaaacttgtctgatcaacaggtacgttaaattttcatcttttacacccctttggcttatcatcaacttttaggtactccctccggttctaaattaattgacgttttggacaaggttgagatcaattttttataactttgaccatcaataactttaaaaatatttagtttaaagaaactaaaacaacatatatagatttgtcttttaaagcactataataaaagtaaacatgtatttatttattatatatattatagtagaaaaataaggtcaaagatatatcttgtagaccgtgtcattgtccaaaatgtcaattaaaatggaaccggagggagtaattgcactgtttaagggaaaatacttcatgtaagaataaatgacatgctatataaatggccaggcatctccagttgtcgaggtcatttgatagataataatgggcaatcatgtcataaataaataagttgcagctctagttatgtattaattaagttcctgtaccattttacaccaaggtccaagggtctttatatgaaggatgacatacgggcccatagcatttagttgtcctattttagatagtgcttactcttggttctgatgtaaaatactggaatcaggttctcagccggttgaaaaaggtgcgccctgaaatacaacagcacaataagcgaccagaagactatggtcactgttcagttccctcaggtcgtatgagtatgaagaatttgaattcatcctcttcatgtggtgaagaacactgtagtatgaagcggcgtcagttggagactcagcaggatgagagcagttattctgcaaagcagaagtcgtactcgtatccatccaccagctattctttccgaggagagtttgtggaaatgagtagagatgctgctgcagaagtccgaccaaagcgactgaaaatccggctaccttcttctagcacgaacagagtggttgagcagggcagttcagggcaaagatttacaagggatgacaagtcgcttggttgttggcctgcaatttagaatttagaaaaaaatgctgacgcaggtgctaacctctgatggagataaagatttccttgtttaggtggggctgttgactacacgaaatgatagggctgggatggatcgatgaggttgaatataaatgattagcacagaagctgactgactttagaaggctggttaatcgattctttgtgcagcagtgcctccaatttgaggcacatctaggcacggttagaagagacagacacatgacgattcttgttgctggaggttctgggtcactgctttgctgctgtttgatgcctgcactgcaagtgacgtacacacactataggacctcgctctaccctttgattatatctctctatttttcttcttctttgtcagcaaccttagctgctgctactctatagctaactgtattctttcatacgcttgttccatcaagttaatctgctgcttaatgccattgattcaatagtgaatcatcgttctttctggatggaatgcaaatatgcaatggtatggaatgatgtttggtggtgactgagatgttgcaattgaattttcccaaactgtgatgatgcagcaaggtaggctagggtaggcatcatctcatgtgagggaatttaggccttgtttagttcctttttttttttcaaaaaacgttacattgaatcttttaagcttaattagtctaatgatggattaattaagcttaataaattcgtctcgtggtttccagacgagttatgaaattagtttttttattcgtgtctgaaaaccctttccgacatctggtcaaatagtcaaatgtccgatatgacacataaaaattaattttcttttcgcgaagtaaacacaccctcgctacaatgtaaggttggctcgtagtgtctgtcgcacggtgttgcatgttactgcaacgtactgtacaaggccaggccaggcccggcccagcccaagaaagagagggaagtgagagagagatggagggagtcatcttcttcctcctgcggtggcggtgctgcagctgagcctgctgcactcctcaccggctgctgattgtgactgtgagtcatgttggcctccacttgcttctccgccccgccgccctcctcctcctccccgtcaatcccgacccacctcgccactctctgctgctgcttcaggcctcccgctcgcccaccttggcctcgctctcttcttcttcttggtgccttcccaccgccgacccgccccctcccccgcgcctccgtctcgtcatcgaccgccccagcgaaagactacgaggcaagcaaagcaacctgctcttctctccacatactagtatttcatcttcttgcttgcttgctcttctgctgtttagtttatctatctacgcgggtcacagtctctg

SEQ ID NO: 15236 - DNA, 1343 bp, Oryza sativa
tgtatttgttgacgtcgatgatacgtctctgttggtcagagccaagtcggatgggacactgcggactttgatcaatgttaaacaactctttgataggattaagtcttctgagactatatggtatgcaccagtcatttactagcttgctcttgtagaggttttaagaaagttgaccaattctatgttcatcttgcaggttcattgatgaggatcaattggtagtgaatctaaagaaagttgagcaagagctgaaatggcccgacattgatgaatcttgggaatcccttacttctggaatcactcagcttttgacagggattagtgttcatattgttggtgattccacagatataaacgaggcagttgctaaagaaatagctgagggaattgggtatgtgcatctcatttcttaatgattcaaactgcaatttgaattctgccattctggtttcttttcaaccttctagtttatactatacaagtgcaaatggtagttcattagaatgagatttatatagttacatactgagtatagatcaggtatccttttacaatatttgctaccatgcatgaacatatacaattcattgctagtttatcgcatataaggcccctgaaatatatttgctggttgtacctttgcagttaccttccagtctgcacaagtgagctgctagaaagtgccaccgaaaagtctattgacaaatgtaaaaattatcgcctcatttctgttgataaaagttgcaacaaccatgttgttttacaggcatcagaagttgttatgtgtagttcatactgttacagtgaattgacaaaagtgctgttatttcttgtagggttggcttcggaaggagtggattcggtagcagaagctgaatgtgttgtgctggaaagccttagcaggttgcttttgtgggctactcctagtttgttacctttggttgatgtcttgctcagtatgcttaaaagactatttctccctcgcagccatgttcgtacagtcgtagcaactctggggggaaagcaaggagcagctagcagatttgataaatggcagtatcttcatgctggatttacggtttggttgtcggtctccgatgccagcggtaaggaaactaggaaaggaaggctagcattgttctgttcctagtacactactactatatatgtacataatgaagtccattaatctccagaggttactactcctagttactttacctttgatgaggatgtcatatgtacatagatgaagcttctgccaaagaagaggcccgtagaagtgtgagctcgggaaatgttgcgtacgcgaaagctgatgtagagtgaagcttggtggatgg

SEQ ID NO: 15237 - DNA, 555 bp, Oryza sativa
agtcgctgtcctgcacgacaaggacacctacggtcagggcctggccgatgcgaccaaggcgcagcttgaaaaacgtggcgtgaaacctgtgctgtacgaaggcctgacccgaggcgagaaagacttcagcgcggtggtcaccaagattcgttccaccggtgccgacgtggtctacttcggtggtctgcacccagaagccggcccactggtacgccaactgcgcgaacaaggtctgaaagatgtgaagttcatgtccgacgacggcatcgtgaccgacgaactggtagccaccgctggcggtgcccagtacgtcaatggcgtgtacatgaccttcggtgccgacccgcgcctgctgcctgacagcaaggcggtggtggaggagttccgcaaggccggtaccgaacctgagggctacaccctgtacgcctacgcttccctccaggccctggctgccgcgttcaacggcgctaagtcgaacaagggcgaagatgctgccaagtggctcaaggccaacccggtccagaccgtcatgggcgagaagaagtgggacaacaa

SEQ ID NO: 15238 - DNA, 2895 bp, Oryza sativa
gagattgaaattaaaggagacagagatgtagacacacagctcgtgtacatacatgcatggaggcgtttcatcaaacaccttgcgcctgcgggagaggaggagaggatccaatcatccaaaacgaaggcaactgaagaagttgtaaggtgtggtctgccgtctgcggcggggcgaaatgtgtggtgtgggctaaaatatgtagtgtaggaagtaaggcccaaggcccatccgatatcgactcgactcttatctgtgtgggccgtcgtcgtcttcaaccctcctcctcctcggactaggactaggactcggactctccccttcctcctcctctctacctctacctctaggcagccgcaggaggaggccggctgcgctgcgctgcgcgatggaaccggagagggaggcatcgtcggagtggggagatggtgtcggggcgctgggtttccgggtgaaggcgtcttcgcgcgagccggcggcgcagaaggcggccaatgtgctggagccggacctgcgttcccactggtccaccgccaccaacaccaaggagtggatcctgctcgagctcagcgtgcgtactagcgacttgttctttcttccccctctctaactaggagtctccttctctagcggtagcggaggagaggccctgaatgaattgctgaatttgctgctgcaggagccgtgcctcctctcccacatccgcatctacaacaagtccgtcctcgagtgggagatcactgccggcctgcgctacaacaagccagataccttcgtcaaggttcgcccgcgctgcgaggctcccaagcgcgacatactctatcctgccaaccacaccccttgccgctacgtccgcatctcttgtatgcgcggcaaccctatcgccatcttcttcatccaggtacaactactagtataacttttactcttcctccggatatattccgagtaataagtcactcttcttcttcagctcattggaatccctatacctggactggaacctgacctccagcctctagtcaactacctattgccacatatcactgcacacaaacaatcctctcaaaatatccacctccaggtttgtttcttcttcttcttcttcttcttacttctgtctgtgtcttggcaacatataagtttcttctaatcatgcaatttttttgatattagttactcaaagacattgcaagcaggctaccaccatttctgccccagattgaggtaagctttccgactagcatgcatctccccatgtccatgtatggtatgttgtgcctttgttgtttccctttaatcgccgctgtctatctgagtgcaggctgacctcgctagtgtcacagacactccagagagcagtgtacactttttggctctgcttgctgggccattttatccaatcctccaacttacaaatgaaaggtgccagttccttgttcaacattcaactgcatatcaattattttttttatactaagctctgtgctgtcctagattatttttcggacagcttatgtgtttgtgcaggttgctgcacaaacatgtgtgcgcacacctacatgcaagcactgctatctgaaacaccttcttattttacagggattttactaaatcattaattagctctgctgattcagatgctctgaaaagtagtttggcttctactccaacggtttcttcaaactttgaggcatgtagtttttttatttccaatgtacttctaccgcctttctagtttctgcattgcactatgataatgtgaaatgttatagctgatatatgctgaaagagtgaaagctttgattaaatggtgctgttgcacttgctgctttagtaacacacaattttcatttgtgtgaagtgtctgtaagacctaaccttaatcttcagcacattgttttctcgagagactacgggaattcatagtgctaactaagggtatagacacctggctcctttagaccttaccttgaactataggaacagaagctaatggcaggatgcatccccacagtgacataataaaattagataggttttatggttggatccaatagacaaaaagtccttcataactattactctgtgggctgcaatatctatgtaagatttgacttaatgaaaactaagaaacacaacttgtttcttttttgaaaccaaaagtagtatcatgtaaatcatccacattttcttatattttactggagctttctgtattccataaaaaccatcatgtaaaccaataagacaatttgggatggttggtcaatattataaattattccctccattccaaaatataaggctcaaccacccttaacccaaaaaccaagatattatcacatcatagtttggatcatcctaatcctatatacttatagttcatccccactaagtgtagttaatgctatttctcttttctctcatgaagccacatcatctcaattatttctagcctttggatgatagatctatggtacacatagtctcttctttcttctctcataaaaccatgcaatctcaatttttaggctcaaaattcataagtatcaattacataaaatatgttcaccttgcactatattggaaccatgtgtaaatcgtatagaacataggaggtcattttgttttggttataaaatatattgtggcttatttgtacatattatacaacttaatttcccacagaaagacggcggggtatttatctagtaaatataatgcatgcacccaacagaattaaagatcttgagtatggaggatttaaaaaataataatttagtggaaaagaagtgctagttaatagcatgcattcattccttatattatgaaacatctcgaaaaagtagttgcgccttatattatggaatggagggagtagtaaattattactac

SEQ ID NO: 15239 - DNA, 5142 bp, Oryza sativa
agctgatttccttgccgagtggaccaagtgccaagaagacatgccagaggaaaagatggaatattggactatgcattttgatgggtcgaagaggcttacaggcactggagctggggtcgtcttaatttccccgactggagaaagattgagctacgtattgtggatacatttttctgcgtcccataacgtggcggaatacgaggcgctactccatggattaaggattgcaatctctttaagcattcgccgattaatcgtccgtggagactctcagttggttgttaatcaagtcatgcaagagtggtcttgtctagatgataatatgactgcttatcgacaagaggtacgcaagttagaagacaaattcgatggactcgagctcacccatgtcctccgacataacaatgaggcagccgacagactggccaattttggttcaaaacgggaagcagctccttcagatgtattcgtcgaacatctttacgaaccgaccgtgcccagaaaagagacaactgaagccatggatactcaaggcgtaagcatgattgaaaccgactggagagaacctctcatagaattttttaccaaacgagaactccttcaagacaaaaatgaagccgagcagatttccaggcgcagcagactttacattattcacgaagctgaactatacaagaaaagtccatcaagaatactgcagcgctgtgtatctttggaggaagggagacaattgttgaaggatatacattctggcatttgtggtaatcatgctgctgcacggaccatcgtcggcaaggcttaccgacaaggttttttctggcctacagctgtgtccgatgcggacgagattgtgcggacatgcgaaggttatcaattttttgccagacaaactcatttgccagcccaagagttgcaaaccatcccgttgtcctggccgtttgctgtctgggggcttgacatggtcggcccatttaaaagggcagtcggcggttacacgcatctctttgtggctatcgacaaattctccaagtggattgaggcaaaaccggtcatcacgatcacagcagataaagctagagattttttcatcaacactgtgcatcggtttggggtacctaattggatcatcactgataatggcactcaattcaccggcggagcatttaaagacttttgtgaagacttcggcattaaaatttgttatgcctccgtggcacaccccatgagtaacggacaagttgagcgagctaacggcatgatactgcaagggatcaaagcacgagttttcgaccgactacgcccctatgctggcaagtgggtagatcagctgccgtccgtactttggtctttacgtactactcctagtcgggctaccggccagtcgtcgttctttttggtttatggcgcagaagcaatattgccgagtgaagtggaatttgaatcactacgatttcggaacttcaacgaggagggctatgaagagggccgagtagacgacatcaaccgactagaagaagcccgagaagcagctttaattcaatcgactcgatatttgcaagggttgcgtcgttatcataatcagaatgtccgatcgcgagcctttttagtcggtgacctggttctgaggaaaattcaaacaacacaggatcagcataaattatctcctttatgggaaggaccgttcataattgctgaagtcactcggcctggttcttatcgactcaagcgcgaagatggtactatcattaacaattcttggaatattgaacaccttcgtcgattttacgcttaggcatttcgtttgtatctttcctctttgactgctaacttcaagtttttcctcgaagtttttagtcagggggctactataataataatggagtgtgatttttatcaattcagtttgcttacttgatgtatcattgccctgtttgatttcttggcttagtcaatgaggactgaaagttttttaacaacttttgtgggttttaggctcaacaaggtttgacaaaaacttttaagaaatcaggagctaagctaagatatcaagcacagcataaattcatcagtattgtacaaattgtgcctccatcatcgttaatcatcaaagttatcggtacattaatcggtatcagtcttttcatcatcagaattttcaggaccagtcggtcgaagatcgttgtcctgaaatctctcaactacatcagcagcaattttgtcagccgcttttttcgcatcactgatgaggtcaagagcagcttcttcgctcgtcccgtctgcaaagccatcaatggcgtcaatatcaactctcggataaagggatttagtcatcgccaacgccatacttgctcctatacttccagcttctttgatgttcttgaaatatatatccgagcaactctcagcttgtcgaaaatttcagaaacatcaagtgcactcgggccgttgttattgaggaacatcgcttgaacaattggggcagcagtgttagcaacctcatcccgggctccttcaagttttttgatcttgccaaccaggacgtcaaattgagcttgagatttgatcttgcggtctgcatcgacagattcacattaataagtcagcatatggaggataatggattttgaggtattgattgttgataccttcaacttcctttgaagccaggtctctttgtcttgccagctctgccttgttattttccagaatttagatctgcttctctagttgagatatcttggcagcttgcactacattaacttcggttaatcaggattacagagataacagcacaaatcagttgggcagagtttgcgcaaaccttttgatgagccactcagttcaaaattggattcctggagctcagcaattcgattcctcagatcatgctcatttttcctggcaagctcttttgtctcgtgcagcagactcctggtggcttcgagggtcccgagatgagggactagcttctctaaggtcgccgttttagcttcgttcctaagatgaatcctctgcaagacagtttaattagcgcatgaattaaatggcaaacaagatggttgagatcaggtaccagagggcttacatttacaatgcgggttgcctgaccaagtgccttcttcagtaggcgtaactcttcgtcctctttttgcttatttatcatgatcccttgaggctgcatgttgtcatcccaccacttgaccagaatcggagggcgtgaatcctcagctgcttgtatgcggggaatttcttcatcatcaccgatcattggtcctaatgtatccactgacagaggttagacaattggtcagagttatttgggtcgacatggtttcagacaaagtgttttacccgtaatgatttctggacgaggacgagtgggttcggatgcctttaaaggagatccagatctctggtcattgctggcgtcttgtccgcgaaggctgtctgcttgagctccaacttctggaatctcttggcttggccctgcgtccgactggtttctagtcgggggctcctgattaaccctggcttcggcttcgaccgactgattcccagtcggtggttaatcaccagattctacattatcggttgccggctgattgtcactcggacggtcctcggcagatggcctggtttctttggaagaacttgcgtccacgctagtcgggtcagagtctttcccagacggatctatgtcagatggtttcctgcaagtttgattatcagtattattgccgcaatggatgcgcatcaatgcaagagagatcgttgtatgagttgtacctggaagacttcctgatctttggcgcggggcgactggatgttttcttccttggagtagcctgttttggtagtttcttggttgtctctcggtctccaggcctcctggtagtatcatcggcttcgtcatcactcagaaccagcttcctctttcgagagtctgactggccgactggatcaaaagcacttggttgagtttcagaccgaattcttggtcctccgctcccttgcccagtttggtggcggggagatcggcgttgagcgattgggggatccgatttcatcaaagcaaattcctgggtgcaatatctttcattgttaattgattcaataggaagacaagatcatatcttgaggaaggttgaaatgtttgagtgcataccggtggaggagggttgaatgcgttgaatggcacgacgggtagcagatgtgaatagctgacaacaatagcgtttgagaagatcttgtacattctttctttcatgaccttaaagtcaagagaatctggatcttcccgatttggatcatgcttgccatcgaactcaaaagctgtgcgggatctttctttgattggagctaaccgacacttgataaagtgccgggtgatctgctttccttgaagaccctgttcttttagctttatcatcctctccatcagttctactgcctgagcagcttcatctcctataggcaatgagtcccatgtgtcctggtaaaccggaggaagacaacagtactcggggagtgcgggctcaggattctgaacatagaaccagttcacatgccagcctttgtttgaggttttgaagggcatggagaaatatttttggctcaaggttcctctgagttggaagccagctcccccaacaacgcacggcttgcttttgtttggctggggcttgaggaagaagatgcagcggaacaaggcgaaatgaggcctaatgcctagaaaagcttcgcaggcgtggataaaattggcaatatgtactatggagtttggattcaagtgatgcaagctaatcccgtagaagttcagaatgccccggaaaaatcttgaggttggaagagaaaatccgccatagaagaaatgagcgaataccacgatttcgtgtgtgtcgggggtcgggaatgcctcaccaaatgctggtcgcctgtagcgcccgttccgtcgtggcgcctagcgggaaaattatctcctaaaaaccctaattgcgaattttgtttctttgcttgttgtctagtgtccgtgccatctcaagatctcaatccccgatctatcgtcgagttcatttccgaatccaaatccttccaaatcaaattcctccgcaaaagtccattttgcctcccccggggtcgatg

SEQ ID NO: 15240 - DNA, 6580 bp, Oryza sativa
cgctcgcaccctggaggccacaggtgattactcgtctctactctactcgcatggattgattcagtcgcgcttgcctctctctctgctcctttgcctctcatcaaatgcaagtgctggtctgttactgcagcggaaacgacggcgtccatcgcccgcagcggcggcgtccaccgccggttaaagcaggagccgaggctggcccgcggccgaaggatggggatggcgctgcggcggcggcgctgacggctaaggctaaggctgtatgtgacgtcagcgcagcgcagctagccgttggattcgttgttggaatcgaaggtgccaaaaagtcagagaagccgacgagggaggagtctctcatctttctcttttcctcctctcttttcttccttgggatctctccaactccaaccatagcaccacaagattacgttcctgcagttcgactctcagtgctactatatgtattatatcttgtgatcttcttcttatcttggccatgagaattggattagccatatgttcatacttcgattcgattccatccacttttggtttggttcatgctattggagtactcctatttgctgatgtactatttcttgtgccctgtgagtgactgaccgactgacactgttgatcagagccagatggacagctccagctgatcgcctctagtttgatggagtaattaattaggcagagtctccattatccactgtacaacctttgattaattgattgatgttgctattggctgttgtagacccttctcactttttcttttttggcgaggaagctgatttcgaccgttctggttagagcttttagatcatagacgtagagtcctccgtctatcgtcagatttgcagtagaacgaacgggtgaaccgataaagaaagacagaaagaaagcgtgcccagtgttgtggagaatggcgcctggtacatcacacaacagaagcaagggggtcatcactcataactctgttgttggttggttccagctgctacctgggtggctcatggtcatggctgggtgggcacagtttgtttacattgctgctcatcacaaagaaattttttgtcccctgtactgcctgcctttgtcttcaacactgtatactactctctccgtctcataatataaaaaatttcctccatctcataatataaaaaattttagagttagacacagccattaaaaaagtagataaaaataaatagtggaaaaagtgaatggtggaggattgtgattagttgtgaagagaatgtcggtggagaagttgtattttgagaacgaatggtcaaagatgtcaacggtgccatacattaaaatacggagggagtatattatgggatggagggagtaacaaacactgggcacaagacaacacagcatggatgtgtaattcatacaggacacccctcttctgtcatgtgtaattaccatcacagaaatgtgtaattaacaaaaaatcaaccctggttttaccatcagggaagacagcaggccggggtccacggatcatgcagcctcctgctcgacacgagtacatgacataactaacagtttcctcttaaaaatgaaacaaaaaatttactaaatggtgtcggcgagcacgggcaccataatgctgtataactgtagggcaatagccaggccttctttcacggtcgattcctccatgctatccaccgacaaggagcttaaacacacacacacagagtcacacacaactggagtatataactcgagtaaacagaaacttccagtccagggggtaaaaaaaaaaaaggatgatcgatgcaatacaagatccattcgcctctcgcgtctctgtattaaacatgttcattatccccacattcaaccttggctttttgaaaacgagggaacaaaaaaaaagaggaataaaacattgaagagaaactctttaccagattaaacagcacagcagaccaggatacatgatgtacatttcatatacgtgacacttataacacgaggcatgagatacaactaacaacatactccatggtacctcaaaggcaaccaaaagaatcacccggattttatttgccaattactttcactgcattcaaatccgaagtagtgcagcagacagcttacttgatattctaggccactatcatacatgataaaaacacagaaaaaaaatagtggcatggtaccaaattatcaaccaattctgtagttattgtccactatggcaaccaaactcacacaaagtcaatttcaggctcaagttgaagcatcattcttttagaggatatggccaggcactgaacattatctctggaaacaaaaaggaatggtgcaaaatcaaattcttttgcacgcaccagcatacgagctttttttctgaagtttcaatcattgcaatttggaaaaatattatagcataccctcagcctgtaccatcttgcactcctacaaactattatctaattaatcgaccatgataatatgatatagctacagataccattatctatataatttgcccaagacattttcctgctctaacctgaagaacaatatgggcttgtgttcaacatggcacaaaaaccgtagacaagtgtgggggtttcaccaggagcaggacaccggtagttcacaaataagcggaacaaaagcaaaaatatcaaaacctcgctaagttaaaccgtaatttcactgtgaaatgcattgctttgaggtggaaaatgaaaatccgcctacatttttcatttagataaacggtttataaggattgcatggtactgagctttaagcctagctgaacatgctggtgaagtgttttgatttttttcttgtctacattacaatggcatgaaaggattactcataccaaatttgggtgcaggacacaaccgcaatggattgacaccgggtcacagttccttgattcccttcaaacagatgcctggtagaattctggacttgtaaacttgcagaggcttccctggaagacacctagttcctagaaattcctcgtcttcttggatgcttgaccgaggtcagccaatttttcctgctgcttgcgtaggtaaccacctgaaattcttaagatcctgaatcaaccactaattcgcagcgggcgatggctctaactccaattaaataagggcaaagtaagctggtggtcaactactagacagtaagctatatcttattcgtaaaccacaagtaaactgagtgagctgagagctgtagtttcgtcgatgttaccagacatagagacgaggttgatgcgggagcggggcgcggcgaacatccagctgtcgtcatcgagcgacctgacctccttttgcagcgcctccatcacctccgacttgagctctgcggggaagcaaccacaaacatagccgattcagaatccaaaaggagaggaggagcggaaaagctagggcttgcgtgagggtttgcctgccatggcctcatccttgcggtagagcgcgtcgatggagtcggcgacgtcgtcggaggccgagatcgcgcccgcgctggccgccgacacggtcgacctcgccggagagctcatcggaatcacgcgatgcttttccccttttctgggtgaaatcgaattggagtcagtctctactgtttgagaaaagggagacgacgagaaattaatgggcccgcgttattgggccggcctgttaacgcgagatggagacggcccatttagtgtccactagttgcgtcttcgcagcggagatcgaacagaagcagaaatccccaacccaatcggaggaggaagagaagggcggcggcggcgagcggagatggtgaggaaggcgaaggtcgagttcgacgagagcccgccggatgacttcgacccgaagaacccgtacggggacccggtggcgatgctggagtacagggagcacctggtgagggagaagtggatccagatcgagaccgccaagatcatccgcgaccgcctccgctggtgctaccgcatcgagggcgtcaaccaccaccagaagtgccgccacctcgtcgaccagtacctcgaggccacccgcggcgtcggatggggcaaggacgcccgcccgccggagctgcacggtccgatgagatgatcccccagctctaccatttcgcttcctctagtttcgttttctctacttgattgatgataccattgccttgttggtgttgcgcagatcccaagaaggtggttgaggccgacgagtagctttgctgctgctgctgttcctgggctggagaggtgaggctatttcttgtctgatgaagcactccaattttatctattatgtgtcaattatgcagcttaaaatgaatgatttgttgttaatattaacttccatcattctacaatacttatctattttgtgtcaattatgcagcttaaaatgaatgatttgttgttaaacttaaccatcatcattctaacaatacttatcctagcatttagaggatgtttgcaattcagcacacacacttgagtaattaattagagctgcaataccctgttctatgttttgcgtggggcataacctgttgttcgatttgattggggattttgtgtgaatataggaagcgttttcgtttaggaaggttcggagtcttgagactgcctaccgtttccattgtatgtagttgtagggataccttctaatgaacaaattcagcatatgccataaaaaagaccattcctgctctcagggcatataacgtaaggaacaatgggtaaagggaaaagtggatacgtgtgaagggggcaccaatcttttttcctttggaataactctatatttaccattagtgctgtcagctatttagtttgtttaaatttatttctaaggacaattgaatggcttagaaacactccacatacattcaaaaaaaatcttaaaagcatcctctagcatgggattctccatatgtcatgatattctgctatcgctctttattgaagatccctctcaatctcttgaccttatctttgcttgcctcgtaagatcgaatagaagaatacatgtggaaatattttgtgcaaacataatctccagcctcttaatctgatgtgatcatgtgatattcccattccaagagggaaaaatgctgattataatatggtcattttgtgatgactctggaatctcttttgtttgattttaatatatcatatttctagtgcccgagtgtgatcgttcacagacatggcgcagttaagttcgctatttactccacatcacaaatcctgccttgtccatcatgcttgtgctactatatgtattgataattatttgcttgatatcttttgctacctctgaagcaccatataactagcatttgatttatcatctgttgaagaaaaatggaatgggaaaaggtacaactatatttatgttgtatagttatagatcatgacttgaatcgcttttatcttttgtgcaggttatctttctattggatttgaaaggagtaaaaatgaactgctgcagtccttattttgacctctctagttgctcatggatttacaataaatgatgatgtcgaagtaacattgttgtgtgttgcctgtatttttccctgcccgttctataagagccgagcaaatacatgcttgaatttatctgccttgttcttgtactcaacgatatgaatgatatttagttttcatttaccctgcgccatagtctcccgtgatgccaaatgcagtgcaagtttctttttggattaatgctctgtcgagcactagctgattgctgattccgagccgttgtcaagctctgactgatgattacatggcgtgttgcaaaccgatcgttatctagtttgctccagtgtatttgacacatataaacgtgtgacttgaaagagatagcctattttagttgctgtttgtgttaggtaacatgtccatgttgtgacgttgccaatgatcagttgatcaccacggtccatccatgaggtcgatgatgttagttctacacaacacaacccaaaatgcaacaaccaactctctaccactgcaattctctctttgacacagattctggcctgctacattgtttgtgatttcgcatctcgcaaaacacaaaaaagaagggcaaacaacagaaagacggtggtgagacagttgcattttctcgaatctttttataaccatttgaatggcatttgaactttttgaagaaaggatagtgctcagagagacatctttcgtggaaaatgtggagtaggagacgcacgggtatctgagaaaatcaaagcaaggcatctgatacgagagaacaagaaaaacattgggtgaataaacatggagcaaaaacaagaatcatgcagcaaaaaagcaagcaagttgcatccatgacctggataaacagaaaaagaaccaaacttttttcatatgagatgctcactctggataatgacccgtctcggccacaaacaaccaatcacatatcacattcccaggaaatgatgttgatgatacatacatccatccacaatccacggattaataagcagatcgatatgcacatccccagcagggggatcctctagagtcgacctgcaggca

SEQ ID NO: 15241 - DNA, 14542 bp, Oryza sativa
atctagcatgaaagaggggttatatactacacaaaaacataaacagcacccaccatgaaacattaggattattctttaaacttctaacatcaaggggcggtgttaaaaaaaaacatcagctgggatggagaatcctagtgtgactgatgtcatcgattgtacaaagcagcttatgcaaattaccatattgaacgacctgaaacttcttacatatgctgcgcacaagaaatactcacagcattgttctgtaataattcgagttcattaaccggtaccaattttgatgcaaagagagctatggacattctccttaccataaccaggccttacaatttaagatggaaactgaaaaggcctgaggtaacaatatgagaaactgcaaagctgttaaggctagtgtgtttagataacagtgttaatatttccatatttctttgccctaactactataaacagttaatgtgctgtttctcacaaattttaactccaaaactataccataaaaattactctctttacacacacacacacaaaaaaaaaactccctctgaagcaatcatgtgcacaaaccatgcaagtattgggataattgtggcatcagagaacaagataaatgaactaagcagttgaaaagaaacacatcagaggctacaaagctgaatgaaaataaagggtgcaccagaaggaaagagtcatatatatttttctaaaaaaatcgttttcaacagcagtccaccagatgaacaaaacattaacatatcatagtcacaacaacatcaagaagttcaaataacaatatcaaccaggtttataggccttatatgttgggatcctcgtattatatttgccaccaattacactcagaagtcagaaaaaaaatatgtactcttggaaatgtgagcattccatttttttcaccttttaaactgaagaggataaagggccgttgagacatattattaatgcaggatataaatgttcaatcatatcctaccatttccctttcaataaaatggataaactgcacgatgcaacttacgctacaaacaaaacaagatacatatagcttgccctggacataaaagggaactatccgtaggtcaatcaagtgatcaatggacactgaatattagacagtacagaacacagatagaacaaatttgagatgcgccaaacttaaaatatctcacagtatgaaggaataagaaaggggcagcctgtcattatgcaactttgacgcggcacagcttgtcgctacgccagttttggcgccgcagcgattcactgcccagcacttgctgggcaaggttccaaccaatggaagcactttaaattcagccaattagtgcagagacatgctcaaaagaaataagatggaaatgaccaggctcaaaccaacttaataaacaaagaatcaatcaggtagacataacaatatagcatcctttccgaagcatattcaaccttgttcactgatttaacaataatgatgataatagaactggtgacataaacagaataagaatctattctgcatgcaaatgaccaaaggatagaaggtatgcatcacccaagggtttcacatgtatcaatttttaatttaattgagaaacgttgatcatcgcagtactgttaaggatatccagaggaaagaaaggacccagtgattgatcaggggatgagattaaaccatttatcactactatgttattacttgcactaagagagtctttttttttctaaatttttctaaactagttcatctagttcacgctactaccagtctaccagcattctggtaggtaggtacataagagaaaaaaaatatgagcaaatttggcgactcaagaacaaaaattcatccagtactcaggaacaaaagttttgtgcaccgagcaaattttctttgagaacttcgttcttcatttcttttctctctcttggctgctctaactaaactagatgaagcaaattacgaagaacagaaggatacctaaaacaaccagtatgaaaggagttaggagaaaggatttacaccgcaggtagggtctgtgcatggcaccggtgaaaccccgacatggtcaggaatccgttaatcccgatctccccatcctaattgcttgctcgttattcccctcatcagattttctgcaaccagcatacctggtacctcgcgctgacatccaggcattgcacgtttgcgagcatggcagtcgaaattgatgtggctcatttgacatcctcgtcattggggttggggttgaggttgggcgtgtcgtcgtccttgtgaaccatctcccagaagaaatcggtgagcacagtctcgtatccgggcatcttggcatagccggggaagtagttgatgtcaatgacgaggtagcgatccccagcgcgggcgtcccggatcatgtcgaagttgaagaggtggaggccgagggcgcggcggagggcggcggcgatgtcgttgatgaaggcggtgggtggcatgatggcgtcctcgaggcgcatgtcgtcgtagtactcctgggcggtgcgctcgttggggaggttggagacctgggagaaggagagggagccctcggcggaggcgtcctggaggacgtcgctggagacgtcggggaggctgcggcgcttgacgcaggtgacgtgggcgccgacgacgtataccttgaagatgacgccgccgtggttgacgaactcctggaggacgagcggggggcggagcttgcggaggccctcgcggtggtagacgagggacatcttgtgggacttggcggtgccgtcggcgacgaggggcttggcgatgagggggaagcggagggcggcgaagaggccggagtcggagagggcggcggcgtcgtagacgacgacctgggaggggatgcccaaggtgtggtggtggtgggcgtggagcgggacgtcgagctcggagacgacctggagcatggagatgcggttgtggaggcggtcgatggcgtggggcgggtcgacgacggggacggctgggtgcgcggcggagaaggcgtccagctgaccgcgccactcctcgccgtagagcttgtggatgaggaggtggaagggcccctgctcggggaggggccgcgaggggtcgacggggacgaggtccatgccgcgccccgccgcgcgcgacaccagcgacggctggatgaagctctgctgcttcttcggcgccagggcgtagccgatgaggtagcgccgccgctgcccgtcgccggggaggggctcgtcgccggccatcgattcggttgagttgggttgggttgggttggttttgcttcgaatcgaatcaagcggaagcggctctctctcctccctcctcctcgcccacgcgatttcctttgttttttctttttttttctttcttttattttatcagaagagacgagacagataaaaagaaggtgggagtgggagagggggggctctcttctcctcgctttttgcttccatatgaaccaggttcctcgtggccttcccgtacacttcactgcaccactcttgtcacgtcacttatactagtagtacattttacaattatatatactactacatcatccctaaccatgtactgtatggcgttgattagttcatttttacatttgtagagagcactaccttatccatctacagatactagtactatctactggcatccttcgtatcaaattaacgtagttgcaaatgaaataatggatgagatttgccttcacaaaatactccctccatattttaatattttaatatatgacgcgttgacttttcgatcaacgtttgactattcgtttcattcaaattttttgtgtaaatataaaaatatttatgtcatactcaaagaacatttgatgacgaatcaagtcataataaaataaatgataattacataaattttttgaataagacgattggtcaaatgttggataaaaaatcaacgacgtcatagaggtagtacgtaatatagctcgagtgtcttcatcttataaaccttgaaccgcaatatatatctaacaaccattatttttaggtttagccgtaaccgttgtttttctttatttgtgcaggcatgcatactcctacacaaattttgccttaattttgtatcgtccatcccttcctcatctttggctattaccgacagcaccaccgccgttaagcctctagatctcaccttaatctccctctaaactcaccctctttatctaaccctcattttgtcccttctcaaccaaagatctaaatcaggaggggtcaccaccacattctctccatcagatattgctggagtcagaaggaagaaacatatagcataatcttgattcgaattggatagtagaaaatgtataagaactctcttttgattttttctatcgaacgagagtcagcaaataaagaagcaatgtttttatctagcataataatatgatccaatatattaaactttatcttgaaatgggtcatttttgtaatcttatgtgttttatcgtaattttatcttatctatggatatcattttctaggaggggcatagtgttccgttgtagctcctttagatcttgtttgtttgtttaattcttaatatggagggattcgagggtcgggattgagaaaaataatttaacaccataatagatataatagatatggaataaattttctttaaattttttcgtgagagggattaatcaaacaagtccttaaaacgcttctccctaatttggtaaatcttcgttgatacatttgattacatttttggatcacaatagcacgtaagcagaaaccatgtatatatgtgaggtcatagaggtggattgatgtgaatagaaagaaagaaaagcattaagaggaacattttgacgtaggttgaacatgtcatcacattagaaatttagtgcaataatataggtaagaaaagaagaacaaaagaaaaaagtcaaataaacagtactgggcctcgccgcaagtgagagattagttaatgacaaggtttgctagtaagaagggtgtaggggatgacacgatagtgagatgattaattagtagtagaaggttgaaggaggacgtgttgttagctagtgttaagagtggtgattagtcaactatagtcagtgaatctcacctggaggtgtttgttattgtgtggacatggtccatgagatccatgcatgcatggtataagtggcaccgcacctgatacggtttagaaggtataagtgctgtaatattcgtgttagcgctaggaccccgagcaaaattccgcggggatacaagaggtgccatgtgatgctatagaagttttttgtccgtctaggtccccgttcgaatacactaaaaattttggataaaaatggcacgcttttcaaactgataaatggtgtttcgtgcgaaaattttatatatgaaagttgttctaaaatatctgattaatctatttttcaagtttgtaataattaaaactcaattaatcacacattattaccacctcgttttacgtgaagcacttaatctttatctttatcttcatctcctccaaggagtcacgacacttaagcaaggggaggtgttagtatatgttgtgcgtggaatgtggatgtggtccatgagaagaaaggacccaccccgagcacatacatcatcggagcggagaatggtgatgaaagagaaattggacattctaccgctaccaaaagagggtttcgctataatgccattccgccgatttgatttgataaaatgccacccccaagcgatgcgaagcatttgttttgccatattcgccatttcattccattttcaccattttttgcacccgggctgaccaaaatacccctttaggtggcttcttctagctcaacccttctctctccttggccactcgtcgagctgaggaagcggccatgagaggtggatgcggcggcggagctcgatccggcgtcggtggtgccggccgcagcctccgtctcagggctctcgaagaggcagcccatacggcaaaggcgggcgcgatggtcacggtggacgagaggcagcggaggccgaagcaccatcggatgcggcggtggtgactgcggcgcttgagctggaaccccatggccaacgcggcggacgccatagtggcgggcgggtgtgttggggccgaggtgggcacgacggctgtgaggcgacaacaccacccttcgttgcagcggtagaaggggaggtggtgaccctaccgccagcggtggcatcgaggccgtgccggacgtaccggatgaggccgttgtccgtcatgctactcccctaccgccactggacgcgcatggatcccctttctagagctcgatgagtggccaaaagagaagagctgagctagaagaaagggtattttggtcaacccaggtgcaaaaattggtggaaatggagtaaaatggtgaatatggcaaaacaaatgcttggttgggggtagcattttaacgaatacaatcggcaaaatagcgaaactctctcttttggtagtggcagaatgtccaatttcttgtgatgaaatgagtgcgagggacacgactgttgtagaacggctacgtcaacggatcgcccagatccgctcccttccctcccacagaagatggggcgcgagaagatgtagaatcccgtatcccttcccaaacaatcataccataggagacaatggacacaggatataggggtggagctctctctttattaatcaatgattgtgtgtacaatgatgggcacccctgcccctctatttataggtagagggagtcttagagataagaacggttttatctctaaaaccgattcggattggtccacaagttagaatcttatctccccatggagataatattcgtaacactcccccttggacctatccacgaccaacttatgcctcgtcaaaactcctaccaaaaccctgtgggaaaaaggctaggagaaagagtacacagttgtcgccatgcatcacacaccgttgcctcattaaaaacctttgtgaggatcgcaagctccactcaactaaggaaaagagtacaacgttgtgaactcacctgtccactaactaggccaaattcaggggtttctctccccctaaaccctgcaagtctctaagtcttctcatcccaatgtctctaacgaatttttggaaagtacatgctgggagagacttagtaaacaaatctgccaaattgtcacatgacttggattgcaggatcttcacctcaccttgcttctgaagctcatgagaatagaagaatttaggagcaatatgcttcgtcatattgttcttaacatagcctagttgcatctgtgcgacacatgctgcattatcttcatagataatcgtgggggcattggagatactcaaaccacaagaccgttcaatatggtgagtcatccttctaagccatgcacactcacgtgtggcttcatatagtgcaatgatctctgagtggtttgtagacgtcgctaccaaggtctgtttactagaccgccacgaaatggctgtaccaccacagagaaatacaaaaccagtttgagatcgggcattatggggatcagacagatatcctgcatctgcatagcccaccatggttaagtctcgttgccttggaaagaagaggccgagatcttgcgtaccctggaggtacctgagtactgtcttaacgccaacccaatgtcttcttgtaggagacacactgtatcttgctagaagatttaccacgaacgcaatatcaggcctggtgcagttcgcaaggtacatcagtgctccaatggcgcttaagtatgggatttccggtcccaactcttcctcagtttcactcctaggacggaataggtctttatccttatcaagggatctcacaaccatgggtgtcttcaaaggatgagcctttgacatgttaaatctctcaaggacctttttagtataggtcgactggtgcactaaaatcccattagggagatgctcgacctgaaggaccaagcagaacttggtttgacccaagtctttcatctcaaactccgtcttgagataggcagtcgcctcctcaatgtcctctacgtggtcaatgatgttcaaatcatcaacatagactgagatgatacagaaatcactctgtgactttctgatgaacatgcagggacaatcctcactattgacatatcctttccccaaaaggaagtcactcagtcggttgtaccgcatacgaccagactgttttaacccatacagcgatctttctaatttcacactgtacatgttgcgatttgctttgtccgggaccttcaacccgtcagggactcgcatgtgaatctccatccaacgatccgtacagatatgcggtcaccacatccatcaactgcattttcaattccatgccagctgccatagacattaagtatcagaacgttatgccactcatcactggggagtaagtttcatcataatcgatgccgggtctctacgtgaacccttgtgctacaagcctcgctttatatctcaccacctcattgttttcgttctgcttctggacgaaaacccacttgtacccaacagggtgcacagtggggggtgtcaggcttaccggcccgaagacacgcctcttagcaagcgagcgtaattatgtctcaatcgcttctttccatttgacccaatctgagcgctttctgcactctgccatggacttaggttcaagatcatgatccactatttcagcgatcttggagacaaaatttatgtcgacatgtgtagtcttccgattatacaattctcccgtgatggcataatctgtggcaatttcttcactcatttcctcatcctggtttcccaaaacaggagagggttccgatgcaccagttggactaggtgcgcatgctagtctactgggcgttttgtcgttttggcgtccgtccccaggatggatctcctttgagactactgaatgggagcgtgatgcgagcggtactgtgttcagctcttgcggacgtctccgcttagcatgaatcagaccatccgggtctctcccccttttcctaggcttaggggctggagtaaagtctccctccatgggtatctctactctctccggtgcatttgccgcagggatatgcaactttgacactcctcttagatcagtaaaagcatctggtagatcattagctaagttctgaaggtgtatgatacgttgaacttcttgttcagcatctggcgaacgcgggtcaagagtatggatactacttgagttccattctatttcacggcattccttagagtcgaggtactttcctccccctaatgccggaaaatgctcttcatcaaagatgcaatcagcgtaccgagccgtaaacagatccccaattttaggctccaagtagtagattatggacggagactcataacccacatagacccccaccttacggtgcggtcccattgctgtacgctggggtggtgagatcggcacatacacagcacaactgaactttcgcagatgggaaaccaccggctcttgaccacgcgccagttgacggggtgaagcagagtgatatgcagacggtctatactggattagctttgcagcatgcaatactgcatggccccaacacgtagtgggtaaattgctaccctgcagcaacggtctagcaattaatttgatccttttaatcagtgactcagcaagtccattctgagtgtgaacatggggaactgaatgctctacattaatgcccaaggccatacaatagtcattgaatgcctttgatgtgaattcacccgcattatccatccaaatcgttttaatgcggttctcggggaactcggcacacagacggatgatctgtgcgatgaatttggcaaaagcgtgattcctcgtagacaacaagcatacatggctccaccttgtagaagcatctatcaacaccatgaaatatctgaatggccctgaccaagggttaataggcccacagatatccccttgaattctatccaagaacctcgaaggagggtcgaatgatcagctttcccgttgcacaagcgggacacacgaactccttagggaagtttttagtgtttatgctatgacctagtgagcttgtgactattttccgcatcatagtcaatccaggatgacctaatctctcatgccagattctgaaagactttgggttcttaaagatggtctgcatcgcaatgtattcatatgggggttttatcttagtgtagtacagtccatcgaagctccctggcattttctcaaccaccgtggtctcatcgccctcagacgatgtcatgaagagaaatttttctcctccttcacgggttgtggcaaggtggtaaccgcagcgacgaatatccttaaaggtaaggagtgtgcgttcagcacttgggtataggaatgcttcttcaatgaagatccttgtacccatagggaggacgactgtggctttccctgagccaactatgagaccattactcccagcaatggtgaggatgttctcatccctcttacgcagtgtcgtgaagtacttagtctcccgtagtatcgtgtgcgttgccgtgctatcaaccaagcacgtctcaggctccattggattgtactacgcttgttctatatgagagattgcattgtttcaagttaattgaaagaatgaaaagcaagaacatagaacaagacaaaggccaaacataactcaacgggaaaactttattaatgcaaaggaccatcctaaacacactgaccaggatgctttgctaaagcatcattattacatagatgactcaatgttctgaaaaataaatcacactgactcagtatgatgagctaaatcatactaacacatgatagcctagacttaagacacatatttgataacttgggaactactgcatgtccccatgtatgtcctcattcatgaggtcatcggtctcgccgtccccgtcgaattccccgaggtcaatatcgtcatccccaaggctgttatcagctgcagcagcagtcttgggatcaacctccatgggagcatcagcaggaggggtatcagttccagtcactttaacaaagtgattttccggcccctgcttcttcttccaatcctggtacatctcaatgaggtgaggttctgtgttgcaattgcgtgcccaatgcttctttgagccacaatggtagcaaccctcaccgccctgttgggatcctccactagcatcgtcagcagcgccactcgccgggttgcccttgcgacccttgcgactgcggggcttcttgcccctcttgacgaccctcttgaagtgtcttccattaggtagtgtgcggctaccggatcccttccccttggaggaaccttgtccagagttgttacccttctaatgaacaacgtgagcctctggaataggctgtgaaccaacataacgattgttgaagttggtcatcagaagtttactgtggacttcagcgtttaacaacgactgaatgagcttggagtacttagtgtacttagcctcacggtactgctcctgcatcatggaattcttggggtggaatgtgtcaagagtcttttcaatcatgtcttcgtctgtcacaacttggttacagaaacgaagtttgctgacgatgcgatgcacggcactgttgtagctttccacggtcttgaaatcacagaaccgaagctgagcccattctgctctagccttcgggagaatagcagtcttctccgcggtgtaccgttctctcagggcctccaacagcaggagaggcccacgcagctcgaggtactcaaccttgaggtcctcgtgaatgtgcttcctgatgaacgcaagtgcctttgcccgcttcggcatgggaagcggggcaacaccggctccttgtcgtcggatggattctgacagttccatcgcggtaaggttgatttcacagtccatggaccaggtctggtagttcccaccgttaacggtgaggatggggaactctttcttggcgtaatccgcatcagacatggcctgtttaacatgcaaaaaatcaacgccgggttaacttgcatgaaaacaaagtcacagaacaaagtagcatagtcatatgtaattactggtattttcccggagtttgtcttgcatttgttgattttctgtgattattattggccttatggcatttaatatcaagaattatgcccacagaaaacattacatatgcaagaaaataaacccaaataatgcttccggggaggggtcacttacactaggtgagcacaattttatggaagcattaatctagaaaccttatctagattttagttggagttgcatcagagttaaaagcaattaaattgcttaaaaacaccattacatggttgttaacgagtccagggactcacatgcaaaaaaaccaactagaacaaggcctaaactacaaagttgtagcctatgtacacaaagggaaaaaaatagggtccaaaaagtaaaaaaatactttcaacagtgaactttaggcgtaaaatcaaccatcccgaagggatttatacgcaaattttcagtagattagaataaccgggccgaaacgccgttcggtctacggtcttattgggtcggtttttaccgtagcggcccaaatatcctattggaccgaatgctacactctaggtccattagaatttctaatttactatttttagattcctttgtgtgggctgtctcgatctgatgggccattgcggttggtccgaggagagagcaggccggcccagccggcccaatgaggaaccgcaagaggaggggggtgagaggggattagggtttcccctctcccaccggcacctgtcacccagcaagccggccggagaggcacggtggcggcgacggaaggcgccgactgtcagtgtcggaggggattgaggcggcgcacggcgaggactccggccgacgacccatcttcgcccggcggcaagacggcgacggcggtgtcgctcccgagcggcgttcggtgcggcggtggttcggcgacgtccggcggagctccgccacgacccacacgtccagaagacggcggcggagcgtgctcgacgtcgacggccaaaacaccagcgacgacaaccgatcgcgtccggccatggcgtcccgacggaagctaatccgaagtcggcggccggtcgtcccatcctcctcccaccacggctcagggcgcgtcggcaagaggttgacggcggcggctgcccgtcctcggcattaggtcctgcggcggcggcgacatggggtgttggtctgcctcgtcgtaggcggtttcccgcaacggcgccgacgcgagggtcggtggcgttccatcagcgacggcgagcggcggccacccggcgcggcaccaaaacccatcgacgtgggtggtccggcggcggctcgcgtgctcccggcatggctccggcgaggtagatggctgagagagagagaaaaattgagggatgcggggggatttgggggcgtacgcgaggacgaccggttcggcccagccgaaccgggttcggtcccaaaacaggcatccggtcaattttccaattagaacacacggttttcttccggttttcatcataaagcaatagatgcaaatagatctaaaacatgaaattaatctactgctagatcatgtgcatgaaaaaccaatctactgctattattgcatcaaaaacatgatgaaaggcaagaaaacctaatcaatctactaattgcaaccaacaatttttaccgtagattgatcggcgcagtgggactcgaagcagtggcaagtcgattgcggtgacgagttagcagatcttgtcgtagcaacccgtcaacgtcagcccagtggtagagctgctgataacgtgttgtgaacggctacgacaacggatcgcccagatccgctcccttccctcccgcagaagatggggcgtgagaagatgtagaatcccgtatcccttcctaaacaatcactccacaggagacaatagacacaggatataggggtggagctctctctttattaattaatgattgtgtgtacaatgatgggcacccctgcccctctgataagaacggtattatctctaaatccgattcggatgttaaatctttatctccccatggagataatattcgtaacaacgacaacgcgtgcgtgagcgtggatctgtgcggtcgccaaccccgtccaggtgtcaatggaaggagaggacaggcgacacccgtgcgaccaacaccatggatccaacagtaggagtcatacatgggccgggctggaaggattaagggaagaggatgcacggcccataatggtcaacatgaacctcgttccgatccaggacgacgcctgggccgagtgtgtggcctgccctcacgtaagcccaacataaattcttgctcgatcgaaccaacaacttgaaagagtatgctgaatatggaattttttttatttataatttttcttattaaaagttttacaaaaataattttccattttgaaaattgacggaaatagtcgcctaccgccctctgggagggcgatttttaaaa

SEQ ID NO: 15242 - DNA, 9787 bp, Oryza sativa
aagggggggcatgaaaatttgcagggggcccccttgccgccctccgcgagggcgattttgcactgtgcggggggccgtctgcaaatgggcggcgagggggcatggaattttgcaggcggcccccttgccgccctgggggagggcgatttttgcctcccccctataaagcccagcccctcccctatgaaatttcattatattcactaaaaatccaaaaaaaacgaaagagagagagaggggagggcagcagaaggggagcggcgaagccctgctggttcgctcacttcatcacaggtatgctcccatacatcttttgcatttgtactaatatattacgtttgagtacatatgttgcgttttagttttagttccatatattttagcagatctgtagcacacagcacatatgtgtagatccagagcatagaatataatagtatgaattgagacatagacagtagtgttaattgtaagatgtagtttagtttgatctggagaatgtaacctacttttagaaatttagagaacaatattgtagagaatgtaacttagggcgtagtacagaaatgcgaggttaacgcagttattgttttcatcaggcacaatgtcaagtaaggtcacatttcagatagttcacggtgaagaaaatattagatttggtccagatggtgttgatctgtcagattttgtaatgacatctaagggcatcgataggcctgcggagagaacatttcagtcaatttatagttggttgttgagaggatttagaatagaccaagaagtctacacaatgtcagtatctgttgtagtgagtcgtgcaatagaaggttatttttgggaactaatgccgatggacagcactgctgcttggagacggtatgtggaaatggcttttgaacggtcatggcccctcgttatatttgtgtcggtaccagagaaagatacaaatgtttcaatgcaaaccgaagatgtggagggtcctagcaatgcaggggatgttgttggaccatcgatgcaaaatgaggaaaatcaaccaagggaggagcaggccatgggcatggcggatgagggggagagagtcggtataattgttgatgaaatggagagggaagattcgtataatgagcaagcggaggacgacgcatcatccgatgaggaaggtgatgtaatggccactgatttgggcaaatgaggacttctctggtcttgttatatcagagggtgatcatgtaccctgggagtataaggagtacgaggtaattgagggtgccaggtatgctcataaggatgagatgaagaaggcggtgaagcattggcaagtttcattgcagagagagtttagggtggtcaagtcaacaaattatgtgtatgaagtgaggtgcatgaaggaagattgtccgtggcgtgtccatgcatataagggtaaatggaatgattattggaaagttagcattgtgaccgagcacaagtgctacttacaaggggtggagaagtatcaccgaaacatcacttcagcttttgtggcaagtgagatgtacagcagtgttgttggtaacattggctttgaaccaaaatcaattattaggcacatcgagaacaaattcaagtacaccataagctatgcaaaggcctgagagccaaacaaaagatcattgagatgaggtatggcacatttgaagcttcttatgataatttgcctcgtttgttagccaccattgcccagaggaataataatacttactatgacctacatacatttacatcggttgaagatagaacaaagagtgtgctgcaaagagcctttttctcattgggtgcttgcatcaatgcttttgtgcattgtcgacctgttctatgcatagatggaacttttatgacaggtaaataccgaggtcagatattgacagcaattgggtgtgatgggaacaaccaggttctacctatggcttttgcatttgtagagagtgagaacactgaaagctggtactggttcctagagagagtgcacattgcagtggtgcgtatgaggcccaacgtttgccttatacatgatcgtcatgcgggtatgttgcgggctattgactacttgcagaacggttgggatgagaagggacttccagctaagtggcctgatgttcggagtcggtggtgcatgcgtcacatgggtgcaaatttctacaagcaattcaagaacaagcatcttatggagctctttaagaggctctgtgcacagaaccaagagaagaaatttaatgagttgtgggacaagttggatgagttgacaacgaagcaaacagatgagcaatctcgcagaccacaagttgaaggtgacgagcctcccatacctcttggtgcattacatgatgacccaccaacaatgagaaggaggtcagggtcggccatcagaaatttctctcagtggattgagaatgagcctaaggagaagtgggctctattgttcgacaccgatggatctcggtatggcataatgacaaccaatttggcagaggtgtacaactgggtaatgcgaggagttcgagtacttccattggttgctattgttgaattcatccttcacggcacgcaagcctactttagggatcgatacaagaaaattggtccgtccatggccgataacaacatagtgtttggcaacgtagtgacaaagtacatggaagataaaatcaaaaaggcacggagacatagagttgttgctcaaggcacacaagtgcatcggtatgaaataatgtgtgttgataggagcaggcgtggtatctatcgcaagcaagccgtgcaggaatgtgtcttgaaggcggatggtggatgtacctgcagttgtatgaagccgaagcttcatcaccttccttgctcacacgttcttgctgctgccggtgattgtggcatatctcccaatgtgtacgtctcaaattatttcaggaaagaagcaatctttcatacatggagtgaggagatatatgggttcgggatctcaggatcttacacaacgctgagtgcccaagttttttatattccagatccatctaagtttagggtgaaaaagggtcgacgccaaactagacgcatcagaaatgatatggatgagtcagaagcaggtgggaggactttacgctgcagcaagtgtgatctgcgcggccatacttacaagacatgcccgaagaatgcagaagttccaagcggcgcagatgctagtccatctggacaggcaagtgatggtaggcgaccacctggtgaaggaacaacaagcaggcgcgcaaggccaaggcgtcgtcgcgcagcaggcgattccatggtgtaacaatgctttcgatttaggaaataaaatgatgtaatgagtgttcggactaaatacttctatcgtgtaatttcaattcaatcttgttgtaatgagtacctccgactattgttgtactagtagtattgcgaactattcggtgttgtatcataatgttatcgtgatgagtgttcggactaaacacttttgtttgtttgtactcttgtttaatatgtgttagtaattcgcttatgaacatttattacttatgttgaactaattatttatatgtttctgatcaacctatttgatgcaggtatggcgtacgacacaccggcgctgttgaaccgtgggattgacaggaaccaccgctcgttcctgtcagcagtcgagggtgcacagctcggcaccttccgtccacgcacgtcgcgcgagtggttgcgtgtcgacccccgtcacgttccttggtacgcgtatgttcacatttcaactcaactttgctttgttttatacttatgtttgaagtttgctctatacaggttgcgtgcggcaggccttctaccactttgtaggcttgttgaggcggcggcggacgaccgtgacccagcgaagcggtgggatgcagaccggtcactccttgccgctcttgtagaccgctggagacctgagacgcacacgttccaccttccctgtggggagatggctccgacactgcaggacgtgtcgtacctgctcgggctaccgctggcgggagcaccagttggtcccgtcgacggtgtttttgggtggaaggaggatatcactgcgcgcttcgagcaggtgatgcgccttccacacctaggaccgaccaccacccttcctccgtactctacagtcgggcctagcaaggcttggttgctccagttcactgtaagtaaataagttgttattatcatacgtgcttatttgcgaccggatcagtgttttgtactaacatttcattcttaactgtaggcggaccttctgcaccctgacgctgatgattactcggtccgacgctcccttgaggcgtacctgttgtggttgttcgggtgggtgatgttcactagcacccacgggcacgctgtggacttccggctggtccactacgcacggtccatcgcggatgctcagccacaggacgtgccgcagtggagctggggttctgccgtgctagcagccacgtaccgtgccctctgtgaggcgtgcacgaagactgacgcgggagcgatcatcgctggctgtcctatgttgcttcagctttgggcagccgagaggtttgccatagggcgaccagtggtggacagcgcaccctacggggttggtcgcagcgcgcagtggccagaggacggtcccacgatggggacttactggtgtcgacgtggggttagtgcaacttcgctgcgttataagtttatcagtcctcttcttttttttccttcacataacatgtctaattccgatcatgtttattgcagcgtcgttacgctcacgtccaggtgagacgtggttacccggacttcgtgttcgagtttgaccgtctccagccgagcgacgtcatctaggagccgtacacagaagaggccgtcgctgcgagagcaccgctaggactttcgtccttgtgcacacgcgaccaggcttactggctcaccatcctgccgatggtgttcgacattttcgttgagcctcactggccgcagcgtgtgatgagacagttcggacttaggcaggtgtttcccggcaacgtgcagccgaccgtcccccctgccgaccactcgtgagttcggattgttcatttctaaatttttatgataattacatcatcgagccatacaatttacctctcttcacaggttgactcgacggggacagctagcaggcgcactttgggctccacgtgtacagcagtacgttgacgactgggtgttagctacagaggaggtgatcaacgagctcttcccacacacggaggagaactaccgtgactaccttcgctggtaccttcctcgcactcgtgcgcgtgtgaccttcactccagacgccccagagccgcacgttgccgctgtcacggacgcgtatcccacgcaccgtgaccgagactacttcgtggcggtacgtccaatttgtattacttccaacaattatgtcatttatcttgcataatataggacaactactgaattttttatttccatcttgcataggctgatgcggcacgggatatcagtgccgatatcaccgcagtccaggtgaggttgaacagaggtttgcacttgactgacgttgagcagaggtcgaccttcgaccggatgcaggagaagatgcgtgcggtcatgcgcgtcttctcctgtcgcagcgccgtggacgtcgtacctccagctggtccggtacacccacggcctcgcggtcctaccgtcggagcaggacctcgtttgtcttcgagcgcccctagcttcggagcagtgcgacctacagcaccggtttcgcacggtacagttcagcccagatattagttcatttttgtttcagcttttgcacgaatgtgtcaccatgttttaactgcacgtttcctcatcgcaggacctcgtatgccttcgagcgcgttcgcaggcacgaccggcgcttccgcgagctccgcaggggcgttcgccacctcttcaggcgcgttcgccagctcttcctctcacggagcgtcgatccctcgcccacacggtactttactttttattaatactgttaaatacctatacgaaactgatggtccttgtccagcaggatttgcagccgggatcttcggtactggggcctcttcgtctcacgccggtaggactggtcctactagccagttctacgacgatgacttgcacggtgcagaccaccaggacgtactaggctcctctcagcttggaggagctccagaggcgcacactcaggagcagccagaggtcacacctgtacaggcaggacgggttggccgtgccgtacccccggaccgactcacgtactcccaggggcacattagggcgcagggtaggagggacaggggtaagaggcctcgtcagtagtgttctacctcttcagtccttatgtgaccgtttcttttggcttacaaacttgtaaagcagtactacttttgctattactactgcagtactacttgtgtttgtctcgtctacgtagttcttttcattcgtatggtgcttgaacaacttatgctcacaacaacacactttcggcgcttcacggtagtgccatatccagtagcgcgcacagtccacaacagcacacatgaaaagcggcagctcgagttatcactatcaactttcggcgctgcctgttgacataaagtgaatcacgcccacgcgtgatcgtcttgtcacatctaatgaataatgtatctcattgagttcacatatattgcagtgaaaacgacgctatataattgacaatctgaaggcaacctcttcatatcttctttcccactaccacaccacacacgaaaatggaagcctattaattggtaatacgtaatctagaattgagattatgtacaacattcttcactacaattttacattttggcagcaaaccaaatatgatcaaatgcaattttaccttaccaaatatttggtagtgccaaaacttgcttatattttggcattaacaaaatatttgtacggtaacattccaaatatgcctaaaaaataataaaattgtattttaccaatcttggagattttaatcttgtatagttttcaatataaaaagatttgataactattgatatttatataaaaaaatatagagcacagtacaaaatcgccctcccccagggcggcaagggggccgcctgcaaaattccatgccccctcgccgcccatttgcaggcgggcccccgcacagtgcaaaatcgccctcgcggagggcggcaagggggccgcctgcaaatttccatgccccccctcgcccgagagcgaacggccgtctgccacgtcattttcgccgccctctgggagggcgatttttaaaaatcgccctcccagagggcggtaggcgactatttccgtcaattttcaaaatggaaaattatttttgtaaaacttttaataaaaaaaattataaataaaaaaaattcctgaatatgctgtgttgtgcgatggatgatctcactcacaccaatgtcccaacggatggatgtattaatggatggacatggaaatagaaaacaaaagttgtattgtaggagtatacaatacaatacaattaggaaggaatacatcctggcagtgaggagggagatgaaatgaaactagcttgaaagaggtagtagtagctagcatttgactcgagtataattaattagcagagtgaatttattatgaggtgttacataaagaagcaacaagtctggttatccatgtgcaaagtgtggtacggtgtggatgaatcatccagccgtccgtccgcacttgaactgagctgctctgctctgctcggcggcctgatttgcatcttccaaattgctcgatctgctcgccgccgcgcgccctggcttgcactgcagttgaattgatctctggtgttcatcagtgtgtgtattgacgatggatgtagccaacgatccatcatcaagaaggcgctagctactggagtatgtacagaagaagcaaactgatggagcaaggatcgatgtgctagtaattaatttgtacaagcgcaggcaggcaggcaggcacaccaggatggatcgtgtctcgatctgcctttgacaaaagcaagctctcatatgtacacaagcaaaggcaaacgccgggttgggttagcaggacgccggcaccagcggcggtttcatctcatcctctgcttcgtcgtcttcatcctcttccgcgtcccacaggaaactcgcgtacgatccaagcacgtagctgcacgcacgcacgcacgcatcaaatccaaccgtttcgttaattgtttgattctctgtctttaatcaatcaatcagcaaatttagtagtaataattagtaccagtcatcgggcgcggcctggacggcgcgctccaggtaggcggcggcgcggtccttgtcctgactcgtctcccacagcagctggccgtagaggctgagcaggtcgccgtcgtcgggggaggccagcagcgccctggcgtagcactcctccgcgccgcccaggtcgccctccacctcctgcaggtacctcccgtagttgcgcagcaccagcgggttctccggctccaccctcagaacccgccggtagtactcccccatgtccatgtgcccgccgccgcctccgccgcgcccggacgtcttgtcgtcgtcgtcgttgcccttgccgcgcccggcgccgtccaccaccacgaccacgtcctcctccaggatgtcgcggaggaggaggggcagcggcgatgatgccgtcgcgggcgcggatctggcgatgtcggcgtcggaggtggcgcggcggaggctctgctgctgctgctgatgatgatgatgcatgctgcgcggggagacgcacaaggctgtgggggagcgccggaggcgtgggaagagggaggcggagcgcgtcacccgtgtgccggtggcttccatggatggatttggatctacttacttgtcgatcgctgaggctgagcttgagcttgagctcgccgccggggtgagtgagttttatagaggagaagaagcaggtgacggcgagattgacggcgtgaggcagtcggctgggggagcacgtgaagcggccgtcccgtagtacacgcggccgtcccatgccctcggttttgttggcctccgctgctggtttctttctactccacactggagtaccacctttctccaagtctccatccagccaaatgcacttgctgctgctgctgcttgtaatcactgcatctagccaattgtatgtaatgtatttctttccttgtttttttcttgtttcttgctaatgaaataattcatcctctccgtggacgcataaactttaacagttttatgtttttttctttttggttaaaaatacaaagacatatactatatagttatacattttaatggatatatctaacacggtctcataacatattaattggagtattaaaacatgttactcccatccttcttcaatagtaatagacattttgaccgtacgtaacatgtcatgtggaacaatgcaacaatttagctcaaaatttaggatcaatttgcccttgtcaattgttaggcaattcaattaatgaactaaataaagtggaggtgcaggaaagggctgaaccaaaatataagtatggggcaaaattgcaatttttattaatgaaagcatgttcacgataagtatatattttgaaacaattaattaatggtctggttaaattgtcaattattcacaacgaaggagttataaataggatatatatatacacacacacacacagatatcacttgggtatatacatttgctc

SEQ ID NO: 15243 - DNA, 4382 bp, Oryza sativa
ggtcaggaaagaacacccagcattgaaaaaaaaaatcaataacttgatagcctcaccttgatcgaacctggagggatcacaatgtaaatctgctcaacgatttcaagacagtgctcaacctaaggcacttcaccctcccactagacttcacactctgatacaagaacgttcgtataatgattaaattaaataaaatgagcaatactccaatataggatccaatacttcctactctctgccagttatcacacaattattttttacagttactaggggaccaattaattaataccaccaagaggcagctgtaagttattacttttttttagaatggacaactgtaagttacttttatactactatatagaatgttcatttgtattagccatagcttgtttctacgattgtaacaataggaacggctatatatttattttaattgaatgtttacaggagtaagatattgttgttggtatatgttcctcaaattaacaagagttggctgtgggttttgctgttgcaaatcacgatcgatgaaggaagagtatataacgagtaacaatactattaccattattcaagaaaaaacaatactattaccatgtgcaatcaaattgccctaacaagcatgacgaagcactgtttttctgaggcacatcagtacactaccaccatgcacaaccagcagcacttgctttggcatacttttcagtgacactacatctgagaatatcaaattgtaagccaaagaaaactaaaaggggagcccttctcggagcaagaggtgcatagggccattaaggagatgcccaccgacaaagccccaaggctagatggcttcactgggatcttcttcaaagtctgctgggaaatcatcaaagaagacattcttctggtcttagactcaatctataatctcatatgtgcacatctaaatctgctcaactccgcgaacatcgtcctaatacctaagaaagaaggggctgagggggtcgcggactacaggccaattagcctcattcacagtatcgccaagattttctccaagatgcttgcgctgcggctaaggccacacatgcatacgttgatttcggtcaatcaaagtgccttcataaaaggaagaagcattcatgacaacttccttttcgtaagaaacatagctagaagataccaccgcttgaagcgagcaatgttgctattcaagctagacataactaaggccttcgattccgttcgctgggactaccttcttgccttgctacagcgaaggggtttcccaacaagatggagagattggttgggggctattttctcaacgtcaacttcgcaagtactcctcaatggttcgccagggcagcgaattaagcatggcagaggcctcagacaaggggaccccctttcaccactgatattcatacttgcaattgaccccctgcaacgaatcctctcaaaggcaacagagctcagtgcaatctcaaagttgcgagggagaacgacccgtctgaggacctcgatgtatgcggacgacgcaatcatcttcattaaccccactcgaggcgatgtcacggcttttgcagacatcctacatcgctttggcactgccactggactcgtcaccaaccttcaaaaatcccaagtggcggccatcagatgtgacaccattgagttgacggaggttcttgagggcgttccggtggtaagagcaaacttccccataaagtacttgggcctccccttggtactgggtagactacgaaaggcggatttgcaacctatctttgacaaaatctcaggaaggataacaaactggacagggaagaacatggcagcagctgggagaaccacgctcgtcaaatctgtgcttacgacacaacctatctatctcctgactgccttgaaaaccatgaaggaatcccttgagcaaatagacaagcagcgccatcgctttctctaggccagaacgggagatatcaccggaggaaaatgtaaagtcaactggaaaaagacgtgcttgccaaccagtcagggaggattgggagtcctagatctagagaaattcacgagggccttgaggctgcgacggttatggcacgagtggaaggatccgaccaagccttgggtgggactggaaacgccctgcgatgaaattgacaggagtcttttcgccgcctcaacaaagataacaattggagatgagaacacgacgcacttatgggattttgcctggatcgagggacaaagacccagagacctcatgccactggtctatgtgatctctaaaaacagagggaggtctcttcgaaatggaaaggaggaggatgcctgggttcaggacctagctctggaatcacactcgcctattatagtagaactagttgaacaactggttgtcctgtgggaagcggtccggaatgtccacttaggcattggagaaccggaccagattacctggaaattcacaagtagcggacgctacacgacctccttggcctaccatgcgtaatgtcaaggaacaccgagcacaagtttcaactccttaatctggaaagcctaggcgccggggaaatgcaaatttcatgcttggctcatcattcaaaatggagtatggacttcagatcgacttgcgacaaggggatggcaaaacaatgggtgtttgtcctctgtgccgctgcgaggctgagacggcgctgcatctcattgccacttgatatactaaaaggatatggggcctcgttgctggatgggtgggctaccagcagattgagccggctcaatgggaggaggcactgtcagtgcaacagtggtgggagaaccttgcaaacacgccaaatgctccgaaaaaagggctccgatcactcataatgctaattgtataggaaatctggaaagagagaaatcggcgaatctttgaccataaagaggtggcaacaagtttcctcatgtcgagaatcaaagaagaggctaacctttgggctttagcaggggtaaagtggctgcgcgagttaatcccgcattttgtatagtgtatagctacaggctccagattttttttttcttttgtccctaggggttgtattttctcctgctctattcaataaaaaggcactctagtactgttttccgttaaaaaaaagagctaacagattgttttgtgtgtggattagagtacatgatctgcaatttgaaaagcacagctgtctcaaaagaagtctagaactctatatcagttcagtaattaaacttgataattctttggttttttagataatggaaatggtatataatgattctttgttcaccaagagatgaatttttttgaaagtattcaccaagagatgaattaatctgcttttgacaaaatcaatgaattgggagcgaaaataaaagtaaaaaaataacagaagcacgttggctatgttttcaagcttcatgtaaagttttaatttaatctagggatgatgtcttaaaaaaatgagcctttgggcttgtaagtcaagaaaggtgttttatttggtcgctacataaaaatggctatttttcggtcaaatccatgtataatgcgatcatcaattccaatgtaagaatccacaagaggatcttatgggaggtaaaggtaccactaaaaatcaaagtatttatgtggtttcttcacaaaaaagtaatcttgacaaaagataatctcataaagagaaattggaggggaaacaagcaatgttgtttttgtaatacacaagagaccatccaacatcttttctttgactgtcatgttacacgttttgcttggcaatgtgtcttctttgccttcaacatccccctccccacaatgcaaaagatatttttggtgactggctaaggggagtgcctagacccacaaaaaaatgattttatttggagctagtgctttatgttggtcaatttggtgttgccgtaacgatatagtttttaaccataaaaaaatgcctaacatcatgcaggttatcttcatgtgttccaattggctccactcttggtgtatgatgctttcacaggaacaacaggatactatgcgcaatggtgctacacgcttggaattagtagccaaggaacttttattccattttggatggcgtagtacctacagaatttcgtgatagaatctacgtgattttgaaaaaaaatattattttagtagattatatcatcggcagaagttgggggtttgtcccatctcgccttttttaacttttctgttcacgtctgaattttttggctgtgtgcctacgggcagaggccggagatgtaacacatttccattattaaaaaaaaagtcaagaaaggtgcagtcaatgcagctatggaacttataggtacatctgtaagcaaggtgggtactcaacaaagtc

SEQ ID NO: 15244 - DNA, 903 bp, Oryza sativa
acacattcaggtattaaagcaatatcttcaggagcagaatagagacacgcccttgaaagcaacagcaaagacattcgtgtcaaatacccctgttctattgcataagaaaattgttccgcaccattaaggatgctgttactggatccaagaaaggactgtagatgatttctatcaacaaatggaatgtattcagtaagcaaagccaatgcatgcttccttaataacatagaagaatcatagaaagccaatgctgctactcggtcccaggtatgagtaaccaaaagggatgttactgttgaaccagatgagagtgaattttgcttataagtagtatattcagaatcaactttagttgtgctcataataatcctcccaagttgctgcaatgcaacagagcgctgttctggttcagcatgactcaacaatgtgcagaaaagatcaatcaatgaattctcactgttcttaaggccttcaattccataagaaaccaatattgataaccatatctctgtctgaagcctccaagatatcctgggtgcatgagagcagaggtgtttcattgcagaagacatgacattaagaacattatcccaagcaagaatatttggaagcttaatcatataatcgagcataactgatgccacctgccagcactgcttcttctgatttactaaaatggtttctgcgaggccttggagagcactctcccagtgtttttgggaaagatcagtggatatttcagtaccaacctcttgtttgatgctactatagatcatacctccttcggcaatagactttaggcattttgcatacagcaaacattttgcaatcgataaagataacctagaggccaactgaaggtgccatttccaactgccctcaatagatggtgcaaggtttgat

SEQ ID NO: 15245 - DNA, 984 bp, Oryza sativa
agatcaggaaatagcgaacccagaatgaatatgagaaagggcacctggttcttattgccaggtgtatcctctgattgtttaccaaactggattgtttcaaataactcttcaaaacaaagtaactcaaaatcactgcattcagtaatatcacctgatacatttccattatcagtactcttccttaagaagtgtgagatcattggcttcattaggcacagcacagaatcaaggaaagctacatcagtgtaagaagctctacaaagtgacacaagaatgtgcaccatccgtggcatttcaggaacaataacttccaagtgctcagcgacaattgactcaagtaggtagaaaacaacagcctttgccttagctgcaatgtttccttttaaactattaactccgtttgcaaatgcaagatgctccctaatatttccaagataaggccacaggcacatttctgaaaaccaacaaagaacatcatgcactgcactttttgggagacattttaattgtaacccaacagcttccaaaatgctttggccaaatgcatcaaactttttgctcatactcggaaagaagaaatgcagttcaggaagtaaaatctgaaacaatctcatgcttggttggtctgacagcaaaggttccttcttaagaagcacatagttattgcaaccagattgttcaattttagcagacttggccttctgagtagtaacaccacccatcaaagaaagttcatcggtgaaaattgacagcaaagatgtaagctgtgagaagtcagaggcaagaaatagctgctcatttaaatattccttggcataacgggacactgccatccatccaaaaaatcgaggtagtggactagaagacctggaaaaatctgatatcttatgtatccatgctgatggaggaaccagacttttaaaacggaaaccatctcttttaatgctgacaagttctctagtattatcactgccagacgaagca

SEQ ID NO: 15246 - DNA, 522 bp, Oryza sativa
tccatagaagcattcaagcacttgaggccggtgctagcaattgatggcactttcttaaccggtaaataccaaggtacattgctcacggcaataggggtcgacgccgggttacatcttgttcccttggcgtttgctctggtagagaaggagaatacatccaactgggagtggttcatcaacatgttgagaaacaagctgatcggtcctaatagagaagtgtgtataatttctgatagacaccctggcattttgaactccatcatccacatcatgcctcatcacctaaccattcaccacaggtggtgcatgaggcacttctgtgctaacttctacacagctggagctacgactgatcagatgaaagatcttgagcgcatatgtcaaataaatgagaaagcatttttcctagatgagataaaacgcctcatgggtgtggtcggagagaggccaaagaagtggctagaagaccacatgccacttaaggtcaaatgggcaagagcatttgataccaacgggcgtcgc

SEQ ID NO: 15247 - DNA, 3185 bp, Oryza sativa
aaattttggggtgtaaaataactggttttagagtctaagagggtaattcgaacgacccaaatagttcaggggggtaaaacgtacttttccttaaggaagataaataagtagagagaaggacagtgggctatagatttatagccagctgtagcacggactccaagacgcagtgtgtgtatgataggtgggaccaggtattaatagtgtagtatataactattgtataaatgagctattaaattggctatagataaattggagctagcgattggctatactattaaacttgctctaacgtaggagtttctttcgccatcatcgttatcgaaatccaactgcccaacacacatcgcgaggaggcgatcccacgattcctttggcggcatgaggcagcccctgaccaaggtaattattatactccctccgtactcgaattagatgacatttcggacaggattatactccctccgtttcgaaatgtttgacgccgttgacttttttaaatatgtttgaccgttcgtcttattcaaaaaatttaagtaattattaattttttcccatcatttgattcattgttaaatatatttttatgtaggcatataattttacatattttacaaaagtttttgaataagacgaacggtcaaacatgtgctaaaaagtcaacggtgtcgaacatttcgaaacggagggagtaattactaaggagtcattaattaaggggtaatcttccgtgtaagagcaaggtcaatagagagcccactgccatctccaattttctgtccaactcaggaagagctagcttatagcttaccaagtacaatagattagctgtaaaatgtcagagattaatacattgaactatttaatgcatgcatgccaatagcagttgttgggatcagtcctgacatccatatttgtggccattttgttgcaccacatatacacaatcacatcagagctagttaaatagaggattaataatccaaacagtgaaacagatacgatgattcacaaatctcctggcaacatgccatcaaacaaaaggaccacaaaaactagacaataataagctacacaaggcaactttttagggataacaaaataacagttaacgaaaacatagatataaactgagatagttcttgatctccatatggaccatcatcagccatcttgatttgttgcagaatataaattatgttatcagcagaacaatcacagtacaaatgcaatattaatcccagaaatctaactacttagtgatggtcaaatttctgccaattacagtaaacttttcctaaaactataaaattaggtgtgtctcattccaataaattttcttgaaaggatgtcacagtccctacactatagttacatggattcatgaatcatatttttgaactgagatgtaaaaaagatcaatgatgaagctagcagttcatgtatacaacatatatagcatatggaggaacaaaatcggttcatgtacacaaaaatttcgatgttcattacagctgaaagtactcacacgataaatataccatatgatggaaatatacctgtaagaggtgtgttgcagaggtgcaacacagtagacatcaaagcttaattgttcctgaaataaaacatatagaagggtaaattaaaaggctctatatatgacaaaaaagggggaaattatatgctaattaccctaccatggttatgtacgctgcgtattcctgaaccggttccaaatgtgctaaattaaatcagttttaagctgggtatgcattgaacgagcacaaatagtagctttcctacttagcacatcacgaaaacattggttaccaccactggttacttctggaggcagtactattgatgtcctaggaattctattgaggtctaggtcacatattgcatcctcgccctcgtcttcaacaatcatattgtggagaatcacgcaagttagcatgatatttccaacactctttctcttccatttctttgccggacgacgtacgatgttgaaacgagcttacaataccccgaaagcccgctccacatctttccttgccccctcttgatgtgtagcatataacttatgcttctcagtttgtggaagtggtatagtcttctggaatacagcccattctggatatataccatcagctaggtaatacccatggttgtactcttccccgttgacataataatggacccgagaagcctcacctctcactgtgtcaaggaaaagaggggactgattcagcacgttgatgtcgttgttagaaccagcgacaccaaagaaggcatgccaaatccataggtcgtgtgaagcaactgcttcaaggataattgttgggactttgtaatcaccacgggtgaattgacccttccaagccctcagacaactttcccacctccagtgcatacaatcaatactacctagcatacccggaaacccacgagactcgttaacatgtaatatatgctctacatcctcccttgtggggcgtctcaagtacgtcccaccaaatacctcaatcaccccttgtgaaaacatttctaagcattctaaggctgtgctcttgccaatttttaaatattcatctagtgcatcagcaggtgtgccatatgctaacatacgaagtgctgctgtgcacttttgaggtggagagagacttgtgcggctagagcaatcttccctttgagtaaagtatggtgaccactgacctaaggcttcaacaatacgtagaaagagtggcttgtgcatgcggaaccttgtgcgaaacatccactctgggtacaatggatgctctgcaaaataatcagccaccaaacggctgtgggcatctacatgatccctatgaattgtcttccttgttccaccttggcgcttcgaacgcccagctcctaacctacccttcatcttctctatgattcgagaagcaaatgagtctagtacattctgctcagaaatgtacttgtctagaactttagatgggtctaggtcatctgagttagaggatgaataggaggatgagtccgacatggttggaggaggaggaggaggatagattgggttggcagtttcaagttatgagaggtaatatatagatgctgcaaaggactagctgtaataaccatacaaattttaatatggctggactatgactgcattttaattaggaccagct

SEQ ID NO: 15248 - DNA, 4105 bp, Oryza sativa
aacactcctccagtatcaccttgtttggtttgtagggacctcttggagtataatttattcttcatgtcaacacgagtaaacccgagattctcaaatccacaagcttgttttgccatcaaatcaatagctgctttagtagaaatccctacggattttgcgacttcaacgcttgcaacttgagcttcattaatcttcctttgtgatcgtaactgatgagcctgacttctagtggcaagattatggttatgttcaggcacaaagtgatagatagaatagaatccatctatgagacttatcttcatacatgcttgacacttgcatcgagtttctggcctactataactatcgccatagcctgaagcttctgctcttttgtcagtacctctacttcctgttaatacagtgcactaattgaaacaaaatgtctctaattgaaagttaatgtaactataaaaagaaacaaagaatttaccttgacgagaacaacaaaatgtcatgttttttataattttagtatttcccatgtaatgatagctgcttcttctaatgctgaaacctttcttaagataatcattgtagaagtcgataagctttttgttcagagctaaatttcatgccaatctttggcaccaagtcttccagatattttattgtatgagaagcttcatttgttccttcatcctagttttatctgtggtaatagtttccatcaaaaaattgcaaaaaaaaaaaaaggaacgatgaatatagttgttcatatgcacgtgcacatgtccggatcttacagtttagatgcaactaatttaacaaaatgtaaaggagaatatatagggatcttacagcttctaattgatttcttcccaggccatcagagggatatgtggactcagcaggatttgatgatgatgatgatggggcagaagtatcatccaagaatgcgaacgtaccgcatgttactgtattctgcaattgtgatggcattggtctaggaatcgggagttcatctagcatggtgccaagatttgggagagttcttgttagtgtggagacgcaatctgtgtagatgaaaataaaataactgtgtatttgtacttatgtaccgctctaatcctttttcccgccactaattttatttgcttggcgccatatttttgttagcgcttaaattgcgttgtttccaaattaattgtgatagtataacacgggacgttgacgccgtttaagtgaaagaggagcgcatgcgtactggcccaccagaaaagacccagcgaataagaagatgacacgtcgccaggaacagggtatcgggacagggaagacgcatcctgatacgaaaaccttcttatcaacatttttgatatgttagattccgaaacttctattttcaaatagaaataagcttaaattgtaaactccatctacttgaaattatatatgaatcatcataaactttgcatgtaaataaaaatttatattcataaaatttctacatatataaaatattttcattaataaactttatacataaaagaaaacatttatgttgatatactttataaataaacaaaaaaaatagattcataaattttctatgtagataaaatattttcatttataaactttatatgtaaaaaaatgattgataaactttatacataaataaaaaattatattgagaaacttttacaataatagtaaaaaaattactatccaactttttactagaatgaaaaaagtatacctaaaataataagtggcatattttggcaacgtatttaggtgacaaaattttaggattaaaatttccgatttttttaagataaaagaattataacgaatcgccctatatatttgggattaaaatcaaaagtttaattaattagatagttggatgttttctaaatacattgcctaattaatcctggacgctaccgctaattacgtttgcacgcgtgaggatcgcagatgcacggtcgaatggaccttaggagcaagtttaatagtatagccatctgctgccttcaaatcatccgtagttaacttaatgaccaattcatacaatagttacatataaacatatactacataattaatatctggtcccacctgttatacacacatgtaccttagagtccgtgctgcagctggctacaaatatgtagcccactgcccttctctcttctcttttatctcttcgaaatgtgtttatagctggtttatagcctgctattattgtacatgctctaatctgaaatagagggagtatgtatcgacgggatcaatcctataagagtaggtacaatagctaaggctataagccaactataaccacatatcaagaagaaaaaagaagagagagaaagcggattacagatttgtcgccagttgtaacatgaactccaagatattatatgtgtatgagaggtgggactgagtattaatgggtagtatatttttatagtcaactattgtatgaatggactattagattagctataaatattttggagctagtagttggctataccattaaacttgctctaatgtaggaatttctttcgtcgtcatcattatcgaaatccaactgcccaacacacttagtaaggactaaggaggcgatcccccgattccgcttcggcaattccttcggcggtgtggaggcggcccccgacaaggtaattagtatagatacttagctaatactccctccatctactttttaatagtcatatttctaaatttgaaaattttatttttgataggcatatttcaatccaacaacttataatcttaatggctttcttggatttaatgcgtgactctccattcttacacacaagattggctacatgggcatcgggaaatgtaaatattaatgaatcgcttgtttacgaggaatgactagtagcatgtttaaatggatgacaagtacaatcacttatcattggtctgtgtgccaagatgaaatattactatcaaaagtagatggagggagtatcgttttccgatttgtagtatttactctattttgtattataagtcatttgattttttttcatagttaaagtttgttatatctgatcaagtttataaaaaaattagcaatatccataacacaaaattaatttccatacattttacattaaatatattttgataatatgtttgttttgtatggaaaatattttatatttttttataatgttgattaaatttaaagatatttaacttaaaaaaagtcaaacgacttataatatgaaatgaaaagagggagtatcattgtctcaactggatgaatcctataagagcaggtataatagcaggctataagccagctgcaaccataatttaagaagaggaaaaagtacgttttaccccctgaactatcgcggtcgaccgaattacacccttaaactcaaaaaccagacattctataccctcaactattgaaaccggacaaataaggccccttaacactgttttgagtggttttgacttaaccttgcacacgtggcgccaacgtggcaatctaaccagcaaaaaaaataaaaaaaaacatggcccacctgtcatacctatcctcaaaccaatctggcaatctctcaaccattccatctctctcacgcacgcgctcgggcaaggcagcgggtgaccggcggcggagatggagctcctcgggcggccgggtgtctgaggcagagcgggcgaccggcgacggagacggagctccccgagcagcgggcggcggaggcggagctccctgggcggtgggcggtgggcagctgaggtggaagcagagcgggcggtcgacggtggaggcggaggtccctgtgcggcgggcgtcgtgccactgaggctgaggcggaggcggagcgggcggctggcagcggaagcggagcttcccgggctgcgctgctgcgggtggcgagcggctgaagcggaggcggagtgggcgaccgacgacgccgtggtgaagggcggcggcggcggcggcgatgcgggagcaggtgtgtgtggcgtgcgggggatgacggcgcgcggggccgggcggttggcggcggcagagggggagctggagccgacgacggctcggcgggcagcgggc

SEQ ID NO: 15249 - DNA, 1035 bp, Oryza sativa
tttgatgttgttgacgtcaagtatcttcagtgcatgagagcacaagatgccagcaaattcaaacttcttgcaactgcatttaacattggattccaacggagagtatctaacaacatgttcaagatgaacatgttcaagatgcatttaccgttggcctttattttgtacaccttttctgcatcaacctcaccacagtagaatatgtcacaattcaaagtctgcattacctcttcctcaaatatcttataaactgctggagtataaacttctgctacatctctcaaaattctcaactctgcctttagcttcggtgtactttgtgttgctctaaagtcacactttacctcttcatatcttttatctcccaccaatctgtcaaagtgctcaagaaaagaaagcatgccatacttcacactaatataaccctttaattcattattcgggctttcatttctttgggtggtactcatatccgcagaaaacatgttctggccatatattaatgcccattgctcccttttcttaaaaatccgttacaaccatgtattttgctggtgctcatatttttcaagcaattggccccatgcacgtaaaaattcttcttcctcttcctgatcatatatgcagttctgaaagtcagcattaaatttcttatagtccttaacacacccagcaaggtgcttgcaggcattctgattcatgtgccatacacatatccgatgatgagtttctggaagaactattttaattgctttagccatagctccatcttcatctgtcaaaattgtttttggcttctttcctgacataatatttagaaaagttttaaataaccaaacaaaactattagcggtctcatcatatagaagagcagcaccaaaaacagtagtcttcttatgattattcactcctacaagcaaaccaaaaggtcgtccgtcatccaactttctatatgttgtgtcaaagcatacaacatcaccagaattttcatagtcggcaaccattttagagtcagcacagaaaatgtttgtaatt

SEQ ID NO: 15250 - DNA, 798 bp, Oryza sativa
atgcctcagtagcacacccaatgagcaatggacaggtggagagggccaacggcatgatacttcaagggattaaagctcgagtttttgaccggcttaaaccctatgccggcaaatgggtgtcacagttaccatcagtactttggtctttgcgtactacgcccagtcgggccacaggccagtcaccttttttccttgtctacggggcagaagcaatgttgccgagtgaagtcgagttcgaatctttgcgcttccgtaatttccgagaagaacgctatgaagaagaccgagtggacgacttgcaccgactggaagaggtccgcgaagcagctttgattcagtcagctcggtacttacaagggttgcgacgttatcataatcgcaatgttcgatctcgtgcctttctagtcggcgacctggttttacggaaaattcaaaccacacgagatcggcacaagttatctcctctatgggaagggccatttattatctctgaagttacccggccaggttcatatcgactcaagcgcgaagacggcactctcgtcgacaattcttggaacattgaacatcttcgtcgtttctacgcttaactttatcattgtatttccctattttgactgtcaaacatcaagttttctccttgaagttgtcagtcgggggctatcatcataataatggagtgtgattttttatcaattcagtttgcttacttggtttatcattgccttgtttggtttttctacttagtttgcgaggactgaaagtttttaatagcttccttgggttttaggctcaaca

SEQ ID NO: 15251 - DNA, 20458 bp, Oryza sativa
aagtcaagctttaaagaatatttctctctttgactgatgacattgaagcagagactcaaaattccaagctaaacaatcttgaatcgtcctgcccttaataaagccatactggttctggtgtattatagaaaggatcactttttgaattctatttgccataagtttgtcaaaattttcaaggatattcccattaaagaaataggcctgtaatcatttataatctctggatttagtttctttggcactaagataataaacgaatgatttaaaggatcaagagacaaagaaccagaatggaaatcatcacatagcttataatagtcatgacagattatgggccaacatttcttaataaaaagaccactaaacccatcaggaccaggagccctgtcagtaggtaaatccttgatgagctgatcaatctcttttttgaggaatggggtatgcagaatatccaaaccttcatgggcatcaataagtgaatttaaatcaaaaggcatatcctcaaacatggaaacccccattcttgatttataagccctccaagcaaccacagctttgtcatcatggctagttagaaatgtaccatccacatccagtaaagaagatatagtattctttctaaaagattcagtggccatagcatgaaaaaacttggtgttctctcctccgaatttggcccaacggatagttcatctcttttgccaatataattgcttatatttcaagtataagagaagcttagaacgaataaacactctgaaattccactcaagaagggacagatccctaagctcctctatactatccagaaagagaatgatagcattacagtttgctataagcttctgcaagttagacagattcttactccacttcttaagaccattcctcaaagcattgagctttgcagagatattcctagccgaatccgccagaacaccatgattagaccatatagaatggacaagatcaaaaaaatcctcatgctcaatccaaaagttttcaaatctgaaaatattggctcttgggatattggaacctatctaaaccacacagggggggtatggtccgaaattgatctaacaagaggcttaaccaaagtgtttaggaaagtgatagtccaactagttgaagtaaagaaccaatcaagttgctctaacaaaggctgttgctgcatgttgctctaagtataggccctgcccttaatagataattcaactagacccaggtcgctaatgacatcattaaaaagaaaaatatcattcatatcttaccctggcctatttctattcaacactgacctataaaaattgaaatctccaaggagaagccaaatgtcatcatctgcaatttgcaagctatggagccagattacaaaattttctctttcaacaccagcacagggtccatacaccgacagtaaagtccaggataacccagaatgactagaggaaaagcaaattttaacagcaaaactctaaatttcaatctgagaagcagtaacgacagagctattccaacagacaagaatactgtcagggttacgggtaaggtataccctctacccttcgatatacgtcacgtatcgatatggtatgtttgcgcgtatacggacattctcagcataggttaaggaagtccatcatggagtctacagatggaaagagtcctactcagatagaactgggtcgtcattatatcgtgtcgggtccgatgtctccgagtcctacttggagaccagttgacctacggtataaaagggaccacccgggtagacctaaggcatcgaatttcagagccaacacatccaccacaacctacgaagctagagcttatcgaagccaagtcgccgggagatctagtcggatcaactcgactacgatcttgtcggtatcgtcgagcttcactattccctttgtaatctgtggtttccatcatataatcccatatcaactggattagggctattacctaccaaggggcctgaaccagtataatccctgtttcctgtttgcttgatgtcgtactacgtagatcctcataccagcgtaccccaataccctctatatccggtctacgggtatcccccgtcgacagtggcgcgccaggtagggggacttggcgctcaaggttctactactatgacatccagcttcgtcgacaacagcgtcaacaccaacctcaaccaaggagttccaacttcaacaacactggtgtggactcaagtcgacgaaatcgtctttctggtttacaccacaatgccgatctcagctggtccgccaatggccggaaacgagaacgcagcggctacaacccggggtgactccatgttgaaggttcctcccgccaaagcggagatcggaacgtcgacgacatccgaacccgagaaggatcctagtgcggccaagccttgtctttctgacaggaatcacgagccgacgaggattacttctgaggtgacaaagtcttggtgtcctatccacaaaaccaggaaacataccctgcaagcctgctgggtctttctcaacgtccattctgaaattcgtgcctgcaaagagcgtggaattcagcgtacctctccaactcgtgatgtctattgtcctattcacaagacaaagaatcacgacctctcgagctgcaaggtctttctcagcgccatgaagacgccacctcctaaggtccagcagtcacgcatccccatcagggatgaggacaaggaacaaggagcgacgccaatttcagatcgatttgttggggtaatcgacatcgatccccatgaaccatcagtcttgcacctactcgaagactatggatcatcgacgagtacgccgcgtgaggtattgtctatcgacgatgtcggcacgtcagcgcgcaccaaagcgaaagcggagaatcaagtgactactccgacccagcacatcagagccgtcaacgcaatactgagggaaaccccctacgatcccattctcaatgacgatctcacacattggacagaatgactacgggaatcagtgaccaacctcagcaacgcgttcgaagaggccgctgctgcagcgcacccggaacagccaccaactggcgatgcaaatggtgaagaccctgaacggcgggaatcacctcatcgagcgacccctccacctcgcggcaccagtgatctccgcgatcacctgaatggccgccgagaggcacgacacacacaagacaacgagaaccattcccggcgtcatatctcttcacggcgtcacgataacgaagatcgaggaggccgttcaagcgaagaccgagaccgtgataaccgccacaaccgccacgatcacgacgatcgtgaacggcgggtgttgggcgatactagtcgaggacgtcgcaataatgacgacgatgatggagatcggcgccgagacaacagcgggagacgacgacaggattctcgagaacccagccgacgtccccgtaatcgtatgccggaaccaagcgacccatcgtcatcgtcatcatcctcgtcatcttcatcatcggatagacatccacgaaggacgcatgatcgccgacaacccaccgcccccagcgctgggtgtagagctttcggtcgttcacttcaggatgtccgatggcccgaaagattccgacttggagcaatagagaaatacgatgggagcaccgagtcggaagagttccttcaggtttactccacggtactctacgttgccggagcggatgacaacgcgttggtgaattacttgccaaccgcattgaaaggctctgcacgttcatggctaatgcttcttcccccctactcgatctcttcgtgggcaaacttatggcagcagttcgtagccaacttccaaggaacttacaagcgccacgcgatcgaagacgacctacatgcgttgacatagaacccgggcgaatccttgagggattatgttccgcgctttaacgagtgcagaaacacaatccccgagatcaccgatgcttctgtaattcgcgctttcaaatccggtgtcagagatcgctatactactcaggagttggcaacgaggcgcatcacgactactcggagattattcgaaattgtcgaccgatgcgctcatgtggatgacgcactgaaacgcaagaacgacaaaccgaagaccggaggagagaagaaaccagccaaggacgcacctgagtcaagcaaaaagaaaaatcgcaagagtgggaaaaggaaagctcaatcagaagttctcgcaacagaatacgtggaccctccctagcgcccagacccacaaggcagcgacatgaagaaagcatggtgccctatacacaagacggacagacattctcttgatgattgcctcgtcttcaaaaagtcgctcgcaaaacacatggcatcggaaaaagacaagcgagtacgcgtggttgagaaggacgctgacgcgcctactcaggaatcggactcagcatacccagattccgatctccatgtctcacacatctttggaggttccacggcatactcctcaaagcgagaatacaagaaagtggaacgtaaagtctgttcgacgtggcagggggctgtcacgcccggaatttctatccaaaattccaaacgcttacatgtgtataaaccctcgtccaggaatcagccgaggcacaaaataacaaattgataatagagtacaattattactctaattaataagcgaatataaagtcattacagaggtagatagttcctctcaaacaaataaggtctaagcagcggaaaataaaataaacagcgcaggcgactccatcccacaagcagcttgaccagggctacgcctaatcctccacaccatcagcatcactgtagaactcctcctctgatgaatgattgcaaggtgagtatatgacatactcaacaagccacgcagcaaatatgcaaatgcaggggataacaaaggatggcataatatagtctcatttgcataaatggcattcaataaatacttcagaatttagaaaaacagtaaagtatttaattaaacaatattaatccaacgctatacaacatacccgttgcataggcccaaccattctgaacaaccattcccggctgcacagttctatctccaaaccaggaatataccattccaaaccaggagctaaacaagttattaacaattacagcatcatttattatggtgagaggtatgagactaatcacaaaagacattgttagacccgcccataaccgcgggcacggctattcgaatagttttactctggctagaggtgtaccactgtacccacaagacacaacctcaacatcatgtcaaccatgcgtcgcaatacttaacaagtacctgaatagagattgtgacaatacccttcgcataacataattcaaagcagtgcaccgttcctggatcataatcacccccattataaacaaggcatggactccccagcgacccccgtgggcttatctccgccacttcacagtctggtgctctacaatgaaccacactatacaaaaggtaaagccgttgcccacgctggcttgtggttggcacggttaatgtttcacaaccgaaaatcgtgaaccggtccttaattgtcatgagcacaaccatcaaaaccatgtgctcacaacccaccattatcatattttaattggcatcttaattaatcaacctatcatgattaaccatcatgagctaccattaagccatcattaagtaatagtgaatcattaattatgccattcatatgagctagtgtctctaagcatggctaagcatcctaattacttcagctaaaaccatataatgttctagctaatcaaattattaaccaggggacaaagtataggtaatcaataacaaaaggctataacaaaggcaataggttattcccacccaatgacattcaaaaataaatgcaatagttgaatagaaacaatagctttaaacgggatcaacatgctcaaaggattgtttgggatttgtgtgacttgccttgctggccttggaactcctcaaagtcttctcctgcaaaatcggactctccgggaacgtcggaatctaagcagaaaagaccaaaatcaccaaaacagtacataaacaatcataaacagcacatgtggatatttttaacatgtagatctcaattttagaaaaatttagagacttgaaccaactaaatctgagctaagatgaattagtaatgaatttttaaagattaaactggattaaattatttatttagattttaattggattatgacgcaataaagaattatatttgaaaggaaaaaggatttattgtgtcagcgggctcgggttcacggtggaccgagtgcacggaaacggtctacggatcgaacggctaggatctaatctaatccaaacgaacggccgagatcgatctaatccaccacgggtctacggctgacgtggcgctgatgtcgacgatgacgtcatcaccggcggcggctcggcacctcgtgctagccagcgaatgatggcgcggcgacgcaaacggagggcacctacgcgtagagggcgacgcggcgaactcaccgagggctcggacgacggcggacgacaacggacggcgacggcggcgaggtcgaagcggcagagacgttcgggtcgacgatgacggcgatgctccggcggtcttcgacagaaacaaaggacgggacgaggacggtgacgacttggcgatcccgacggcggccttcccgagggacgacgacgaccggagcggtggcggcgcacggctggactcgcggcggcgacggcggcgcacgggctaacacggaggcggcgctacaagcggcggcaagctaaggcaaaggtggccttttataggggctagggggcggcgatggaggcccacggcggccggcggcgagaaggaaggtttagggttaggagggaaaaacgaatccgaatcgagatcaaatccaccggtttccaaacaaaattagccgaagattccaaaagagaaaaggaagaggagatctcgaggatcatttcccctccattgatttgatcggatcgttaaagggtcgacggaattttggaagggggcggcgacggcttgcgcgctcttgggcgcggctacggcgggaggtagacgacggccctgacaggtgggccatcattgggagaactgcactcgcgaagttcatggccgcatctcactatgcgtatcaagtgttcaagatgccaggactgaagggaacaatcactattcaagggaacgctaagctggcagtacaatgcgacaagcggagcctcgacatggtcgagcacatgcccagcctgcctgccacagcagagccacccaagaaagtgagcaagacaaacaagacgccgaaaccagacggcgcaatcaagatcattccactctccaatgccaaccccgacaagaccatcaagatcggggcatcactaggcgagaaataggaagtcgcgctcatcaccttcctccgcgacaatgctgacgtgttcgcttggcagccgtccgacatgccgggggtacccagggaggtgattgagcacaaactcatggtgcgacccgatgccaagccagtaaagcaaaaactgcggagatttgcaccagatcgaaaacaacccatacgagaagagctcgacaagcttctcaaagccggtttcatcatagaggtactccatccaaagtggctagccaacccagtcatggtacggaaggccaatgggaagtggagaatgtgtgtcgatttcaccgacctcaacaaggcgtgtcccaaggatcacttttctcttcctcgaatagaccaactgatggactcaacagctggttgcaagttgttgagcttcctcgatgcttactccggttaccaccaaataagcatggcaaaagaggataaggagaagacagcattcatcacgtcgttcggggtattctgctacgttaagatgctattcggactaataaccgcaggaaacactttccagcgcacggtccaaggtgcacttagcgaccagctcggaaacaatgtcgaggccttcgtcgatgacattgttgtcaagaacaagataagcgactcattgattgacgatctgcgggaaacgttcgacaacctccgacgatatcgcctcatgctcaatccagagaagtgcacgttcggagtaccatcgggcaagctactcggcttcctcgtctctagcagaggaatagaagcaaatcccgagaagatcaaggcaatcgagaacatgaagtcgcctacaagactcaaggaagtacagaagctaaccggatgcatggcagcactaagcaggttcgtcgctaggatgggagagcgaggacaacctttctttgctctgctgaaaaagcaagacaaatttgtatggacacaggaggccgaagaggcattcattgcactcaagcgctacctataaaatccacctgtacttgttgccccctaacctaatgaagaattatttctctatattgttgccacgccatattccgttagcactgtcattgttgtcgagagagagaaggtgcaacgaccagtctactatgtcagcgaagctctccacgacgcaaagacaagatatccacagatccaaaaactgctctacgcagtaatcatgacatcaagaaagctacgccactactttcaagcccacaaggtcacagttgtctcctccttccctctcggcgaagtcgtgagaaacaaagacgttgtcggccgcattgcgaaatgggtagttgagctaagccaatttgatatccacttcgtgccacgaacagccatcaagtcccaggtacttgccgatttcgtagccgattggaccatgcctgataacaagttagacaaccaaatcgacaatgaaatatggacaatggcgttcgacggcgcactcaacagccagggagcaggggcaggattcatcttgacatcaccttcagaagatcaattcaagcatgcaattcacctcaacttcagggcaaccaataacacagccgaatacgaaggactactcgctaggataagagctgcagctgcactcggagtcaggcgactgatcgtgaaaggggattccgaactagtcgcgaactaggtgcataaagattacaagtgctctagccctgagttatccaagtatctcgcagaagtcaggaagctggaaaaaagttcgatgggatcgaggtccgacatgtataccgtaaagacaacatcgaaccggatgatctagcacgacgtgcgtccagacgagaaccacttaaacctagcaccattctggacgtcctgacgaggccatcagtgaaagaggcaagcggcgaagatagcccggtcgcccccgacaccagctcgggggctacagaggcagagcgtgccgttgccgatatcgagaccacggacgactggcgcaccccactcattaaattcaagcagccacgaagagttgcccgaggacgacgcagaagccgagaaaatatcccgtaaagcaaaagtctactgtatgatcggcaacgatctatacaagaaggcactaaacggggtactcctaaaatgcgtctcgtccaacgacggcagacacctcctgctcgacatacatgaaggggtctgtgggtcacatgccgtcggtcggacattagttggaaaagctttccgacaaaggtttttctggccaaccgccctcaaagacgcttgcaacatggttcagcagtgtgaagcctgtcaattcaacagtaaacacacaaagctgccagcacaagcactccagactatccctctcacttggccgttctcgtgctgcgggctagatatactcgggccattcccacgaggacaaggcggctacaggttcctattcgtagcgatcgacaaattcaccaagtggattgaagcgacacccacgggggaaaacaaggccgacaacgccatcaaattcatcaaagggatattctgcagattcggattgccccaccgtatcataacagacaacggctcctagttcatcagtgccgatttctaggattactgcattaggttgggagtcaagatctgctttgcctcggtttctcaccctcagagcaatggacaagtcgagagggcaaacggcatagtactacaaggaatcaagacccgcgtctacgacaggctcatgtcacacgacaagaagtgggtcgaggaacttccatcagtactatgggccatgcgtaccacaccgacaacgtccaacaaggacacacccttcttcctcgtgtacggctaagaggccatgctccccaccgagctacgacatcaaagtacacgagtacagaagtactccgatgaggatcaggaggagcagcgatacgacgatgtgaatctactcgaggaacatcgcgaacgagttgccgttcgagcagtcaactaccaacaagcccttcgccgttaccatgagaagcgcatccgagcacgcacgctttcgatcggcgacaacgtcctccgacgggttcaaaaccaagcagggcacaacaagctctcacccaagttctgcggccaggcgcattcaaaatcgcagacggcgatggccgcgagttggcaaattcctggaacattgatcaattacgtaaattctatgtataagtcaatagtatccatacttgtaagacatcttacagcctcaataaagcctattattcaggtacagacgacaatcaaagtgttccttcccgatgatcccttacccagatgacacctagcattgaaacctatcctcatgtccctttacgccgtcttgacaatgcctccgaggaacccaagggaacttcggctagggacgcccagagccgataaggccttgtcagatcctgtagagacgaaagaccatgtaagatctggtcgcgtaagagttctcgccgtgcgtattaaccaagccatgtaatcggaaataaactttccaacttcatggctgggggctaggatcagtgcttgttcaaccgaggcaggtcaaaggtccaagagccttatcttccgagaagaattctccgatgacaaggctgggggctagggagagtgtataactcaaacgactgatcgaagtcgcgaagtgagaagacactcatacacactacgtctagagtaagaaagcttagtgtcgacgtttgatgtcgcaattctggtatttgcatagtatggggattgtcggtgctaggatatatgtgagactgaggtaaaagagatggagacgaggatttttatataggttcgggcccctgaattgtcaggtaatgaccctacatcctgttggccggagccggtattgctcttattcatgataatcacaccagtacaatgtttggggtagcctatctaactactgtcgacatagcggactgacgatctgactcgtagtcgacaacagggtagccttcctcctcaaatccgtgtccggcgagatcagagatagcgctttcgtttctcctgacagtatccgaagacaccgtagggtactagccatgcctatccttgaagtcgatatccgacgtcttgtcttgaagtatgttggattgtatgttgtggcttctgttgttccgtatattgtggtggttgttgattgaggtggtcgtctgttgattgtctatccgtattgatcgtctcatggtgggtgtccccctgtcctcctaggggggcttgtatttatacccataggtgtccccttgtccaagtagaactagggaaaccaatatggatacaatccgagtagtccttgttgtttccatgtagaactctggttgtctttccttatccagaactccctcgaggtcagttttcatataagacatggtatgtggtgggttctgccgagatttagtcaactactattaggtatgtggtatccataacgctgccagtagcccccgacttcaataaaaatgaacgagttcatattctcaaccgcagatcttggaggaactgttatcgagctaacgtgatcgttcttggtgagttcagagataacgttagacttcctttgtcagccttgtgcaggcaccgaaagggtttgtctaagtcaatctctgatgtcgaccgagaaagtacagagcatacaacttagtctcccgccttgctgtaatcgaggatttggattgaagtcaagaaattttatctcggtgggtacaccatctcttcattccgtattccttgtcgagatccagcaaccgttctcgagtgatcgagaaggcgtagagtctatgacggagccttgtcgacatttgtcgtactcgccttagtcgatcttggtgtagaaccatagagacatggagccttcgtcaatgtcgaatagaattttcctgaaatcaatactcagaaaagaatattagatagaaatagccccccgagcgaacgctcaaagggtaacatgttataatataacagactagtgaattgaatgtacagaccagtgttttgtatatgagcgtcttctctcttaccgactccgaacagtcagtttatagagtcatacactctccctagcccccagccttgtcgtcggagaatcgttctcggatgacaaggctcttggacctttgacctgcctcggtcgaacaagcactgatcctagcccccagccatgaagttggaaaactcaatttccgattacacggcttggttaatacgcacggcgagaactcttacacaaccagatcttacatggtctttcgtctctgaaggatccgacaaggccttatcggctctgggagtccccagccgaagttccctcaggttcctcggaggccttgtcaagacggcgtaaagggacagtaggataggtttcaacgctgggtgtcttttgtggtaagggatctctggctaagacacttggcgatcttgtgcacctgatatcaactttgttgaagcaggggtaatgggagaatcgctacatcgctggtcgaggaccaggcagtagtcgtaactcgaccacttgaagtggaagtagtgggagaaacgctacatcgctggtcgaggaccaggcagtagtcgtaacttgaccacttaaagtggaagtagtgggagaaacgctacatcgctggtcgaggaccaggcagtagtcgtaactcgaccacttaaagtgaaagtagtgggagaaacgctacatcgctggtcgaggactaggcagtagtcgtaactcgaccacttaaagtgaggcgttagagatcactgcgtcttactgattcgagaaccaggagtaggagtctcttaatcacctataggggcgctaaagttggtttattacatgtgcatatcatgtggccagcatgactcacacacccaacttgtagcatatccggatgtccgttcgcaatcatgtcgggtgatcaagccgacggcgttcgtgaggaattatccgttaacaaccttttctcgagtagtccagcgatggccggcgctatgagataggtcgtcggtcttctttggtaggttgggcgcgacgactctgcatttgtcgagatcgttctcgataatgcggtgtactcgaccacgagctactcgagtgctcaattgttcctgaaaaatattttctaggagacaagatgtatagcagataaaatcgagtatgtactcaaaaactgcatggatcttctagtattatcaggatataacgagcagatgtaaatatcaggcattatgtaaaccgtaaacaagcatgatttatacagaagaaaatagagcgagcccccaacgttagaccgtagtcgatttaacatcggggatactcgcgcaacagatattattgtataaagaacatgctctgggtaaacataataaatcatggatctgataatgatgtatgatctgaatatgtatgataaattgcatatgaaattagtagatcaatttgaaaaaccaatctaccaattaccttattgcgtactcgttggacatcatacgatctgacatcttttggtacgccgcgaagcttgaggcttggttgatctcgatagaccaagttgttgatgacgatgatggttccgatctaatcggaagatgtacttggacaggttggatctccccacagccgaagtcgtcgagtagcttgttgtcggagagtccatctcttaaacccatctcatcgaaatcctgaagcaccaaaattcccctacctggcacgccactgtcgacgtttgatgtcgccattatggtatttacatagtatggggatcgtcggtgctaggatttatgcgagattgaggtaaaagagatggagacgaggatttttatacaggttcgggcccctgaattgtcaggtaatgaccctacatcctgttggccagagccggtatagctcttattcatgataatcacaccagtataatgtttggggtagcctatctaactgttgtcgacatggcggtctgacgatctgactcatagtcgacaacagggtagccttcctcctcgaatccgtgtccggcgagatcagagatagcgctttcgtttctcctgacagtatccggagacaccgtagggtactagccatgcctatccatgaagtcgatatccgacgtcttgtcttgaagtatgttggcttgtatgttgtggcttctgttgttctgtatattgtggtggttgttgattgaggtggtcgtctgttgattgtccgtccgtattgatcgtctcatggtgggtgtcccatggtgggtgtccccctgtcctcctaggggtgcttgtatttatacccataggtgtccccttgtccaagtagaactagagaaaccaatatggatacaatccaagtagtccttgtcgtttccatgtagaactttggttttctttccttatccagaactccctcgagatcagtttccgtataagacatggtatgtggtgggtcctaccgagatttagtctactactattaggtatgtggtatccataactctgacacttagttagatttcttttctattccacaagtatttcttacaattccatcaaaatccaaaactatattacactttttccaaagacatttgtcacaggacacggagactaccaggaaggccaacgccagtccatcgacttcgccaggccatctatctccgtaggagttctccaagaacgagaaaacccttcgcggaggaactcgaggtgcagctgcggacgatgatctcgtatacaggccagcacgtaccccccagcatatcggcttgagcgacgacactcctgcttcaaggtctcgtcgatacgttgaccgatgccttcgagctgggcacagaccccattcagccacgagatgtatccggccgccgattcctcgggatccgcacggggtactcagagctctctacagactctcaacatggatgtgcagcaactcttcagatacgagttgaaccacacctcacgaccccggagtgtctctacggcctggtcctttctcacctccagtatagtcctctcgagttccgcgacctcaaacttcgtcctccaatactggatgcgacgatccaggtcaacaagcgcactctcgagatctgctcagcatggaaacgactaagtcaagctgctcttctatcatgagaacacaacaaatcaagtcgatccagacggaagggcaaaggaaatggtaacaaagacaaccaatctaagggagtcgccgccatgcttttccacaggtgaacttcgatctacatcgccttctggcacatatggttcggacgcaagtaacgaaatgactactggcaactcaggttgcccacgctgctggacatcctcgacatcaacatctctacaaaggacaacaaagtactcgagatcaaaatgcctaacaaagctaaggcaatgaccgcacacactagggcggttgggaccaataaaagttttacaaggcatgactaaagagtacaagagagctaagaccctactcctcaaaaagcaggaggacggactcccccagatcgccgacctcctccatcacatccttgcgcgtgtcgctagccgccccctgatccaagatcttccgcagatcgagttcaggatgcaccagcctcacacacgcaaggacgtggcacgccctggtgtagatcccgttagacgtctcctctccgatcctggccgcatgcttggaggggatctcctccatcgccgtcaccagctccgcaagagaagacgtcagcaagaactcatcgggattcgccgggatggtggacttgataccgcacttcccggcgagctggtgcagaccagtataggtgacccgcaacgagccatggatttccgacaagttgttctcaagctccgacatgcagtgctcgagcccctgccgttgtcactcgttgtcggccaccagttccctcatcttctggaggtcctcgcgaacctccgccagatcgcgcgccagccgatcggcgcgctcattcgccgatgacgcagccgccgccctcgcctccacgatctcgcggctaacaccgcgagcaccagcctcgaggaggcgccccatctcagcctggagctcctcctaggtaaggacggcagccggcgaaccacgaccagccacgagatcgctggctgggccgctaggtgtcgcctcacggctcctgggcacgaccacgacatccgtcgaggccacggcaggagatgtgctggaggtccctccagacccatcttgcgtcgccttcgcccgcgccagaatagtgctacgtcataagcagaaataccacaagccataaatgggttacctagccacataattacagacagggacccaactcttaggcctgcgaaaggctgcgattgagacaaagttcgacgaaatcacgaaacctcaaatttattcacttacttctcgctgagcgtcacaagccgctgccctcgcggaggcgggggagacgcgtccgaggcctggagtacaatcaatatgatgtgaggtggaagttttccgactacgtgatcaaaaaacgagagaacttactgagggagtgggtgtcttccgacgatgtccgactacagagaagaatttcctcccctttttcggaacgtcgccaccactcgtcgtggcagcggcaacagcagcgtcagacgcctccttggcgaccttctccttcagcgacgccgccacctgatggtccacgactggcccgatgatatcagtcagagggagagcctacgtttcatgaagtcataatgcgatcccggaagaaaaatgcaaaaggacagctaagtacacttacattgatggcagcgtcgcgctcggctgccccggggacgggggtgttgctcgccgttgtcgggccgctgatcatcagttggccgatgcggcgctccacagttgcgctattcaagcctgtagatcgagaacagaatccgataagccgggaagaacacgcgcataagggagtcaatttaactaaaaaggaaataccccgaggagaaacctgggtcgcgtcctctagcctagaataatcaaaggcagaatgggctcgagcctgaagaggctggatccgcctaccaatgaagtcggcagcaacttcataccctgacaacccctgttctcggaggtcatcaacgatatcgatgaaaattggagggacggggtcaaagcgggtttggtggtccaagatggaatcttgtctggctgttcctaaggtacaacgaagacaggatccaaatcctctatctgaatatagaaccacctcccccgccatttgctgtgacatgaggggcactgaaaggggatgtatcgcgacttcaggccatcccgaagtcggaaaccaacacacctggacacctttttggattccatccagcgtaactcatagtaaaagcggaagaggtcaagaaacggctccaccccaatgtaggcctcacaaagatgcgtaaaaatactcaggaaggcgatggagttggggttcaaatggagcaagaaaagaccatagaaattcaagaccaaaaggagaaattcagaaggcggaggaagaaaaccacagagaataaagtcctcaaccgcaaccatgcgacccaggacaggttggggttcagtacctcctacttccctctccgcggtcccgcgaccgggaagggcgccatcctcctgcagtttcttcagtgacgcactggtggaggtagtcttgtcgagatccatggccaccggagatcgccggagaaaagaccgagacgagttggctagggttttttgcgggagcgaagaagacgagggacgcttggaagctggagagttttttcaacaggcggacctcaaatgggatccccaaaactcccttaaatagacgcacctccgccggtgcgaattccaaggaaaggagagagatggccgccggaaatttctaggtccgttacacacggcagtttttcggacttcaatttacattcactcatgaccgttgaacttcactcgacgttgtcgatcactccttgtctcttggtccccacaccgagaacaacgacaatttcgacatcagaagtcgcaatcgatttcacgtgttcatttaagcaaaagtcgggggctactgtcagggttacgggtaaggtataccctctacccttcgatatacgtcacgtatcgatatggtatgtttgcgcgtatacggacgttctcagcataggttaaggaagtccatcatggaatctatagatggaaagagtcctactcggataaaactgggtcgtcattatatcgtgtcgggtccaatgtctccgagtcctacttggagaccagttaacctacggtataaaagggaccccccgagaggacctaaggcatcgaatttcagagccaacacatccaccacagcctacgaagccggagctaatcgaagccaagtcgccgggagatctagtcggatcaactcgactacgatcttgtcggtttcgtcgagcttcactattccctttgtaatctttggtttccatcatataatcccatatcaactggattagggctattacctaccaaggggcctgaaccagtataatccctgtttcctgtttgcttgatgtcgtactatgtagatcctcgtaccagcgtaccccaataccctctatatctggtctacgggtatcccccatcgacaaataccaccagaagcaccccttgagggagaataagcaaacttgtcaaaatgtctaggagcaaacttcctgatgtaagaatgatcaaaaagagatcttttagtttcttgtaaacaaaagactgcacaaccactttcctccaccttattatgaatagccaaccacttatcgtcggaatttatgcctcttacattccaacacaacaccttccaattcctgaaacttgcattcatttaaacttaagataaaggagagtcacacacaaaccaggcataacctagtctacaacagcaaaagaccaaccagaagcaccccttcagggggaacatatctgcaaactcaccatctaagataaagacagaaattgtccaagactctccaacaccagctgttggatcttgaagaactattttgctaggaaccgaatcaagatccctgtacataaatctaacaaagacacgtccctgaataggatcttgctcccaccaaacgtcaagctgaccaaaagtagaaaccaccaggcaaatatattgcatagtaatgatgtagtccaagggaaagtcaagcaatagaaaccaaccctttctattaaaaggagcagcgcgccaattagggccttggtcgtgacgaacaaatttgacttggtagattccatcatacacaaaaaggaggagacaacactaacaggtctcggattacagcagacgcaaacttgaacaggccaaccgcagttgcatgaggaaagctacgtcgaacagtaaaatgttgagcttgttcaagaaaatcagtaatcaatacctgatgatcatcccagagctcttccggaagaataggctcaaccaaagccaaagcaaactcctcatgatatcggggggggctcgtagcagtagtgagatcaactctcgaaatgcgcaaatcacttccttgatgcaccacttggcccgcacgaagaaaacgaaggggattcggatttgtgttcgccataggcacaatctcgggagaaataatcagattcggttgcggaagaacagcggaagaggaagggacgtcctgcttcggagaagaagaactcctctttttctttttaacccaaacaaatttattccgagattgagagacattattaacaacaaccacctgttttttcgcattattacgggccaaacttttagcttttcctgttccaacagacttgtgggccgaggacttaactataggcttattagaagatttatcatgggctttgggacaaaaacgttcaacatgacccaaggaagaacaaccgaaacatctaacaggcaactttacagaaccgagcaatatggccatgattcaaacatcgaaagcaaatcaaagagcccaatttggaattcaaattacaatccggaaaaggaggatcatcatgcatacctt

SEQ ID NO: 15252 - DNA, 25826 bp, Oryza sativa
cttcgtaagtcaagatacctcgtcgctttcggtcgtatgaacatttatgtctcttgacaaaagactgactctcaacaaaatatatggactacttcccgttttttaaatgtacgacgccgttgatttttcaaaatacatttgaccattcgtcttattaaaaaaaattatgtaattattaattattttattgtgacttgatttatcattaaatgttctttaagcatgctttaagtatttttatatttgcacaaaaattctaaataatataaatgtttaaacgttaataaaaaaaagtcaacggtgttatacaattaaaaaaaggaccccgcaaaaaaatacattaaaaaaaggaggttgtacatatgttatctactccctccatttcaggttatcagacattttgactttgatcaaagtcaaactactttaagtttgattaagtttataggcaagcataagaatatttataataccaaattagtttcattaaatcaataattgaatatattttcataataaatttgtcttcggttgaaaatgttattatttttttctacaaacttagttaaacttaaagcagtttgactttgatcaaagtcaaaacgtcttataacctgaaacggagatagtattaagtatagagaatcatgtcggtgaaatccaacacgataaaaatctgaactaaaagtctctttcaaatggtcatcaaattcccgttcgaacggggcatttcactggccggttattacattctgtccacaagcacaaagccagttagctgccgaaactgaaactgaaaaatagctgccgatcgatatttttcacacatgcacggagctaggttaggccccacacccacaggccggtgggccaccacaagatttgtgccctgcaccacacgctgatcactaatcatcactaatacagtaacataccatctaacagtcgaaagaaattaagacattggcttaattaaatgtttctggtgctgctgcaatgtcatcagtacatcctaatctgtctttctgtccgtgtctatatatcgctcactcttaaggattactcagtattctcaccatgaaaagatgtctttttgatatctcaaataagtactttaaacattaattactatctgtttaaatattaaatatgtatatagatatatgatatccatacatgcatatttaccttgaaagatattatacaatattacagttttcaaatgttttataacaaaattagcgatcaaagttctatttcaaagattatataagacaatactccctttacttttaaatacgaatgttgttcacttttagatatgatgtttaacgatttgttttcattcaaagaatatagtgtacataagaaaaatacaagttatgctatctttgataacaaaacaagtgacaacgtaacaaatagtattcgcatactacatctatcctacaatataaggggttctgaaaatatcggtgcattaccataactcccttttaagacggagatagtaattctttgtaaacaacacaattggtcaaaagtcatataaaaaatcaacaatgtcatataggagtatttgaaaacagtggtaggagcaaaccatcgtcagatggaggggcatcatcatcagcaatgcagcatggtgatcttctcctcaattaagctccatcgcatgctttcaatttggggcagctgggaggggggggggggattgaatgcacaaagcgacccatcaaaaaggtcccagagagaggcatccccacaataataattagtaatcccagtctcacatatatgacaagggcccctgattaattgttcagttaatgactgggaaatggtccatgacctgacctgactccatcctctctctatctctttctgtgtgtgtacaacgctgaaaaagattttgtctgcttgtaaactggacaagaatctcttgttgtgttgcaggaggagtatgaaactatgaactgtttggctgctgcccctgcttctggttagaaagagaaacagaagaaaggacttggttatgctaatcattgctggttttgactgacaggtttgcttcctggatttttgtcaatgttggaaccccgacaagtgcccaggattaatttgatctgaaaggtcgtcaaattttaccaaattaaccccttttacaatgccgcagtaattcctttacggacttacaatggcatgaccaaaatggttgccccaaaatataagttggagattaatcattttaaaaatagaataatagtatcaaatgataaacatgttgctcgaacatattaggcaggcacaactgttgtaattgcctctgtatgaaaatatattcgactcccagcaaaaaagaacagagaagaacggagattcatcccatctcagttaatttaaaacaagacgatatcctgccattaggaaatacaaaggaatgacttaactgcatcaaagagaaactatttacacttttcagagctcagcccatccaaacaaactgtcttgttatcatgggcctaatggaccattattaattcttaaacaatgctacgtatgatatatcaattgggccgcataatttttacttactgggccgtacgttcacttggatttcttagaaacaagtctattttgcctccctcatgttcttgcccttggtcgaatcacatccctcaaccgcaaaaccgggtataacgcctcacccatctccgaaacccggtgcaaatcgactcctcaggtagttttgtaagcggttttgtcctatgtggtgcttaggtggcattctacatagaaaaaaaatataaaaacatgatagtggccccacatgtcagtctcactttctccacctctaccctctctctagtctccctttcttctccggggtccaggactgacggctggcgaagaggagaggaagaggtcaggggcggtggatccgccttcttacactcccacaccttggcctctgcctcttatccatggtggtggagctctacctccgcctcctatctggttttgctatggattaggctctagcatgcttctcctcgaggcagtcctgcgccagccatgtctcctctgtgagttagcaaaatatcacaaaatatcaattgactaatgtgtgaagggaatacgtctccacgagctgtgcgagctagccacggggctcgaggccagcgccgcgccgttcctctggtcctgagggaggaccaagcagcacgccgtggggctcgttgtcccgtgggcactgtaggtaggtgttttgtgccacgcatcggtgggcgcgctcatgacgcacatctggtgggcgtcggtgatggagggcgtgtcaagcggcgtacccatggtgtgccgcccattcttcggcaaccagaagatgaacgcgctattggtgtcccacgtttgggggttcgggatggcgttcgacagggtgatgacgtgcgacggcgtggctacagtagtggtgtcgcttgttggcgggaaggatgggtgccggatgagggcgcgggcgcaggagttgcaggcgaaggtggcaacgatgtttatcgagccaaatggaaactgcaggaagaacttcgccaggcttgtcgagataatctgtgcatcgtgaatcaatcatgttggccttcaaactgttttgttgactgtttgcttttaaattttggatatttttggtgagataggaggcggaggccaagctccactgtcacggataggaggcggagaccgaggtgtgggggcatgggaaggcagatccgccgcccccgacctctccctctcctccttttcgcgggcttcgtcggccgtcagtcctagcccccggagaagaaagggagaccaaagagaggggtagagagagagaaaagggtagaggtggagaaattgagactgacatgtgcggcccactgttatttttttttctatctaaaatgccacctaaacaccatgtaggacaaaaccacttacaaaagcacctgaggagttgatttgcgcctattttcggtgatggaggatgtgttatacccggttttgtggttgagggatgtgatttgaccaagggcaagacatgagggatgcaaaatagactccatggaattattggtgtagaaactgaaagcccataattggagtattttcatgggctttttatctgcctctgtttagtggatctgctcctctagcgaattcggcccattttgcgtctctgtcaattccaacaattctctgggctggttgaacttatatatacagctattatgtgcttctgctaagcatttgaaacaagtcctctatcagaaaaaaaacgaaagtttgaaacagattaatttgaaaattttggctttgaggtgaatcctgataaattcgggggagaataagttgcccacggattggataggaatcggcgatagcggggtccacgtgcatgtttccagttttttctcccacgcgcgcacgtttcgtttttttttctgttttcctttctttttttttttggaaaaaacacgtttttttcctttattttaggatgcggtaaattatgatagcaacggagagttgactgtaacaaacttttaaagcgaagatttaaaatttttaacttagacttgaaaacttttaagtcaagatttggattttttgaaactttcaacttagatttgaaaattttcaaatcaaaatttaaaaattttcaactcgtatttaaaagcttttaattcagatttgaaaacttttaactaaagattggaatcttttaactcaaatttaaaaactctcatctcaaaattaaaatcattcaacttaaattataaaaactttcaaacttggacttcaaagattttaattaaaattctaaaaacttttgactcaaaaattgagtcgaaagttttcaaatttgagttgaaagttttataattttgacttgaaagtttccaaagtttgggttgaaagttttcaaaattcgagttgaaagttccaaatttcacgtagattttaaacttgtagtgaaaatgggaaaaaaatctgaaaaagagaatgttaattaataccgtgattatcggaagttaaaaaaaaacttatcacgatttttcctccgaatccgcgtgcgcgtgtacctcccatcgttttgttgcgcgaaaaaaaaattggactcgcttcctcgctggtgggccggaatagaacgcagcgaagtgggctagaaatgcgcgctagatcgataagtagagcgtttgcgctaattagcatttccggacaaattcttagggaaaacttgctctttcaaataccaggggtgaaacaaactggatcgattagccactaacagcctgaggctcctttttcttcaaaatggacaccacagcctaacgtttaggttcctttttgttcaaattttgcatttgggcattgtccttgagactactgtagattttggactttggacgaggaaaatctgacccaaggagctcagcacacttgatgtactgtcaattgacctaattattgtctctctcaaactaagaaattaatcactttgtacttttctcacaaaataaagaacatggctgaataccttgaaagaactgtatattatattgcttttatatagagtatgacgatgactcatgacttcatttgggtaatgaaaattaaagaaattacactctgctatttcccctcaaaacaatcagcaaagcatgcaccattgtaccaaagtcagaccaaagcatccaaaccactggggatagaatatcctgctcacatactagctggagttgtactttccattgacctacatcttggtaatcagcaattagtaatctctcctagaaaggtgcaaagatcccccacctgtatatagatataaattcttggaagtcacattttagaaaaacaaagacaaaaccccagtccttggtagccattgacaggccccatacctagatgttcatatcagccaaggtctacatgccagtacggtttcatagaagcgatttatcatgcaataattctgtgacacaacttaatttgataacaaggatgcatatattgttttttgttaacaaatatacctatactttgataccagccaaatgtaactcaaaatatccgtcctttctttgaattgtggcaacttatgatggtgataaaagatatcaaactcggtgcaagcttgtcgccagtggacaccttcaaaattaagagtatatatttctacttaatttgtaagttggtccaaaattttaatttcttaaccaagtcactgatcaaactaacccatcataggtgattccacatgccaccacattgcatctagatccattgctaacgctcatacttgaccttacagcatgcctaatataaacattgaggttcaatttacaatggtggctagttagacttgacactgaagaagagctgtcaaaccaagtgcatgaatcctagctcgctatcaatggacaccgaaaataatagggtatttctacttaatttataagcaactcgatccaaaatctttatttcttgtagtgactcgcgccatcgaacggacttactagcgaagagctataaaatatattttaaaacatgtttctagatctgctgttttttgacgaaaaccaacaggagagactcctactgaaatgaattgccaaacaaatattgacaaacaaactgtacaaagaagagggaggagggcggggggggggggagattacatatcacaaattataagctgtctagccatgatttccaaaaaggtttatcctgagctttaaccctatgcaaaagtagggtaaaatcatctctaaaaagagatttccaagagttgaaggaaggctggacgttattaaagatgaagtcatttcttcttcgccagatgttccaaagagctacggcaatgacctcaatgaaaaagacatgggggaaattcctttttgcttcaataaccataggcatgaatcccaagtttgattgccattgtattcccacaaaattccagcatctagtggcaaaaggacaacagaagaaaaggtgcatgaagtcctccaaaactgagagaccacacaggatgcagtttggtccggaagggatactttgattattttttttctttgcagcaaatcttttgtgttcagcctgtctaccatcaaaagcaaaaggaaaaactttaattttaaagtgcatttgctcttccaaatgagggtgaggggtaactccactgtaagatgatcaaagaaaagcgagtagaccaatcttgattgaaagccaggatgtgaccatttgtaaccctagtgatcagcattatttagagatacatgagtaaggagatcattcagagcatgccatacatgagccaacatgctctagatctgctgttgatgctcatacgagctttattaccacctaatattaaaacattacagttccttatactgatagctaccgagacaatctttttttaagtaacggattaaaaccgacctccacatccacagagcgaatgtacgcaaccaaaactatcgagacttactagtactgatcagagctatgaaatctatttttatgcatgctcttgcaaattgatgccttgaaaattaccactgcttctacttaaattataggtataataatcaatttacgcgtcgcacccctgcctctagatccgttgctgatgctcatgcatgtacacatgcatgagccgaacgttagggttaattagggttcgtttaatttgcagtgccattttctgatcgatcagctcgtgcgtgtcctcaagaatcaagatccgtcacatgagcctcacgctctccctgatcgatcagcagaaaaactaatcaggcaagcattagtagcttcgtttagaatccagtggcggtcaaaagctgcattaataattaactaatctcgtttgcaatgcctataatttgttcagatatatgcgtctctcctgtgtctctgctagagctaagggttgacttgcattgcatgcaatgctggcatgcaggcaggatctgggtctgggacggtggtgattattaaatttgataatatagggcgagtgttcatgtgatgatgatgaccgcctaatattatgtgtaagtatggaatggcagtgacgacatgaaaattccaaattagttttcataaatcgttctgctgcatgcatgtctagatgctgtaggcgtcggtggatggcaaaagtctaactacaaaatgatctgtattccgtcagaagattatcacagtgttgtactataaagacttaattaaaatgtaaacgtcgcgattttgttccatttattagtgcatgtgtatacgaccacttcaaaagaaggatatatatgataaattccactaaataatgtcgtgtgtgggtgtatgaaaagaggcggaatttaagtggaaaaatggtttaaacagaaaaaaaaagggacgagaaagtagtgcatgcatgtttggttctttaccatttacaacattactaattttgtttttgacaatgacaagaattggccattacccaaaattctggaaaaggttggctaccaaagttgtgggttcaattcaactaggccagataatttggtgatgctaacttttttctttcccaaactaaatggatgactagtttttcggcattgcgcaattatatatatatatttcgcattagactacaaaccaaacaaggccctaatattttgcaggggaaaatttaagaatataatttgacgagaaatattaaccgtcctggtaaaaatcaaagaatcaaactgtgacagaaatattcaattatttgcattgcgcgtgagcagggcggtgcacatagcggaggcaacgtttgacctacacagattaacaaatgctatagcatgaaaacagtgtcaggggaaaagcataagtaacatggttaattgagatcacctaggacacaacaccgacataacttaattattaattaatttatataaacccagatacattatgcacagttatgtttgattagacacttggggttggtgtttgtcttgatgagtgattcttgctgctcctgcttgatggcaggatttggttattctacttttagggttttggggttcaggctacgaatatgataacatttgtgtacaaggacacttgctcgatcaggctgcagtagtggtgtcttgtgctcactataaaagcatccagcaagttcacctagatggtgatcagtttagtagatggcagtcaatagtgatcagtttcattagtgatgtgtcgagcaaattactcatcagttagctggaccaattctgtaccacattagaggaagcttatgcttgctcagtagcaaagaaactacaaagcaacctagctcattaactcacaattctgtccagctcttgattttgcagtattgggcatgagctgaactgattattttggaaattccttttgtgaagctgaacttagtgttttcaggccagatcgatgcatggtaaactgtttttagtacagtaggtcgtaatatttttttgtaataactcataaatgtattaattaatcaggtttgcttttacggttttgtaacaaattaaagattgtgaacggtgctccaggtttctttagaacaacacacttccaatagtattatccaaaaacaacttcttgacacggtgaacactactccaggcctctgcacatattgagaatgtgatatcaccatgatgttcaccttgccactaattcatactcatgaacaagcccatctactcggatcgatgttggactaccttcaattagcctcatgtctccagaatatgaagaaccagggaagggatcaacaagatactaagttccttacatacatatatataaggttcaatagaaacacaaaaggagaggtgcaagtcgatctattatgaccagaagaaagagtacagttgtttgtatttcattttcttcttccaagccgatgtgctctgcatggagcttacagttgggaagagaactcaactagctcattgcattcttcttcatcaaggataaaattaattggattggatgcacaaaagtagtttgcagctagcttcctctaccaatggaaggtcatccatgcatgtcctcttggatcaacaggaacagggatcaaggatgaactcgtggttcacaaacatattgaagcagagatacctttgcataccttcgtatatagtaatactaattactatctccatttcatattataagtcattttgatttttttctaagaaaaatatagcaatatttttaacataaaacaaaggaactatcaaaaatatattcaatattagatttaataaaactaagttagtgctataattattactatatttttctataatattggtcaaattttcaagaagtttgaccttacaaaagtgaaagagaattataacatgaaacggaggaagtactaataaaatatccgttagaaaaagagtttaggggtacaaatgaatgtatcatgctcaccagatcttgtgaacgtgagggtaggtgctaacatcaaaatttggtaagccccgaagtcatcatcggtctagagtcagtatcggctttagagtcctggaatcggccgatgggaattatcaagtcttcaatagttggattctaagtagaatcgattaaagaaattaatatattaaatgaagtttatccaaaagtgaccgagtttaaaggaggatgcggcatggcagtttatctattaattaggaagagtctattagtttccttttatctttaggaaaatgtgtttagtgtctgataaagactttatgttttccttttatctttaggaaagtttctttcttgtccaagaaggactaatatctacctatgggtataaatatgtacaccaagggtcattgtaaactatctcacgatcaatacaatttcggcgcatcgccaccttttacctttctactttttcgatgagttcttacttcgaattagggtatcgatttcgatcttctgacaagaggtatgaattgtctcagcggtttgcgctggcggattagggcatcgctttaaatgttctaatctatcttctacagccgctggttatcatatatcctagttaatctagcttagcatcttaatttgatcagatcacctgagattcgttttagggtttatgtcggtatcggctaaattatcttgctagattagattaactaagatatccaccactcttaaaatttgtcaaaggcatgattgtttaggctttatgtttctttgcatactttgagttgcatcgaccttagtcgtgcttagaaccataaaaactaacctgcctttgattgccaataagggttccatcggggtttcagctgatgagttttctggacattgcatcggcttacaagaattgtatattaggtggttttagccgatcacaacaaaggtttcattgtttatctaatcttgtggattttatgacatcggacctccagccgatgtatgctttgatcttcatatcagtgtttattctatcatatcattgttagccgattggtttctacgagattatattattgctttattatattaccattagccgattgtctttatatcatcatctacattggacatatagctgattgctcaaaaccctatcggcatcggctcactggtgatcttcaatttatatatcttgtcagttgcaagatcaaacagactggcacgtccacatctcatcaatttttggacctacattagagctaagcagatctcccaggccgttgtgttcatcgacttagttcgcgccaacacagacccgacaccatcggccgagcgcggattttccgtcagcagtaggttatgggggtgaaaattttctacattgtccgtacattgtaacgggtcagacctatataattagagataggataggagggtaattgagtattgcacacggtggtaggagcagatggaagggatgttgaacagtccatgaggacctaagctccagagtgggatgggcagcagctgtgccctaaccgcagaggcggaaggcaactgtgccccaagctcggaagtatatgcgccccaagcccggaagtaggcagcggtattgccatgagctcgggttctagcccgctgccatatgaagtggcccaggctcaccttcgttgcatactgatcgatcagatgacgagttggtaggcccccgagcatctgatagaggggctctggttaccactttaccaacataatatatttggatggtttatagtaagtttagagcagataacgtgaaagagagagaaaaagagctgagccagaaagagagagtgtgcattggaaattagcaaacgaaatggaaaaatcactactacaaaatgggtttttgctgacagtcagaataagttttttacaagcagttaggctagccgtcagcgaccataggccagaaaaaatacacaatcttcataggcgggcatacaaccgctagcgaaaatttattttcattgacggctaggttaagccgaccaccagtgaaaatgattttccccgacagagctaggttaagtcaaccgcctgcgaaaatcatttttgcctttaaaaaaagaaaaaaaaaacccttgcatgcaactcgcttctgactgccaacaaagattattttaggcaaacgaaaaataaaaaacccacatgcaattgcattcacaatttccacatcaaaccacaaatcaagcaaatatgggaagaacaattcatcacaatttcatcccaggtgtacaagaaatccattcacaatttcatagctactctaagatttagcaatcagtctgttctcatcgctgtttcttacaaaaattgtgaacagagaagtacaagcaaatatgcagcgattatttgtaagaaaacattcacaatttcatccaagatttagcaatacacaagaaagatgagagagaagaggtcactggtgcattcaccgatccacggttgttgccatcaccgagacacgtgcgaacatcggcaccaaagtcggcgagctccgtggatttgagagaggagggttggcaccgctggagcttgaggcctcaccatccccctccaccaccgttgggggcggagtgcactcattggagctctgacccggcgggaggttgggctcgtcggctagcgacacctccacaatgagccctttattcaacgccatggccgcaagagcaccgtcgaccctccccttcacagcggctggaccaggcggcgaatctgccgctcctgagatcgccggtattggatccgccgttgtcaagctcgatggcgacggatccgccactcctaagaccgccagtggcggatccgcccttttcgagcctgccggtggtggatccgctcctcctgatctcattgcagccgtagccgtcgccgtcgcccccacaatcgttttggccatcgccgccgccatgtacgccgtcgtcgccaaggacgagggagagggggggggggagggagggaggaatatggcagggagaggagggagggaggacttatcggtggggaaggagagttagatgcggtggagatcgagcttttcttttaatatgatggtcctctttagcaaccagcagcgaaaatcgatttttgctggtggtcgtttaggtgagccaccagtgaaaagggatacattttcattggcggcgctcttaaccacgttgttagcagagatccattttcgctggcggcccataacccctcatccctcgttacattgttgccgatggttttgatgtatggccgtcagagaaaatgatagggtgacgccatgaaaaatcgatttggtagtagtgaattagacaaagttataagctcatgttaattataaactaggactggtgcataggaaaataatccataataatttttttaatccaattccttttcttcaaattatatatgtgtgtgaaattttttcaaggattcaatactccaaagatcctatgaatttccttcaatccaaagatatgaattgagtttctaaataggataataaaggttggtataggtattctttcggaacagagatatatacaactagtaactcccatatgtgcaatacgatatcaaccatgattgattcgtctgatcaatttacagttagacttgaaattttcatctgaaattggagagagaaaatgtagatgtgatttacagatcaaataaattttggcaaccaatcaagctttagtttatcttttgaacatttcaatcattgcacagtctcctaagtcctaccagaattcatataagaaaaggctggattaccaaataagagctgcttcaatagagatttctttagacattagctagttactagctagttagcgtagtagaatcaaaattatatacttatccggacataagagaatgtcattttagaatatgcatacgctctaagcgcaagttattttttattatattattgtttaggctatatgttttggacctctatagccaagtatattataactagtgcttaatttaatgatgttactgttgtgtaattgtttttgcatttacggggaagacttaaattgtcaaaatcatgtgtctgtttgactataacatgcctaaatcgacattcttttgggtgacggaaaaggaccactagtgaagaaattgccggtttcaaaccactcatcaataccggttttagaggcagcaccattatagcggaactaattatgagggtagtcactaacgttggttctaaaaccgatactgatgacacccttattgatgctaattctgattaaaacgaacacctctaatgggtgctcccggtttttatttctacaaatgcggaaaaaattataaaaaatattttgcatttaactaggtttctatctacgcacggtcgcaaattgattctcacaattcacaagattttttcacgcaatattcacacacaagagattcacaaaatctaaacccaggacatctctcaatttccaaagccttcttaccatctcacctatcaaacacacacgtcgtcttgtaagcaaatcgacactactactaaatgaaagttatagtacatatttatcaccatagataagctcaaatgaaaatatttttcaaccaaactcgtatagattttatctctgtccgagattgcttagaaatttccaaaatccgcttgttcaaatagaactgagaagtgagaacttaacacattttgtgatatctaaacgatcttaaatgaaaaagtcaactacaaagtttagatcttgtagaaggacctgtttgtgcggaaaaacctcttataggtgttaattttaagtgaactgcaacctataaagacattacggacgtggtgttctgtactaatgtaccattctgatgtgatataagaacacccaaattcttcaatcaagtgatctatggttcttcaggttcttgtgtagctggtttcctagcattagaaattcttcgagttagagctactggtcaattaaggttatcaaggtaggacgatttatacatttgtagtccaaaataagacaatagttaatagatttaaatatatacaaactatatttcatattttccataagacttatggaaatggagctatatatgccaaaccatcctaaatatagctagcttgcaaattaatttcaccatggactctataaatgcctgcaactacaaataatttactccctctgtttcagattatataaaaaaactgtgtagtaacatttttaacccaggacaaatatattatgaaaatatatttaatgatagatttaatgcaactaatttggtgttataaatattaactatctttgtcaacaaatttaggcccagtttagatcccacctcaaaattttttaccttgtcacatcgaacatttaaacacctgcatgaagtattaaatataggctaacaaaataactaattgtacagattgcgactaatttccgagatgaatcttttaagcctaattactccatgatttgataatgtggtgctacagtaaacatttgctaatgacggattaattaggcttaataaattcgtctcgcagtttacaggcggattttgtaatttgttttgttattagactatgtttaatatttcaaatgtgtgtccgtatatctgatgtgacacggcaaaaattttcacccttggatctaaacacacttagttaaacttgaagtagtttgactttgaccaaaatcaaaatgacttataatctgaaatagagggagtaattaccgcagcatcttcacttctctaacaagttctacctcttttaataaaagaccttattttcagactaaagcaattgttaaaaaaaacagtgtaattatctttagacgtgtggttcattgatactcatgcttgttttctctcttgtggttagagaccatccccgccttcaatcgttatgtgcaaatgccattaattttagtttaggcatgtcaaaagtctaatcaagtatacaagcctagaaaaaacttagtactctctccattccaaaatacttatcaatcattctaaatgtttagcataaattaagattcaagaaagaaaaactagtatccttcattaaatgatgtacggtgtgatagttggagggtattatagggaaaaaaattgaatgaacgatgatgaattgggcaagtagaacttaagagtgataaatactttaggataaattttaaattataaaaagataactattttgaaatggaggttatagtcattatgagagacatacatcttcattctcatccatactaagattgtgttcttttcctaacttttcctacatttgcttaatggtttttgcacacacgcttcctaaactgctgaacggtgtgtttttactaaagttttatatagaaaaattagaaaaattactttaaggaatcatattaaccattttctaaattttttatgctaatacttaattaattacacctaattgataacaccgtttttcgtgcgtggacttggaacgcaggctgatatgtgtcaatgacaggttaaaaataagatctctttacgacagaggcgttagataattctgtagctctgttgtcttgaagtatattcttgagacttgagagagagagagcatgcacgtacgtacaatataagtatacatacacatggataaacgagcaacatatacgtacgtgtgtcgaacttaatatatatatacccctatttactagctagatgtgcattattgatggctctaggtctcgctagctccaacaacacgatcggaccccaggtaagtgcttgcctcgagatctgcgctaatgaatgtgcctacaacggaattagggcctgatcaaccaataattaagagcttaataatataattatgtggatgaatataccaagaccgcaggttagcatggacttgctccgtttctcaaatgattgttgtcgttgatcgattttttacgtcagttcaaactcggtaagcttaattttactaaataactgaagtgactgtttatagcaacgaattttccaaaataacagtcgttcttacacggtgaattacctacacttacattatacgctgcaaatttcagaacttacattgtaattactcctctgaaacattgtaagttttgaatattcacatggtaatttttctaatacataatgtatatgagtattattatcaatttgaaaaaggagatagaagagatggaattagcacacttgtttacacatagaagatagagcaatcacatagagaaaaaaaggcgattgaaattaaaattaaagaaatgttgttgcgattgaaattttgttgctagaaaggtgtattattaattaattagtagatttttataaatattttttgacatgttgccttcacaatcttttacaaacatatatattaggatttttactttattatattctctcttcatctttcagaaaatttgaacaaaagtttgaaatttaaaaattctatcgatgcgtatgaatgcaattagttagctaggaaatcgtttggccagcgaggacaatgtgtaaggacatggaatggcagagatcgataagagaggagcaaagaaatcattgatttgaccaattttgacccaagttctccagtggagtcacttaatacagacccacttgtaaattaattcgaaattacacggaggagagtaccatgctcaagaaaggttagtagtagttactccacgggctaaaaaaaaggttgctactactccctccgtctaattttgatagttatatttctaaatctgaaaaaatatttttgatagtcatatttcaattcaacaacctatcatcttaatgactttctcagatttaatacataactattcattcttccatacacgattgactacatgggcatcggaaaatgtaaatattaatgaatcgcttgtttacgagaaatgactagtagcatatttaaatagatgataagtagaattacttatcattagtctgtgtgccaagatgaaatatgagtatcaaaagtagatggagggattggttaattaatactccctccgtcccattttgagtgcaattgtaagttttccgtatccaatatttgacaacccatcttatttgaaaaaattataaaatttctttaagaaaataagtcatgcatagaatactattcatgttttattatctattaataataaaaatactaatcatattttttaaaaaaagaacggataatcaaatattgaacatgaaaatttataactacacttaaaataaaaagggagagaaaatgaaaagggaaggagtaactatacttatattggtactacacaattgtatatatgattctagctgggcgacctctcgtacagttgtaccggccatcgtctagatttgcacatgtgagaggtcggtgtatgcatcgtgggttgcggccgatggaagcttcagatgatcgttggcgccagcccacgtgaggttctgaattcgggagccggcctagctacctaccacccttctcccgccagccattgccgaggagattgagcacgtggcagctagctttgcatcctgcatactaggtgttagcatccataagtagggcattaaagaaaaggcactaaagaagagagaagaataaagggccgagggacctagttattaagacccgaccgggaaaaaccggaaccacagcccttgccggtccggtccaggtaaaagaccggcatgcaattgacccctccccccggccatgaaccggttagagtacgtgggatggggtccggtccagataaaagaccagcatgcaattgacccgcccccccctcctcggaaatcgcaacaacattttttatcaacattggaatttctatttttcttgtccgttttcacttttttctatctttcttgtcctattggaattttttttgtccgtttccaactttttttttgtctgtttactctttgtttgttttgtccgtttacacaaaacctaatcgtaatacccttctatttttctttttttcttatttttttcgattaacatgggattttctagaccgtgagagcgaatatggagacttctttttcttttactctatagatataatagatgtcacctccaatattatgttgttttttttaatggagggagtagagaagaaatatacttaagccttcgtatcgctgctcttctgtatagactaaacacaagacatatatgatagaaggcattgcacattagaggatgcagatcacagttgtgtgctttgctccacatgggaagaaagagaaactttgagatacatgttcttcatatatctttttagtggagcttgctagaagagaattggcataagttgaaattgcaatctggattttttttttcatatgatagttcttgctaagatcagattcagaaacaaagggttcttcaagattatattcatagcatattggcacctttggaagcaaagaaatggtttcattttttttcaaaatattaatccaaaagaaggatagttggtttagaagttttaagcgagagattcttccatatctctacataatgaatgaatctgttctttcaatggtttctatcagggtacgacatttgtaatcttggagttggaccttttgtagttgttttctttttatcctaatctaaaatcaactactggacacaaggcctgatagtattttcccttaagaaaagaaatgtactcaagccaaacactgggtagcaagggcatatagagacggcaccttcgaaggctataggtcggtatatcgtgagattattggctaagtcaccgtatgtaccttgttgtcgacaaaaatatttcctaccactgaaataataacagccaatatatctcaattccaataacgttgtgttagcaagtacaaccgattaccattagagtttgtctacacgggcggagctaaccccattcgtcgaaatttctaaattaaaacattgtttagatctgtagatcactgtgctgtacaatggagctaacccgccgggtgtcatttttggcttgcttcgcctttgtaaatgttatattttcttaaagtttattttaatttccgtctttttaatgcaattgcaaaattgtacactttatattctagaaaatctaaaaatatgctaaacatattaaaataattacattcggatggaaattaataacaaaacacaggtttgatggatgctgaacattactaaactataatacttgaagttattttaattgtatttatatttgacatgctagcatgaattttattgggacggaaaaggggttgaatatcttgggacatggcaacaaatattatatataggagactaggaactctttgtctagaaaaaggacttttttgtcaaagctttgtaatagtttttatatggccattaggacatatagaaactactagcaattaaaactaccatttgattttttttagataatggaactaccatttgatgaaacttgctgactaagatttacttagaaaaaacaaagattttagacagcaagagttgtttaattaattgtattattgttagagctagcttgacttgttagctagatcgaggtacgttgacacatgtgatgaactaaagctagcccaagtggcacaattgcacaagaactgatctgatccactgagatacctaatcagttacgtgtttgcccagaaggagccaaaggaggacgacagtacattaagcaagtcatatgtggactaccgatgacaattatagaggcagaagcaccaattcatgttggaagctttactaccacgtttatgaaataataatgagcaccaatttaccaataggagggagtgagattaattaattaacctgcataattggagcaatcaaaaggaaaacacatgggcaaatggttcacctcgcaactacatagtttcctttttccagaaatgttatggaatggaagttgtctattgtgaaggaccacatgaaaacactatttcggatgggaattattgcattagccatcgtaaagtaaactttgttaggatcatgcatgtagatgttttgttcacctcatcagacttaaaatcatttctctataaattttataagtctaggcatttttaatcaataaaggaaaaatgatttccacatacgggtgtcataacaatcgcctgtagaaacaaattaatcaacaaaggtggctagatatgaagacgtaccgcccatatgtaaatattagtgcagttggtcttcaaagcaaaatagctcaggtagattgttaggacgactgcccatgtaaatgtctgtttatatatttgggccttcacgaaaaaaaggtatatatgtcctagagaaccccaaaccaatgccgtcatgttgctgaaattcctaatccgtcaacactcaacaggcatgagctcgaccacgaccacactccgaagacactgccaccgcaacctccttctcgacacagccatccactccactgccgccagcctgctcattatccctaacacgccggcaatccagaggtcaacccggccaccgccgcacctcctagatgccgccaccgccggtagcgacctggtcttccttccaaacgtgtcggtgataccgagttcgtccctgacaacgccgctagccacctccaccttccttaatcctgatacactgtctccgacggttagtgtgaattgttaaaataaatgaatatagtttaaatgtgaaattaaaatgatacttagaatatatgtatgtgatttaaaataagtgtatatatatagtttagaatgtaatgataagaccaatgtggtaaaaggaaactgaataaccgttgcgatttaggtactctaaggaggataacaataatagttttgagccctacactgaagaggagactacaactagagatttacattccacaaccgacataacagggtgtccacgtagaatatccgaacaacttctacaccaaattggggcaactagaacatgctcccgaaaaaaaaatgttaaaggccaatccatctacacatttggttcccacttcaagtaaagggggtgtgtgggggggggtgtggaatggatggatcacaacatgtgtccaaaaatcgtcggaggaaggataagtgtgacattatagtggcactcaactgcaggaaagaaccataagacctatgatatcatcatccgatgagagtgggggtgaaaccaattgagtacaacttgccgagccatgtcccatgcccgcagccaccctgatatggggagaacgacattgattttgaccctgccaaggaagtatatattaacatgatacgttgcattttacatttcattttccattgtctatttctttataacaactatcaatgttttataggtctggatcgatggaagataaacttgtcgaaagtcgaggcaagaaaattccctcccttagctacccaacccaagggtgcctcaacggagaataggattcttgtaatccgaattttgggagaaaaaactctcgtgtctccccttgtgtgcaatttgtgtttcacctgtgatttacctttcttagctattcattactttcttctaagcttctttaagtattgggaatccttgagaaccaatatttgtgtctcaaaaagaaagaaccccaaaagtttcacaaaagaacaccgaaagttccgggcagccctctcagtcttttgtcgcgagctgccaggaaatttcggggcctgtcatctaactgtgtcaattgaagaaaacttcaggaaagcctattcacaccccccctccctctaggctacaccttgggctttcatagagtttgctcaaaagaatgccatggaggaagccaagaaattgagcgaggcgaaaaaccaactccccaagagaaattagttcccccgtcgcttgggatctagtaagtaagatggggaagccgatgaatggaggaggaaaaaaataggatgaaaggatcgggagacagttaacatcaaaatttggtatggttctttagtagattcggctaaggaaagaaaccgattggttgatggaaatttgtgtagataaagctgaattcaaggaggaaccgtgaagacaatggcaaggcggattcatattttttagtatatttcttaaataggcatgattagttatttccttgtgagtacaacatttgtgagttccttaggttggatgggaggtatatagtgaaccccaactagttaagtcaatatttataattgaacaaatagtgtggttcttaattatattgatttttaatgttctaactcttttagttattgttttattacaacggcccacacaaccaacctctttcaaacttaatggaacacatattgctaatatacaaagtttgatgttgctagattatccaccgatagctattatacacaatgctgccacgggactgatagctatttttcttgaatgaaacacagcaggggaagcccccactgttaatatattaaaaagaataaaaagaatttacaacagcagaatccaattcttaactacatcttgatctctctcatttaatctaaaaagcaacaacagataatccctcttaaggagatttttccaagaagaaaaggaaaacttcttattataaaaaatgaaactattctttgcttccatatattccaggctgcaagaaggagtttctcaaagaaacaatatccagaataattagctttagccaccactaacatgttatccagtttcagattggtatcccaggaaatacccaaagagttccaacaaacagtagagaagggacagaggaaaaacaaatggagcatggtctcagtgcattgaagttgacaaagcatacagtacagatcacaattagggggggcacaatgcttatgatccaacagaaacttagtattcagcctgtccataagcataagccatccaaaaactttaaccttagatgtgaatttgcttttccaaagccaaacaaagtgttgtggtgacttcaaagctctgaaattgaaagcataaaatttctgcgatgtaaatttcaaactgccccaaatataagaccagctatcacaatctccagaaaggtcaattctagacattaggtccgataaaatcaagagctcagagtaagcttgatgagaaaccggcagatgaaaatgatcctcaattggagagattaagaaattctgaacagatacattcctattcaccacaaaagagcataaccttggcatatgcaaagaaagaggtggaccatctgaccaaacatcatcccagaaagaacaagacaatccattacccagagtacaccttgatattcctctgaaaaggtccattaacttgcgaacatccttccactaaaaagacccccttggaggagacagatgagggatcttgtcatagtaagaagatcagataagagacacccaaggcacttgtcttctattataaaacttgtccaaatatttaagtaaaatagcctgattctggatagacaaatttattacacccaaacccccttttaccttaggcttacaaaccttgtcccaagcagccaaagactttttactagaattgaaatctcctcctctccaaagacaatgtctcctagccctgtcaatattctcaataactgttttaggaagctgcagtgtgcacatataatatgtagggtgagaagagaaaactgaattaaccaaggtaagcctatccccataagaaagaaaggctgaatttgcagacaatattctctcaattctatcaactagaggagcaaagtcaatcactctgggttttgtggtacccaaaggcaaaccaaggtaagtgaaaggaagggtaccaattttgcagccaaaaactccagccaacatctcagccttatcatcattcacattaatagggatgagacaggatttatgataattcactttaagacctgtaccttgagcaaaggtttgcaacagggcctttaacacaaaaagttctttaccacaagccttaacatacaacaaagtatcatcagcatattgcattattggaaagttatggtcatcccccatgggaattggcttagataacaagcccttttgatgtgccatatttattatagactataagagatcagctccaagcacaaaaagcaaaggttagaggggatcaccctgccttactcctcttttgcaatgaaagtccaaaccagggacaccatttaaaagaactgaagaggatgcataagacaaaattttcctcacccaacaacaccacttatcagagaatcccatagcagccataacctttagtatagctcatgctctatagt

SEQ ID NO: 15253 - DNA, 3947 bp, Oryza sativa
cgaatcttttgagtctaattacgccataattttgacaatgtgatgctacagtaaacttttgataattatgaattaattaggcttaaaaaattagtctcgcggattagctctcatttatgaaattagtttttttattagtctatgtttaatactctaaattagcgtccaaacatccgatgtgacatggactaaaaaattttagccccatctaaacaccccctaagttgttctggaatctgcacctttgaattaggagcgttgctaaactatatgtgctgttccatggcagcactgctggagttattgataccattttgtttcagtgacccaataacacacttttgtgtttcatatcaccaaactgcagtttctgcagaccctaggacattatttgggggacaaagtagcactgtaactaggatcatgaagtcaattttgtgtttatcatcaatctattgaattcgttcaaaaaaaatataatcaatctattgaaactttgtaactgtatgtaagataacctttctactaatatgatgcattaaatatcttagtataaaacctagctaatttaacatattgtgcaagtatagtattattatatcctctgcaagtatatcctctactgcctggggctttgctttgcatttcccagataacagtaatcaaacactcacttgagctttccaactaaagaaatcaagaaaagatgccatgacaaatactagttcaccacaaaagatacagtagtctccacaacaagagcactagttctgattattactattgtaatagaacaactgatacatgatgatgaattctatcaagagagctccggggatatagacactccattaccatcttcttgtcgagatggagaaggaagacctgccaaagttgtttagttgccctacatggcctagcacctgcctagtggataccttcgctgcatcggccgttgaggcatcatcttcaacaccaccggcgaagctgagaagtagtgagaacactgcatgggttgcatgcagggcagcggtgtcaggccattgttgggggtagagaggaatccagaagaagggtcctccatggaagatgctgtgcttggtttcatttatagagagtacacgaggtttctttcacaaagtggaagcttaggtggtggagtgccttttcgcagaccgaaatgaggtatcttccttagcatattccttagcatgtggaaacttctttttctgttctatgcttttgatttgctttggagtttttcaaagtatattccatgcttttgtgtgctttttggggcctataggtttatgaacaataatttagatgatgaatacactctagatgtattggagtaccttgacgaagcatgggctggaaagttggttttggtggtgatcacccggagcagatcttgcgtcatggacctacttagcaggtgcagtttggctggtcttgcattgtgcctgtcagattagtgctgtacttgatgcattgttgtcgtttatacatgaaaccaaatgaaatacaagaaccatatgtagattgcagaacaaattattttccttctaaagagggtgagatcttagtagaactttattgcttgtggtgccctgctgtttgacaatgtaattggtgcgagacactggcatatgatctggcctgagccttgtgtatgatgttatcagactggactaggccaggtgggccttatgcctgctttggtcttcatgccaataaacagagggagggcccaaaataagtcctttaacaggacactgatgttcatgttccaatgtatacttacggagttgtggacttgtggttataacttataagttgcaagggacagatattgcccaatacatttcatgagaaaaatctcgctatgcttttgcatctttgcacgctcatttggtgcatacggaggattggcctaaggctgtaaaataacaacaataataataaagctcaaggcttgcgagttgctcgagctcttaacgaaccgagctcgagcccaaccccaagctcgcaaaatttgttgagctgagctgaaagcatctaatgagtctggttatatgggctggtacattctaaattgtttttttactacgaaattatcatcaaatatatgttatcacgtacttaagccaagcccgcctgaaagcataaaggtggaataagcttggctcaacctctagcataaggcagccttacgctctggcttgcttgagctcggctcgttgacagccctaaattaaggcgtgtgaacctctgtcaactaatggcaggcacatggtggtggttcttaaaaaaaaatcttcgtttcaaaattcacattgaagttactaggttggtcacaatcaatttgatgcaaagcggatcaattactaaattaattgataataaggctaatttccccatctaactcagatactatattacgttgcaggcaccgctaattaacccaaaattaaaaagagtaaatttcacaaaactaaatatactttgactaaacgatcacaaaactatggatttaagacattactagtaatcgtgcacgtgcaatgcacatattaacaaatattatatgaatatgaaccattttgataagcatatcacattcaaacgattggcaatagaccaaggctacataaacccaagaaacatgtttttttttctttaagacattgtagttctgcttttatttttatatagcaaggacatattactatataaaaaagagaagaataaacgttgttccgcttgtcatagcatgttgactgtagcatccaggtgaatcctttggcgtggcagcataaagatttattttagttgtttattttggcaacttaaaatttacataaaacttaatctgagacgcatcccatctaaagaaaaccaagagataaatctttgagactatagaattgattcattcactatatgtaaatcaatctctcttgcagtgtttgtggcaaaagatgagcgatgcaatcttgatcgtttgacatagtttattctctttccatcgtttgtacacgcttgttttttggtctcctacacatcaaaagaagaaaacacaaaagaggtaagcaaatgacaatacatgctttactgaagatactggcaacagaatgctatatgaatgctacttattgcagtttcatgcaagaactactaatggaaggatgtgcatccagtaaaaataaactcaatggagcagaccatgaacatgattacatgaatggagtcagaggtggagacaccatcttttgcatccccttcactgtgtagaacttgttatcagtaatcaagttttagctaaaaggaagtcagtatagatcaaaatccaagcaattgaaatatatccaatctgatgcagagaagtggagaaccaacctcgtgcaatcgctgagcactgctacacacctatgaattcctacttcaataggaaagaccataaacatagtagagctacctgttttccttcaattcaagaatttttggtttcattaatcgaaacaaaaagaagaaccgaaaaaattgcaaggagaggaactaaagattttctttagtacaagagccttcatcctcgggatgttgctttcaaaataaaagatatagagcagtgcaaagaaatatttttcacaggttaaatcgcaaaccaaatttcagtacagccgaaaaaaaatagatactccaatcatgcacagacatgaaaaaaaacatatttcaacaattagagcccatttcaaaagaagcggtttcagttctcacaaatatgacatgcaatttgttaatcttaatactggtgggctgaccatatcaaggctaacatggaaataaagcacatcagttgaacttcagattcggtagtggtagaaaattggcatatttagccattttattatagtagtagttttttgagcaggggctgcaggaat

SEQ ID NO: 15254 - DNA, 1578 bp, Oryza sativa
atatatgtaccaacgctgaaaaatatatgagtatgacaagaaccccaaaatcaacttctaaattaaattttaaaatttaaattttggttgtatagctaataagtcaagaaacaaatggtataaattgacagatactctctctacccctaaaaaatcaatagtaccatatgcgacacattgtcacaatatgtctagttaaacatgcatgttatgatctcacaaaggtaatcgcctctaaaagtaataaaacaatgttcgatctacaactcacgggcaactcaattacacattgtcagagttgaatcgaggttgtcgtgttacaactgacgtcagaaatatgcaacggaggaatgacaagaaaaaaccataccactaactttcatgaatttattgttatttacaacaaaaatacaagagttcatctctgagttcattctcaactaccctggcatattataaaaccccccaaaattacatcaattctacgaaatgttaaaaagtaaataaagaaaggtaaagatcaaaaggaaaaatcagcggtgtatattttatcaagaaacaaaggaataatcggcaacagctatcatgcaataatatgtgcagtttgaacggctcaaaggaaacaatccaacatggcgagcgccttgtgtacgccctgcccgccggcgccgagacccaccacgttccggcactttgcgcggttctccgacggcgtcaggttcaagtccaggcagacaccgccgccgtcgcaggccttcacggccgccgccttgcctacgtcgccgttcttcgtcgtcgtcgtcgtcgttgtcgccgccgcctcggcctccgcgcggtgccgacgcatgtgcccgccgagcgcctgcccgatggggaactcgagcccgcagacggggcactcgtgcaccctcggcttcgccggctgcggccgcggcggcgtcggctgcctcccgaggcatagccccgcgtcgtcggcgccggcgccgccgccgagcgcgtgctgctgctgctgcctcggccgcttgtggctggcgcggtggcccccgagcgcctggaacgtcgggaactgccggttgcacgtcttgcactcgaacacgcggtcgtgcgcgccgccgcgcaccaccaccggtggcgcgccggcggcgaagccgccgccgcccagcaggccgtgctggctctgctgcgcgaggagcatcagcacgcgggccgtgtccacgctgccgacgaactcctgcatgtcccacatgctcctgctcctcttgctcatggctatagctagcttaattagccacgtaattaattaacccagctgatcactaacgtcgccgatcgaaatctgtatatccgctgcactgtgcaacaatactgcacatatgctgcgcgtatgactatatatatagagagagttagaaagaccaaatggcagcaaagctgaacttgtggtttggtgcacacgtaggaaatggatcgagctagcacgacgaacaacggcccggcttgcttctagatgtggatgtgtgtgtacttttctaaccatttgaccacgagagagcatgatcagattaattagttcctccc

SEQ ID NO: 15255 - DNA, 25267 bp, Oryza sativa
  unsure (1)..(25267): unsure at all n locations
agaaaagatcagcaaggtatgtattgacatttcatcaggatatattgtaacatcctcttcgcctcttcgctcctagagctgctacctgcacttatattgtgatattattcttactatcttacacacggtgaactcatgacctttaccaggccgatcttgaggaagtcagtggtctgtacttggatgctaaatcgtcggcgcgtctccttcaggagcagcaggaaagatacatcacctaagatctcttgctgtacgacgatgtatttgtccttagtcattccgctggatctctgataacttggtactaaagtgcgaagacttctttagggcactggattgatttatgcggaaatgtagaatccgaactctgtactcccgccaacctctagaggaaaacttgatttcggcatattgcttgttcacattactccttgctgagtagattgcatatgaattatcgtgtattttggtttcccatgctaattagttccagattccgtttgtcatctgtcgatttttttcattaaccagctgcttatcatcttattctttgaaatgtggttggtattatactccctatttgattgggtttatccaaaatttttccgcggcgatgcgaaggcatctttgcgcctcatctgcgttgaggttttgaggacgtgttttatgcagaggggcacatcggtgcgtccgttccagcgtcgctgtttgctggcccctgctttttcttccgtataataatgacatttccatgtcgattcttgatcattcctacattcattgaatcgtagagcgaaatgccctgaaatttgtcaatagacgatatagatatattttgctaatttctgaccatcactataccgctagagattactaggcagcactcggctactggaggcttagcctcacgtattgccgtggttcagtcagatcacggcgaaaacaacgtcgtcgaagccccaagagggaaatgacgcacgccatgacaccaattcaccctgcaacgcgacaccctgcccgatcggcatcacacaggctgcacacgtacgccttgttgctcgcgcacggccctgccaaaattaacttttgtggtcatcaggtcaagtggttgctcatcaacgccaaaattccggcagaaacgtacctgcgacgttccaggtgcactgcacctcgctggcagtcgcagcattgcactcgagaccgcgaggcgcgcgtcttagctggtgaatccatcgagaacctgtgatccacatttgatcggtttttgcgagctgtgatgctcgccatcttccgttgtggatagggggagctcgaaatatctcacacagtaggtgacaagtcctctttgctctttagtcgccgtcgatatatatttttctcgccgcggcgacacattttatgtggcgttccgtcgagcatagtagatgggccatgctttgcatgatttggccatttgtagcttttcgtgtcacggattcgatgattattgcatctgcgcccggtgatcgaggaagctagggaggttggtctcttttgtctttagtttttctgatcgatggggaatcgaagagagaggtactatccaaattcattttttacctgtttcatataaccaatataaaaccaaaatattacaatacctctactttatcaaatctcaatacaattattcttcactttatttattcacaatacaattattttctactttcacaaactccgatgcaatgattactttaaaaataaatttattttgaaataaacgaaaggagttaattttactatggaacagaggaaatatttcgctattggtccgtttgatactccctccgtctcattttaagtgcaaccatcagtttttgcacccaacttttattgttcattttgtttaattttttataattaatatttttattattatgagatgataaaacataaatagtacttttctcgtgacttatatttttaattttttaaaaaaagtttcgaataagacggacgatcaaaattgggctcggaaaattatggctgaatcaagacagacaaaacgggtaccaatttgatcgcaccgtgccggtacactgtatcggtatgggcgtgggccgccggatggccggccgatcaattcgtactacgatgcaatttgggcagccaatggatggaggacacgtggctcacgatctcactgacaagctagatgaagactagcacgcacggctgacctggcgcactcccatattccgggagcagcttaaccttaaatctcggccacatttggcccaaattttccggagagttgtataatcaaatcgtggacaattaattatcaacagtgcgtgctacagtgtttatatgtgtgtgctcgatttgcacctcatatatactacatattactattatagatatcgatgcatagtggcatacgctacagtagtacagtgtatgatgtgatgagtatttgtgatttttatatagatttactgaatgttacggtattgccatcttcgacaggtgaatgattgcaatacttaccgtaattccggttttgttaggaaattcagcgaagcgcaaccaaattgtgcttattctattcctctttagtgggtaaacgatgaagaattttagtacgtagacagtatactcctacctgtaagttggtacgacatagctgtccccaaagctgttcatctacgttttctctcttgaaatggagactatcagcaggagttgtaccgggcttggtcacgtacggattagtagcaatgaagaagctatatgtttcctcaattttttaatacatgatgtcgttaactttttaagatacgtttgaccatttattttattaaaaaatataaaattatcatttattttttatgatttgatttatcgttaaatattctaaagcctaacttaaattattttatatttgcacaaaaaagtttgaataagacaaatggtcaaacgtttgtcaaaaaagtcacggtgtcatatattaaaaacaaagatattatatggttattgcgtaaatgctcaacgccgggcgaccggcgcggggggagccggatcgggcgcttccccctcctcacgcgcaatgtctcctcctggccccaccatgtatctccaccatatattccattgcaacaaatcatccacatattttggaaaccctctattaagggaatttggtttattttttgttccaccaaaaatgtttcatatagtgcactcacaatgtttcactatgtatagatctaatgttgcagtgaactaaaatactccattgcaacaaatcacccacatattttgggaaccctctattaagagaatttgttttataatttgttccacaaaaaatgttttacctagtgcactcataatgtttcactatgtatagatctaatgttgcagtgaactgaaacatacttttactatttgctgaaatattgtttttatataaggtgaaacaacatccgatttaaacaagtgaaatattttcgatctacttagtgaaacaattccgatatacctggtggaacatcgtgcaacatttaaaaataattcaataataagctaaatttttttcatcagaatacacatggtcttgttttgaagatttaattgcaacaaatttaatggtgcaatcgggtcatgatttggataaataatttaagagaaaaataaatttaaaatagttttgtacgcatgcgtgacgctgacgtcatggcccaattttaaccccctcccagtcccatcgggcgtccgaaccggagtcgcttcttgattattagtatatgcagcttgttaatttgatgctactaggtcactactattttggtactatctcatcctgcagtgtacacgttagctacatccactgtttgaaccggaagatacatcggtgatagtcatgcatgtctatgtacgtatgcctattgatcacggtgaattccaattccaatgtacttctggctagcaagtcaccatccacatgcatcggacggcctgaaattaacgagcgtgcataattaattacctcgcgaactgaccgtcagggagcgagatcaaaatcaggccacatagaaaagcaggggactgggtaaggtgagtgcggcgggtgggcccggcaaaatcccccgccaccgcctctccgcgaatggggaggcggcacccacgtgagcaagccccacatgctgacatgtccccactcgatcgtcgatccccccctatttctacctcctccaccccgctgcttgtcacgctctcgttggtcgatcactccatcgatccatcgatcgatcgctagctactcgccgtcgtcgaccggtcgatccgccattagcgagctgcaaggctctctcgcttataaatcttccgagtaggcaagcctcaatcgatccgagagtttggtcgttgatcgagctgatcgatcgaccggtgagtggtgcgtggtgtgcggccatggacgacggcggcggcggcggcggcggcgactcgtcgccggcttcgtacatcagattggtacgtctattgtggcgtctctattagtacggcgtacgtggtctgctagcttgatctggattgtggcctgcgagatgcatgtatgcctcattctgatgaatgtatagatgtatgctgattaatttgcacgcaggtgcagcatctgatcgagaagtgcatctgctacaacatgaacaaggaggaatgcatggagacgctggagaagcacgccaacatcaagcccgtcatcacctccaccggtaattcgctatttatagcttcacgccacatttgcataaatggctaaacatgtttagtacctttctttttaagtactatttacctaggagtttattacttgcattgcaactgtgcggtgcatatgcacatgcagaagctgtggctttcatcaattaatgcattacattgtgcacgctgcatgcgtttagttaatttgtttggccatcggagaaaaactcccatgtctctttttttccccttgaaatacgaatataagatgaatactccgtattctatatgacgatatctgctcattcgtcgagaatttttcaatattttttcttgattatgctgtctgtgagcagtgtggaaggagcttgagaaggagaacagcgagttcttcgccacgtacaagaagggccaaggagaggaaccagcggagagcaagagcagtagttcttcacaggaagctgctggttccaagagatcaggcggagacgacgactaggtgcatgcatggcacccacgagagagggggctacttgtacagtaggatatccatcaagtcgtagtacctcgtactgtcttacatctagctgttcatagtacatagcgtatagtagtaatgtagccgttattatgtacgttttgccccgaaaataattaagattcggattcgcagctagccatcgtctagttcagccggtggtgttgcatgcatccggaagatgacgtacgtgtgtacacatatattcacattcgagtgcctagctaccttgttgctgtcagtaaaaagatcgatggatctctctcggtcgattttttaagtaaatgacgccgttatttatttcacattcatcttattcaaaatatttatacatatacgtaggatatatcatgcttaagtatttttaaatgataaaataaattacaataaagtaagtaataattatcaaaattttctaaataaaagaaatagttaaacgtgtgttcaaaaattaagggagttatcaaggtacacaaagatcaatttggtactactccctccgtttcaggttataatatgtttttgattttggttaaagttaaactgcttcaagtttgactaagtttatagacaaatataataccaaattagttttattaaattaataattaaatatatttttataataaattttggcatggtttatatatattgtaggtaaaagatgcagtccatgtatgtataatttcctggacgaggagttgtgcttctcccaaaggccttgatgcaaacgtaaggtgaaattgtgcgcgtcgtcagagtacaggcgatctggctgggttttttttctctcctccggatcgtacacaccgcgcgcattattattggcgtacgtactcgatcgaccgcgagcgcgacacgcacgggcgagcgatcgtcgtcagccacttgggagttgtaccgagggggagcgagagcgagagcgagacgcgtgccgcgttggccacacaacacaggtatacgcaggtacattagtagcagactataaaacaactataaacatatttcgacaaagataaaatagtatagagaaaaacagcgggctacagaattactatagtacggacttcaaaatatatgtgtgtatgacaggtaggatcatgtattaattatgtagcatatttttataagtaactattgtatgaattgactatagatgatttaaagtcagtagatgggtatactattaaatttgctcttaatactactccctccgtctcataatataagagattttgtcattttgctagcactgtttgattactcgtcttaaagtactttggataataaagtaagtcacaaataaaataaataataattctaaaaattttaaaataaaatgaatgataaaacagtacaagtaaaatattaaaattctttattttaggagatagaaggagtagctagtagtactactatagctactggaccgcgcgtggagtcgccatggggtcgaggacacacgtgcgtcgagagagtggcgaagcagcgcaagctagcagtagctaggtcgtgtatagcgcgcgtgtgtggacgtacgtgcgcgcgcgcggtgatcgattggtggccgccggtttggtgtagacgtgcaagtctacgtacgtactgttgcgtgctagtgccgtcggctgcggtgcaccacacgtacgcgtatgcgtacgtacgcgctgtggtgtttgttttgtcaggccctaccgcgtatcggtaggaaggtaggtcgattggtcgatctgtcggccgcgcgcgacgttttgacgtgcgtgcttcacatgcttatacgtatttcctctgttttaaaatgtactccctctgtcccataatataagagattttgatattttgtttgtactatttgaccactcgttttattaaaaaaattgtataaatatagaaaacgaaaagttatgctctacaaatatagaaaacgaaaagttatgcttaaaatacattggataataaagtaagccaaaaaaataataattccaaaaatttttaaataagacgaatggtcaaacagtgcaagcaaaatatcaaaatcccttatattaggggacgaagggagtaagtattttttaggttgacacgagtataaagaaagtggatgggtatggttggagaaataaagtaaatgaaagataatgattgtgattggttgagaggaggaggtagacgaaaaaatagctttattttgggacaagatattgtgctagaaatagctatattttgagatggatcgatgtagtactaaaaaggacctaaggtaggagtactccgtacatttgcaacattttctgcttgattaagaccctgtttgggagcttagcaggcttctcctaaaatctacagctctccaagaaaaaatatccagattttaatctagattctaaaaatttgtagttgtagaatcatgaaagtgaacccaaatacaaatcggaaatcatagtttttcaaaattctcatcagctgcttcctgtcataatgttaggcttccaaatagaccttatttccactaggactgatctatcagcccatcagcgtacggactaatgatgtgagtgttttaacctggttgttaggattccaatccatatcatagtttacaagtggtcaagtgcttgtgcaaataagtctggagctacttaagcttctatgtgttcttgtgtatagcaatcgtgatcaaccttttgcccagtgtgccctaggcaacttatataccgcccaagcataattaaccgtgtcctaaaaaaaagcataattaatcgttttggggctagacatgcatcatcgtatgctctgtagctattgtcatgcactcatgccatttatcacaccgttattatttcttaccacactgtattatctcaggtttaactatgcctcccctcgacataatgcgtcagttgaagggaggtgtaactgcaatgtaattatatgtaactcgttatgaaacaaacatgaaaaggtaggtgactagtaggcttccatctccatgagatccctaggtctattcccacttcacgcatgtggtgtgaaattcttttatccatgccctagcacaaatcttaacactcatctgatgacccaccccgaaagtttctgtaaaaaaaattctggcgatagttttataacaaatccgtttatctttacggcgctcttcaaccatgcacggtttaaagatctgtggcggaaccatgcacagatgcattcgaccctgaaagtgaacaatccgattaatgatagattgcccccccccccccccccctcttttcaattaaaaaaagtagtaggactatacaggctttttaatgcaacacttaggtaggagtactgggctaagggcctaaggccaggccatctgatgtaagaaactggccatctattcattccggcccagcgtacgtgcttacgtttttcctactgttcttgcggaaatgcgtgtcttcaacgatatttgctgcaagataagtgcgttaatgatcaagaataagtccactacggattagagagatttattacagtaaacgcgatattattgatttattggtacaaggagaaagagacaatcgatgatatatatgaacatatataagggcgatatcggagtagatcaaggagtagatgtcaaggcggcggctgctgctgctgcctccctgttcgccgacttgggcttaggcggcggcacaaccgggaggcggtggccgtgaggcggcgaaggtgggaatggttccgtcgggacgggcatgaacggcagcttactcttgtccgtcgccgtggccgtggccgtcgttgccggagcagcagaagacgaagctacggcctgcagctgcagggaggagatgcttggcagcggcagcagcagcagcactgttgccgccacggccactgcaaggcctcgtccgaatccgtggccacggcaccctgccatctcgatcgaatccaacaaaatcaacaatatgagatcaagtaattcccctctcgttccatttataagcagaacagagtagcatcattaatgctggtgttatgatctgcttgcatagttcgggagtggagtaatgaactgctcattcttctagagtactagcaagtatgatacgtgtgataaatgtatttatgcatatgcatgttactcccgcctaacttgcatccatgcatggaaactgaaataatcaaccgattgctaagcagtagaacaaacaaacaaacaaacaccacactcgcacaagcacacatgcgtgcagattaatggattctacagtagagtagcatatatatagaccgagtaaacagatctcatgattcgtagccgaaggagcagaagaccgtatattaatgtaaagtggctgtgagcctgtaattaccaggcatatgtctctctagactttgagtataaattgtactacacgagatgatcgagatgacggatttaacagtcaagaatcctatagtctacaacaagtagttacaaatcacaatctacggctttggcactgtcacacccgccaatccagtatacagaattaaaatctcatacacccgcaggtttcctgacgagcaccagaaattctgaaactaattgctgctgctaaacttaataccagtggttgcgaacttgcaacctgcgtctggctatttttcatgggacagagcgtgctcgggccgatgggtgaactcgtagtcgaggtgcacgaacgctcgctcgatctcaggcaggcgttccagtttctcctgcagggcctcgccgatgtcgtgcgcctcttgcagcggcatgcttgacggcagcacgatgtccacctcgacgaagtaatgggagccaaacgtgtacgcccgcaccgtgtctatgtgcctcacggccttgtggtggttccagcataggtaggtcagcttctgaaggtattccggcgaggctgactgcccgaccagggagtggacgttctcgagcaccgtcatcgaccatgttctgatcgtgtagattgctagctgcaaacgagaaaacagaaagtagtctctgaaatacagcgtgtttttcttaacaaaaacctaaggaaacgtttggaatacaagattcttgagtaattctcatgtttgaaacgtttggacgttgcaaaggactacacacccaggacgatggaaaccactggaagctatttcatcagactttcagtagaggaatttagtcaggcagactagaaatattctctcttttaaaccaagtcactgtcaaggttatggacaccagttttgaaggaaaaaaaaatattggtccctttaagaaaccggtaactgccagttactggtttttaccggacaaaagagcaaaatcaaacactaattcaaaaacctgtaacatccataacaaatcgagccggttttttagttcaaaactttggattcaaacttttgatatagctaatgtgtagttgttcataaaacatatgaatatgactatgcatggttgtacaaaatgtgtattccaaattaaaatttaagttgttctggccagtacgaacaaaccagctcgtggataaatggcagtaactggtactgccaggatttgcatctctggttacaataaagtcatagctgatcttttcatcatggtatgttttccttttttgaaagaatatatcatgatacatggaaaattggcagaaactagttacttttcccagtcaattcccaatcaggatgatgtgcctagctccaaattaacgattagatcaaatatagcatttacttgaactctagttttacactactgcaatggaacaggagaaaactttttggtacttacgatgattgcaccaactgggtcgatccaaccttcgatataagtcgctagtagtgcagcaacaagaccaatcatatttgtgatgacatcaaaaaaatgatcctgtgcataagccttcactatttcatttgtgaatgtccggcaatataaaacaagggcaagtttcactaatgtcactgcaagcatgatgtccacaacccacttttcttgctcttttgtcaagctgaactcatccccctggagaacaagacaataagttcagcaatcagaaaggtatatggcaagctacaacagaatttcaaagccaacaaacatcaaagacacttatcgttctagaaaagaaatcctcaggcaaagtttctggtcaaaagcaaaatgagagtaggagttcaaggccaacaaaacatcagcagacttacatcagacaacaacgagcgtactgattctaggatgatctgaaggccaagtgtcgccataacagaggcaaagacaagtattccctgaagaagatattgtgatggaacagtcaacatattgaaatttggaacttaaaagtgtatgactgataatactaagtgaaaagagaagcgataaactcgatcatttagtgaaattagactgaaggacttatcataaatatttccatgcataaattgtctgctgccggagtagcaaagatattgatacagtagcattgacctaagagcaagagatatctgggggaaattgggaacgtgatttctagtaactatgaaaatcctcaaaacacaaaattccgcatgttactatggtccatctgccaggaatgtttgcaatagtttagtttcttttcattcctggagcatttccactttttcttttcattttgcggaaaaaagaacatcacagggagtaactggctatgcatcatgaatagccgagagttgagtcccttggaatcaattgcataaattacagtaagaagaataagcatggcaaacatgaaggtaatcttgtgataggactcaccagtggctgcatacgctttttaccaatagggtatctgtagggatttggtgtttgcatagagaaggcagtaaaccacaagataaatcctgacaacaagtcaagaagagaatccaaagtcgaagcaataatagcaagtgaaccacttctcacagaagcatacactttcgcagcaaaaagaaccatgtttgctatgttcgatagccggatggctaaagtctcactcctagcaaccttctcacgctcttcctacaggcaaataaatttatgttcagtgttgcaatgcagttgttaaacaatttgtcttccctactgttacaacagaaaagcttatcaaacataccttggacattcctggaagaaaaccacgatcagtaagtgtatccatttcattaaagccctctagcatttccacttgctgttggtagtattcagcaactacgtcctcaggaccttgagctgaagatagaatcgtacatcaatcacagaaaattatgtccagcatgaagaaagatagtgacattagtggagcaagcaggcatgtatgcttcacatgttctactgaattataccacttctcagtgaacctgataactctgatatctaattaattatatttcatctattgattatatcacatgtagaaccactgaataaaatgctacagctattgaaatgtacaggataaaaatgtcaattctgatttaaatagtactactagtactaggattgtggggccttgaattcaaccaccaatagaccacgactttaagcccacaaggactccctacttctatagccatgggaaagcagtgattgacaatacgggagagaaacgactactagatatccaaaccccaaatgttgagtgcggccaaatgacatgattgggttattaattcaactttttgtgcccaatgcaactttgttaaccagaacaaaacctctaaaattgcataaaagggtaaaataattgtgacaatacatgaacgctaagacacctggtgcccttctcacgctgtcagtcacccacacccagtgccccagtctttacaactcggctcagtgctaaccacccccgctgataaaaaaaaaagttttcttagaactctgttcacgtgcactccaagaacagagcagctcacgtgaggaccgtcctgccctgccccagatgagcacgatagtataggcaactaggcaatatcagaaagctagaaacaacaaattcctcattccaccaatataacattccccattcctattcttatctgccaaaggttgcacacgaagaatctagcctaccactaccgtcaacatcctaatccaatccccatctatactagcacagctgagctcttgctagttgctgaaacgaaaaataaaaggagttactgcctttttatattataaaggcctaaacggaactgcttttatagaaagcagataaaaataagttactttagtagatatctattgcaaaaggcaactaccgaaacaaatgaaccatgttgccaacacacgagaaaaggcaaacgaatgaaagcctagatcaagcaaccaagcatacgaacacaacaatatatccataagaccataaacatcacacggtacaagggtagcaagcgcgcgacggcgagttggagagagatcgtacataggacgccgaggcagtggtggtggagcccgcggggcggccgcctctcctgctgcacctccggcggtcggaagccgtcgaagttgaggcgccacgacttctccgccgctgcgcccgcgccgccaccgtcgccaccgccgccgaaggaaccggcctcgacggcggagagcaggagcagctcctccccctcctccccaccgcccgcgaccgccgccgccattattccacgaaccagggagccggaggcgacggcgcgcggcacgctggtgggcagtctccctcggtcagttgccctcccgccgtgcggcgcggcggcgccacggggagaggagaacggcgaggcggttggtagtttcggcgaagcggggaacgcgggcgctcgagcgacgcaaaaaaagagtgcgggtctcgtgattaaagaggagggtcaagagggcggcggggggagggaatgaaaggaaggggagggttaggccgcgtgcgccgagcccatacaccgcgggagattgattataatcactccatgtctcggtggctgtcgagcccgtttattacacatgtcaattaaattagntntacatttttttaaaataaaaatcaattgatatgaaatatatcattcgatatacatacgagtttaaattaacatctataaaaatttattaattaaagcttaattctttatgctttcataacttttcataacttatagagtcgagtttaaacttgtaaaatttaacttctacaaaagattaattaattagagcttaattttttatgctttcataacttatagagtcgagtttaaacttgtatatcggtggagtgacatattatatgtcaatttattttgattttttaaataaattcttttataactatttatgacatacaatatacatataagtgattaaaattgttttccacgtacatagtcgatcgccgcggtctttggtttgacaaggacggcggtgcacttggcctacggaggaggacggacaggtggagggtgcacaatttgagaggatacggatccccgcggttgcgtggcgcgaggtgataccgagaggatccggttcagcgcagtaggaaatgtggcccccttctccggtttaaaaacgcattcgcctgattgcctctctctgtcccccgtacacatatcaggaaaatggccgatgctgattgcgggggattttaactacttatttgccatcctttaccagatccatttaatccctctcacagtcacagcaacccctctcactgattttgctgtcttgccaagttgcactgatgaagcgacgaacagttgtaaacgtggacggggctcctggcttgatagctgatgacacggctggtgcgagcctatgtaggagaacatgattactcggttaagatgaactttcgagaaaaacaactatagagctcaagtgcatttggggtcaagaagagagtcgctagttatgactgatcggggcggcgcgtgcgcccacttgcaaacgtgaaacaagcgcgcggtgtggtcggagtcacctcccgcgtcgagatcgccgtagctttcgtctcccggggatagcggctaggtgcgtgtacttccaacaaaaagatgtgaaactggaaggaagtggaccatatcgtcctcgtgtttcttccacacaaacgacgcacgcacctggcaccagagagccacgtacgcatggggaggcagtggcagagcgaatgatgcaacagagagccacacggttgggacgggaaagcagatcgcatcatcgcatgacgctgcctcgcctcgccgctgggataagtgggcgggagcagccggagtcgtcctggccgtgccgatcaggccgtttttttcaccgcgcgagcacggtcttatcgccaccggggtgcatgagctaccacaatcctgtaatccacaggaggagtcgttgtccctgcttggcccacgaccgtctacaagcagcagcaaccaggcagccggagcagcgccttgctaccgatggataaacgtctcttcgtcggaatgtgcacgtttgccggtgtaatgatcctggctcattcgtcgcgggagacgtgaaccctccgaatggaaaggcaggaacctggcgaataacgttcatcacgatttagtatattccacatattgacgggggagctcagggagaaagggactcatcagggacacggaggcaaccaaataattgaagatcataagaaacaaaaaattgagggtctcgggtttggtgggagaatgggagtcacgtcaataaatcggtcaacaagagaaaaaagaacctacctcgctgaaagaacacatgcagtagtatatattagtacagggttgttggttcgaaacctgtgatcaaaaccgctgctcgccgtcttcaaacaaacgcgatctctgtaacatatgatgatcgaagcaaatacgactatacgagaatgccaggttcgaaacctgtgatcaaacctgctgctcgccgtcttcgaacgcgatctcatgtaacatgacgatggaagcgttggcgcccgttccgaagggttagtatatcataccttacagagttacaggctcttgtacaattgacccgctgctacagctttggaggcgatctttgggctgacgtcacgtagcccaatgagtaaaacatttaccagctgctcatccattcacagtaggaagcagcagctctccaaatccaccttcgatgagtaaaatctttcgcatgtccaaaacgagcctaaactaccagcattctggggttagtctatcttgcctatagaatgatttcatctttaatcaacaaaacaagccggactaattttgtttcactagtgttgacactcgatgttgataaattaccttcaacggtagtttcactcaattgcaaaaatgaaaacgataaattaaaaaaaatactcgtccttgcttaaatatagttgtaaaacattttccagcagatttcaaatactcagtttgtcaaagaagatattgtagcagccaataagatgttatcagaccaaataacagtctttttttttgccagaagataacttttgagtaatgagcctttatagaaagaagaaacaagcaatagatgaatacaatcatcacatcactaaagtttgataaaggaaatgacttttgtaagatattaagaacaagctcacctggcgcaaacgatagacacaggttgagtatagttttaagctcaaaacccacaaggatttatctaacaaacatctccaatccaagagcttggtggctgctagtaatatgggaaccagtaagattttaaagccagtactttacggtatattcaggtaaattagatatatatcagctgctatcaaggattctggactttagtcacagttgacaatatttcaaagttgagcacatcttgagatttagactactgtccacaatttcaaagttgtcgcaaacctttccaagccaagtgtcagactcaaaagctcagttaattaccaaacttttatccaacacccgagacttgttttaagaaatatgaccagtcacaagcaaaactcaccagggtgtaactttaacgtccggttagtttccagggctaatcatgcatttcaaggtaaaatagaatggacatgaaggtcaagtgaacaggccatcaccaattttcacgagaaatactgagatcctaaatgcacataaaattatattgataagcctatctccacaccaaacaggacatggtcagaatgcaatgctcaccttatatcaccagctcaccatcaaatacagtgtaccaatctttcatgagagccactggcattccctctatcctcaattgactccaccaagttgagatttctgcatgctacctgctagtactgggcagtcttgcaaaaattagtatgaagtaaaatgtgaggtttaaagacaggaacttgtaagaattgaaaaatatctcccagttaaaataaatcggcagtcgtagaactctgtctatatacaacagttaccttgcacatcatcgaacagaatgcgagttagcacatttcatttttgtggaacatcttcactttttttttgggtggttcttacacatcaaaatgaagaaatacagcattgagcattttaatctcagtatagtctcagtaaccacatcttctgtggcatcttgtaaagaacgggtgttgaagagcttcacgtgcctttaggcgcgcatcaggatcataccgaagaaggccttgaagaagatctataagatctccagcagaatgatcaacatgttgcattaccagattctgcatgagttagcacaattcgagtgtcaagaggataccacctatgagcgacacttggcaaagaggggaaaatgctaagaggaacatactgactacatcagataacaaagtacctgcagacgaggcaatttccagactgccttcaggctttcccgtgaggcagccccctctggccagtccaaccttaatccacgtctgaaatacttttcagcacggcgactgtaaaaaagaagtaacaagtacatgcaagtgattgataatttgaaagaacttcagatgaaactcagcagcaacctaagcctagatgtaaaccatcttatcttagattataataaatcatgaaactataacgaagaccttgtatacatactcagctctgacaatcatatgttttggaaggggacctagaactctctccatcatagccaaatgctccaaattttcatgtgtttgaaagagagcttcaccctagtagagaaaatcaaagaggcaacatatcaataggaagcactgcaaattcgcggagccggcactgggctatagagaaaatcaaggaactactcaggtatagatagtgtgaactaaccgagcagagttcaactaaaatgcatcccacactccacaaatcacatgaataattccacccaagacctgcaaatgaaaacagagaaaggaaataactaaacaaaggtaccataaacaaaacacagtaatataattatgtgttccactttataggggggaaatggaaaaggatatgatgttaataccaaggataacttcaggggcacgataatgccttgttgataccacataattgtggtcttggtgttcgaatgttgtacttccaaaatcaatcagcttgatagcactagattttggaagattcttaaaaaaggaaccatcctttgggggccgtattgtaacctttatggaaaacaatataaaaatcagtaaaaaataaatgtatgctcgtactaattgacataatgtaatggcaaccacaagtgttaacggataaaattgcaaaagattatagttcgaatgacaaaatttagtattgaagccaccttataatcaggcacccggatagattctgatgaaacaaggagaatgttctcaggtttcagatctgtgtgaataagtcgcaggtcatgcataactgcaaatattacaataaaataaacattagaataatactgttaggggcaagataaaacaaaacgttaatttgcataaccaacaaacagcagaaattaactgaatacccacatgcaacagactctaatatttgtctggcaaattcccgaacaaggtcgatcggaaatgcacgataactattctttcggaggaagtcatataagcttggtccgagcctctcaaatacctgacaaagttagtaattcaatattaaattctgaccatccaaaacatgaaaggaagccttcttgatgcacatgtacttactatacatatatgattacgatagtcaaaccaattccgtatttgcacacagctgcaggcatagaaccattcatgcaaatccatcaactcaataaagagtcaagacttagcaatgacgaaagtagtttgcttaccggctaccagtaaaatcatgcttcccaagcctctgaagcacatcaatttcaatcatagcagcctctcgatatttctgaagggagcgcacaattttgatagccactgtctcttggtgttccaagtcccagcactctaagacttgtccaaaagtccctgcaacacaaattaagaaaggtagttgttggtaacatgtacaaagggcaaaactnnnnagcataagcatttatcctgaactattccttataaaatgaaatgttgaaatttagaaaaggaggagcaactgaccttcacccatcttgctaagtattctatctgcaaagccatagacaagaacaaaggttaaacctcagaattatctcaaccaaaagaagcatcgccaacaaaacataagttcagtacagctggtagagatgcagggcagttgacaacacaacggcaatagatatcaagaatgcacgaccattacacaatgtcagaagttatttgggcaacgaacaaaggtatgcaaacattttaccctgatttaattgactgtaaataatgaatggttatttaatgaggcttgaaatgccattcaacccataattaggtggttgaaacacggtgttgcatttaaccagtaactgacaatcattaaacagctacataagtcccaaatatcaaacaaaatgaaagttctgtgtccagtatttcaacaattgtggcaagataaacttactccagaagaaaaacagtttaacagtctaaccaagcaagcgatcagaaatgcaaacaaaaacaataaccctatgcaataaataatactgagttgtggaaaaatacatcttggtgtaaggttctccccaactgcgaaaacatagtgtccatccttgtcatctggcctccagggaggcgaaagattgcgtggtggtcctgtataatagattggtggcggtggcagaaaagcggtcgcaaaatttccattgattagttcctgcccgcaatatagcataggaattgcctacaaaaataattagccacgtaaattactattaaccatatacatcaaaattggtaacaagcatataaattctaaatgaatagaaacaactgcatactgatctcctgtgttttcaaagttcaatgatatttacaccccacttagcaccattaaagttatctatctgttttgtttgatagtcctaaatagagaagtacaccgggtaacccatatgtttgacagcactgaatggacaaatacctcaagtaacggttgtgtcccaccaaaagagaacaatatcgattagcaaaaataatgacagaatatcaaactttattagcaagttccataaatttggcagcacttaggcacatggaggtcgtgagattgccccttttctccatattgttctttcgatcagcaactggctccgatcctatcccacaaattcacaatatcacatcgatgatcctctgcaacagcgcagcatatccccaattcccaaatatgcacacccagatcgaaccgccccgctctaaatctagcgaaaccacgactagatctagccaaaaactaccaccgcaacccacacgcccgagagagaccggatcgacgcagcacatagcgcatggattataccttggggggctggaacagcgggggcgcgacatcccaggcgaggcggggccgcttccgcggccgcttgtcggcgccctggtgcgggtactcggcgagccactgcgcctccattgcagagtcgaaatcgccaattaagccatcggcgaggccaatccggcgggggattttgggcgaggtcgccgcacgatccgcgggaggaatcgggatgcgaggttggggaattcggggaagaagcgacgcgagattggggaaatttggaaagagggggaggaggggaagctcgaggaggaggtggtctggtctggtggtgttcgcgtccgcgcaaccctggtttgttctgtggaaggcgaggttagctaactatggttagttcaattttttagcttttttgcgtacaagtccctcgaattaatgagtaattgtttacagtccagttccctttgctagttaaacacgtcttcgaattatgtgtgaatatttcggctgtgttgggttgttttgaaaaatactcgtgcaaatttccgtcggacccttgccgtgtttagattttttttttccaaaaacatcacatcgaatatttggacacatgtatggaacattaaatgtgaacgaaaaattaattgcacagtttatatgtaaattgcgagacgaaccttttgaacctaattacaccatgatttaacaatgtgatgctacaataaacatttgctaatgacaaattaattagatttaataaattcgtcccgcagtttacaggcggaatctataatttattttattattaatctacgtttaatatgtgttcatatacttaaaaaaaaattagccaatcaactaaacacaccctttttcctaaccgcagttggtgggaaacggtttgaacttccaactgtgccactgttgtccatcccattttgtcactgttgggctatgtagtgttgttatctttcccattttgtcctcacaagaaactcttgttttgttaactaaataaaacccatgatgctgaaattctgatactcctattgttgcttttgttgacttcagaaatagtattgttccctctcagaaaaaaatatttatgattgttccatgctagcatctttttaggtaaaggttatttaattttgaaggaaagctaaatatatcatgcctattagctgtttaccatgctttctatgtggaggttccatgctggcttaagcttttcatgaatatatgannnnnnagtaaccagtcaaaacaattggcaagctgggtttgagatagcggtagataaaaattgtgtgtagagctgtcaaaaaagctcgagactcgcaagctactcgagttcggctcgctttaggcttgattcaagctcggctcgttttattattaaactgagctcaagcctatcacgaagctnnnnnntttcgagccgagctcaaatagctcgacgagcttttgctgctgggcttacgtacaatttgccatcccttatgctaatctgttagggcttgtttagttcccaaaaacttttcgtgaaaacatcacatcaaattttcggacacatatatggagcattaaatatagataaaaagaaaaactaattgcacagtttgtatgtaaattgcgagacgaatcttttgagcctgattagtcaatgattagccataagtactacagtaacccacatgtgctaatgacggcttaattagactcaaaagttttgtctcgcagtttccaggcaagttatgaaattagttttttcattcgtgtccaaaaaccctttccgatatttgatcaaacatctgatgtgacacccaaaaatttttatttcactgactaaagaactaaacaggcccttagttgtctcatccaaattttcctccaagctttcccacaggagaatagctagcggccgctcctctcacatcaaacagcaaaatgctgcatggcacactaaatgccttcatctttctccatcactcatccctcccaacgaaagcttatgtccttcatttttcttccccgtgacttgcgaagctaacaacaggcaagctcgaggctcggtcgagccgaactcaagcctaccatgaaactcgaatgttagaacaggcttgactcgagccggctcgagtctgtgtcaagctcgagcctaagcatatgagcttgctcgagctcggctcgttgacagccctaattatgtgtgggcacatgaaacgaaaaaattattagcacatgattaattggttttaattattttaaattttaaaaatatatttatttaatattttaaagtaacttatatatagaaattttttgcgtgaaatgtattatttagcaacatgaaacgtattgtttagcaactacgcaagtgcacctttaaactttgtcgcacacttcaatatgtggattttatcatgatatagcataaaagagaaccaccgtatagatacatcccagttgtttcagacgaggagaaatcaggacgatgggggacaagttaaaggcaaaagggaagccggtaataaacataaaatgcaagctgagaattagtgttggaacacttatctctcataggctactttggatcgaaagaatttacaaaattttcacacgaacttattaaactcctaaaagttacttaaaaaaatcctccactccgaaaccatgacacatccttgccctaatggccaccacccagccaaaagaactaacaacatcctttcataaaagtttaagataactgacatatgcagccctatctttttgctcatgtttatacttaccagccaaattttgaattttcaattttttttatcaaagttcatttttcagcctttgctttttagatcgttaagaacatgtatataaaagttttcttcacaaattagttttcgtttgcaaatattcagcgaaacaatagggtcgatgctccctccattttatattataagtcgtttcaattttgattaaagtcaatttgctttcagtttaatcaagtttgtagaaaaaaagttataacatattcaacctaaaataattttattatgaaaacatattcaatattggtttaatgaagctaagttggtattgtaagtattactatatttatctataaacttattaaagtagtttaactttaaccaaacttaaaacaaattataatctaaaacagagggagtatcatggaacggtaatcatgttatgctacaaaatactatgtgtcaggggatcatcgccgaacaaaatgcaacaagtagcaacggtgatgcggttggcatctggcaacatctacgacctattttgacctgactaatcacgctccagtcatcaacacattcttccatgatcagcttttcctcctttccccgaaagaaagccccggaccggatcaggccggtgccgactctcccaagtcccaacaaacaaagggctgtgtttagtttcttttaaagttaaaaatttaggttgaaattgatacgatatgactgaaattatgtgtgtatgacagattgatgtgataaaaaaggttagaagtttagatccaaaagatctaaacactaacgtgtgccgaaattgaggaccccagacttccacggtgctgtagggctacagagaattccgacgcgtacagccgttcggaaactgcgacagcgctactgcgcgtagccgtcgacttgggaagctgggagttttgggcccgaacggcggtgggccgtgtgggcgtccgaacaaaacgggccgtcacggcagaaggccggcccactcgagcattgcacgagaggcgattctggatttttttttcactagcaaatatgcccgtgcgttgcaacgggtgaaaaaacgtaatgataatatacgtttttcatgcataaccatgtcgataacaatcagaaaattagaactacgaaattttattttctagcgcgttttcttttgtgcttttttctgacatttttccctcacgtgtttttttaaaccgtttttattttctcgcgcattttttccttttttaatattctgtagaaacttctcttttta

SEQ ID NO: 15256 - DNA, 627 bp, Oryza sativa
cggcaagaaatcaataaggtttttcagtttctgattgagcggcacccattctttgaaactggattaaatttaatgaacattccaggatcgatgtatgatctttaatctttatattgcattttagtaggtggtcaacagatatattgatgaaggaattgcagagcttgtacctggtgttctgttcattgatgaggtatcttcttattttatccgtatgattgaaagtttactgctctcagtgggctaattttggagtcagaaagtacaaatatgaatgatggtgtgtttatatgttgtgaagcatacagtgtcttgtccttgtgaagcagtgccatgctgtataacttatttattactattgttctactatatggtagaaatatgtcttaatgttgtttgatttaattacttattattgttaggaactttaattgcaggtccacatgctagatattgaatgcttctcttatcttaatcgtgctctggagagcccattatcaccaattgtgatacttgcgacaaatagaggaatatgtaatgtaaggtaaacggtttgatttaccgctcgaagcactctgtcacattgcagtaccagagtaatactgcgtctatcagtttgtctattac

SEQ ID NO: 15257 - DNA, 9598 bp, Oryza sativa
atttggtattgagtcgatgctctttttatctcagtgccgaatctgcatgcctggtgtgatttcttcctccttatacattttctccctggtaatggatggccagttaattggtgttggatgtttgcttgttgttcttcctcacttgtcgctgcatatcagagcatggtacaaatcgttcagggtgcccgctcacaccactcaagatgctctgattgggccattgtggtgtatgccagtcgagtctcgtcgctgcgggaggatcccgccagtgcggccagtgtcaggtgcactcaccaccactcgtcgttcgagggcgggacggagagctcgagcatgcctggtcaatggcagccggtcgtcggggctgccaggtggttggtggtgtctgtgcgtgttccggcgagtggtcggtcccacggctatagccaatcatgctccgctgctgttcgggccccacgtagtcgtggtccatgccaattgcagttggccgctgtagtaggctccgccgatgtgccctttgtccggcgcagtgttactgctcggcgttcgaggcgaacacggagagctcgaggatggcctccgtcagagcactgatgtgttacgtcgtatgctgtggttgaccgatggccctgtcatctgtggggtcctattgacagcctctgagtatgttgttttttatgttacatatttttttgttttgtttaccagtataagtagctcattgcctgccaatcttctctttcccttctgctttttcaccatttcctttgcattgccttttggtgcccgttcgctgttcttcttgtcgtctgttctagcccattctccgctgttgtgctttcttcgtttgatcatggaccctggggggtgaacgcgtgtgctggtgggttttctgtatctggcctagctgccttcctttctgtctgtgccgtgtgtttcctttttatcctgtgattaggcttggtgcatctcaggtagccatgtactggcctgtttgttgcacgggatttactgtcacagagtttttaggttttaggcgattttccccgtgttcatgtttcccttttgacagtggatcattgcttatctttgttgttcttctttcagtatatacttctttcagtaaatagatggtggctattacatagatgaagcacacggtcgttagttaatgacaaatatcattgcttttttttcctggttctgattcattattggatcatgtttcgccattcagagtgtgtcccgtggtgttttcttttcgtgcagaaccatgtggttcatttgtatttttgagtctttccttaagtgcatctctgtacgtttacatgttttttttcccttcatatcgatttttttttggcgcaggtgcttattgtcgcggtcaggtccgtgcgatacgttcgttactgttgtgctgctgttccctttaccatcagctcctgttcaggtgagctttgtttctttgctatttctttggggctgacatcctttttgttttgtagtttatttgtgccttgtggtttggtgtatgttctttcttttatctgatatccagcttaaattacattcttattccctgcaggttgcggaccacatcttctgtgcccgtacatgtcggctaaggtataacaattggcctctgttgcttcagctatctatacattattcgagctgcgcttttccttgtgggttatatgttctatatgtgtgcacgacatttctgtttttctgtgcgtttagttcctatatggaagggggttgtgtggttaggcctgctcgtcgacgggatcgccgattgctagagcgtagcagcgcttctcttagatgtatggtttgttgcggtttgtttttttagacgctttagattttatatcttttcctgggtggaaagattaaatcgtctgttgcttgtttagcatcttcctctaattcagctgccagcgaatatgtttgggagactgttgctccaccccgtcagggtatgtgatttactgatctgtgtgcgactgttgttgtggcttgtttatatttatgtagtcgttgctcatatatttttctcgctttggtagacgatggatttttccctatctaccctgcatggtattcttcaaaaagacggcaaatgcgttcaaaaaaattggccatgaaacgattggtggctgcaggtttttccattggatctttggttttctgcatatgttcttgctgacatggcttacatggacgttatgtctccttccctataggcaaaaaaccttgccgtattgctcctgtctcttgcaacaagtttgacagtgattatgccaagtttttgagaggttgctttcatctctgattcgtttccattcccttgtttgcaatgccagcatgctgggtttaaacataaatttctttttttgaatgcttgcacagagacttcaaaggataggtgtgattatggccctcctgagtatcgctgccgtttgtgcgctgctcagttctggtaccaggaacggtgcaagaaagattctgctattaccaagcgccgtgtctgttacaacctttgttgcaaaggtgggaaaatttttgtccctccatttgcgcagccaccagaacctttgaattcacttcttaaatttgatggagatgctcgaagtaaacattttttgcagcatatacgtcagtacaattcgctgtttactttcacttcgatgggtgcagatattgacgatagtttaaaccagggtggtggtccttatgtctttaaaataaatggccaggtctatcaccgtataggttcgctcttgcctaatgaagataatccaccaaaatttgctcagctgtatatttatgatactcaaaatgaggtccaaaacagaatgcttgctgttcttggtgaagagaatggtagctgtgatctagatcctgagatagctgctgaattgctagacatgctagacaattgtaatcctttggttaagcagtttaggctcgcgagagatcggctggctgaacacggtgatgaacaattagcaattaagattgtaggaggaagggcctgttcagtatgaattaccaacagccgatgaactagctgggttaattgtaggtgatttttcattggaaaatgcaaaacgtgatataattgtgcagagcattcctggtccactccatcatgtatctagcttgcatcctgcttacatggccttacaatacccactgttattcccatatggtgaacgtggttttcagcttggtataaatttgaggggggttgatttaaatcgcactgatatacgtactaaggcttccatgcaagaacattattgttactgttgccactatcgtcgagaccagttcaacccatatttatgttgcggtcgtttgtcctcccaaagtcaagttgatggttttgcgtgtgttgacgagggtagattgacatttatagatgaacaccagggcgattttagatgcgaacacgttcaaggcattgcagatgcagtcgccaaaggttgtttagacggtaatagtgttggtaagcgacgaattctccctgcaagcttcactggcgggagaagatatatgtaccaaaattatcaggatgcggttgctatttgtcgtgtgtatggcgcccctgatgtgtttaccacttttacttgtaatccgaaatggcctgagattgaagaagcattgcgctttgagccagggcagcgttcgacagatcgttctgacattgtttgtagagtttttaaaatgaaacttgatgagatggtttctgatattatggctggtgttccatttggtcgtgtgcgtgctggttagtgctcttttttttgcccttaacttagctgtgctctttatggtctattgttttattgatttttatttggttgttttgcctatgatatgtttgtagtactttatagcgtggaatttcagaagaggggccttccccacgtgcatatactggtggcgtgatgcaccaagcacagacgccacaccatctgttgtggatacatacatcagcgctgaacttcctgatcctaatgaaaatgagcttgattacttacttgttgaagaatttatgatgcatggtccttgtggtgatgccaatagaaagtgtgcttgcatgaaaaatggggtttgttctaaaaaatatccaaaagattttgcttccgagacaactgtagatgataagggtttcattgtttatagacggcgtgacaatggtagatttgcatataaaaacaatgtgaaacttgataatcgttcagttgttccgtacaatatagcgctgctgcgtaagtttgaggctcatataaatgttgagtggtgcaacaaatctaaaatgatcaaatatctttttaaatatgtcacaaaagggtctgatcatgccaacataaagtttaccaaagtgagaaaaaggaagttagggcgtgttgcagttgacgatagtggtacaccaagctctagcaaaaagatgcgtggtgctgatttcactgttaagccgccaagggatgagatggctgagtttattgcgtgtcgatatttatgtgataagcaatctatgtggagattatatgcatatgatattcattttagaaacccttctgttgaacgtttagcatgccattaccgaacatgaacgtggtctcttttagatcagacacaaatttagcatctatggtttcaaatacatttttacaaaaaacaacattgactgagtggtttgtcgctaatgatctattcccgcaaggccgtcacctaacatattgcgaatatcctacgatgtttacttgggaagatgatttaaaaagttggaaaaaaaggcagcacgactataagattggtaggatgtattacatccatccttctgcaggcgaaggatattttatgaggatgttgctcatgtacgtaaaaggcgctagaagttatgaggatattagaacatatgacggcgttgtttatgatacgtttaaggaggcttgtgctgctagagggttgcttggtgatgatagagaatggtcgtatgcatttgatgaggctgatagttgggcatccggcggccagcttagatcgctttttgtgttgatgattgttcattgtggtattgctgatgagagtgcgttttttgagaagcattggcatgcgatggttgatgatattctgtttaatctgcatgcaagccttaaataactcttcgtactctgttcctgatactcaacttaaaaatatggttctacaagaattgcctacattgtatgtcgcaacggtgtttctatgtcttcttttaatttgccaagcatcaattgtgatagctcctttcaatcagcaatagattgattgacgatgaaatgtcttatgatatagatgatttatatgtgaatgctccattgctatatgaccagcttaatgttgatcaacgaaatgcatatgatcgtattgtgcaaagcgtcatgacggaatcacctgctttttactttgtttctggctatggcggcactgggaaaacgtttctgtggaattgtattgttacctaccttagatctcaaaaaaaattgttcttgctgttgcatcatcgggagttgcttcattacttttgctcggcggtagaactgctcattcccggtttaaaattccaatagaggttgatgaatcaactatttgccatataaagcgaggtacaatgctagctgatcttattaagtccacttcacttattatatgggatgaagctctgatgactcaccgtcgatgttttgaggccttagataggacattgcgtgatatctttgctgaggatgatccttctgctgcatcattaccctttggtggtatggttgttgtgcttggtggggactttcgtcagattttacctgttgtggaagggggtgttagatcaaaaacaattgatgctgcaatatcaaggtcccctctctggtcacatgtgtctattttagagctatcgatcaatatgcgtttgcgttctagctctctaagccctgaggtacaacatgaaatcgctgactttagtgattggattctttctatcggcgatggtacaacagctgcaagtgctcgtgatactgacactgaaccaacttgggttgatatcccacacgatctcttagtcatggataatgatgataaaattggagctattatatccgcagtctatactgattttgctgaacattatagtgatcctatatatctacaagatcgtgctattgtttcacctacaaatgatatatgtggcactattaattctcgtgtactagagcttgtccctgacgagatgaaagaatacctaagctttgattcccttgcaaaaacaaatgagaaatgtgatgatttagatgttttgtatccaatcgaatttttgaactcaattaaagttaacaattatcctgatcatcaattgtgcttaaaaaaaggtgtgcccataatgcttttgagaaatctagatcagagtgctggcctttgcaatggaacgagaatgattgttacaaatctaggtgaccgagtaatagaggcgcgtatcataactggttccaatattggtcagactatttatatcccaagaataactctatctgcaaacaataagaaatggccttttacattacagcgccgtcagtttcctgttcgtgtgtgctatgctatgactataaataaaagtcaaggacagagtctacgttcagttggcatttacttgaaaagcccagtattttcccatggtcagctatacgttgctctttctcgtgtcacttcccgtgcaggcttgaaagtacttatcgaagatgacaacgggaattgcacctctcgtactcgaaacatcgtttatcgcgaaatattcgctgctcttagatagttggtggttgctgtcgttttgtttattttattcctgcggtgtacatatatacttgttttgtttatatctaaaagtttgctatgctgttctatggatcctgtatattacctggttatgctgcgcttttgtttgctgtcctactatactctttgccataggtgatgcaccacatatttatctgcttattttatgctttttttgcccttttgcatgaccttgttttttgctttcctatagatggctttcgatttgctgtgtgacatatccccagcaagcagaggctggaagatccgtgcaaagatagcaagaatgtgggactacactggtacagctgacgatctgcctcctatacatgttgatctggtgcttattgatgagaaggtatatctcattagtccgaatgcagggcacctttatattccctgtccaatttgatttgcttacgatttaaatgcttatgtagggaaatgcaatgtatgctgaaattccaggcgttgaggctgataagttcagaccacttcttcaggaatcgaaagtctacacttttagcaagttccttattttgcctagcaaacctgcatacaagcccttccctaacaagtatatgatcaagcttactccatggacaaacgtggaacaggtcaatgaagttcctgctgatttcccatcccatgtgtttaatttggttcaattctcatatctaagcctgcgcgttgggatgcaagagtacttcactggtttgttctttcctttaccattactttccattatttatgctatttatagcatttatcaatttaccaaccactgttcttaattctttttagatgtgatcggtatgatcattggggtatcaaagctagcctatgtccgaatggcgtctaaaacgtcagacacacctaagagggtcattgctctaagggatcttgcgtacgtagcctccgtgatttacttgttgttctagtctttaccagcttgttgtttatgaccctgacctccaatgcatggccaattattttgataaccgttcattcttccgaataggaactgtgaggttaaacttgtcctatggggagagcatgctcccgactttgatgctgatgctgttcatagtgttggccaagataatgctgtcgttggtatctttgttgatactcttatgaaagcatataatagtaagcttttctccttctctgcatgtttagttctctctttattttctgatgccggtgttgtatcttcaatgtacacttgttttttttttgttgtctccacaatcatttctcctatgtattatgtagatgaagaaactcttagtggaggatcagcctgcaaatggtatttaaatgaggacataccagagataaaccagttctttgataggttagtaaaagcccctcacaacagagttaataattttttagagttctaccccctttctctaacatgtcgttttccatgccttgattagcctgggtgatagtgctccaaagatccagtggatatcaaccggagcagagtcctttggttcgtcacaacgcccagcacggttggagcataaatctgttgctgaccttaaaaagattgatccatgggaagctgcggtaatcactgtaaaaagcatattatatgctttcgcatatgtatttttcatttagttcatctacaaggttattgctaaacacttcctatgcagggtgctggcttctcatgtactgtgaccatagctaagttgagcccatctcagtcatggtggttttcatcctgttcccgttgtcatagagccgcaactgcatatggatctagctataaatgctccagcggttgctcatcagttactgccattccaaagtaatgttctacagcatacatgttcagctccttttttatatgtctgcttggcctctatgacagaaatttcatttttatatgttaggtaccgtctttgcctgataggaaccgatggaactaattcagcagagtttgtgctatttggacgtgttgcgcagcaagttgttggccgtcctgttatgaatcttatcaaatttcagggcagatcagacaatattcctaaagaaattgctgctgttgtttcacagaaatttacctttgctgtctctgtcactgagcggagccttatgcacaggaatatatcttttcaagttaatggaatcgagactttctttggaagacagggttctattccgcagcctagggaatagggtccatctgcaggcccttctactcctttggctcttgctgcttctggtatggataaggatgacgcctctcaatctcatgagtcaaccccggtcgattcatctacttcgactgctgatccagtcgatgaacttcctggtgacagcaagaagcggaaatccattgtccgtcatgtacgcccttccattcatatcccatacattaccttttgctttttttatggcccttctttttatatgtctgattgctattccagcctctagcagcacagaaaaaattgacctttgaaacagctccatccagcaaagaaaacaccagcccggttgaccctcctactaggtacaagtgtttttccacacttcttgttcttcttatatgttgaaactttctctatgttacatctgctttctaatttttatggccaacagtaaatgtggtttgcctctgctacatagcagagcacggtcagtccctccacttcaatcagatataagcatccaacccattctatttagtgagaaa

SEQ ID NO: 15258 - DNA, 5245 bp, Oryza sativa
cgcctaacacgggggacagccctgtcattccctcattaatgggtgaagacttgtggtggccgccctccgaatgaccctccgatgggacgggtcatacctacctccactccgccggtagcagatgcgacgtgggagcacggttgtcagtccagtcagacatgaccggcgtcaggccggtcacagaccggtcattcttaaccatcacgcgccagacggacacgccgcacgtctaccccactgcattaaatgcgacagggggcagttggggggctgcgcgcattaaagggggttcagcctgggccccctcctcgcttgctccccccgccaaatggcggctaggcgagggcctctgggcaaagcggcgcaagggcctgaggggcatgacgtggcaccccgaggcccctcgccatcccggccgctcctgcgattcgcagaatgcggggataggactaggctgtagggacacgtggcaggatgggaaggtagattcccctcacctcacatacccccaggcccatatctccgacaaaaattgttaaatatgttatccgaatttcagcatacaatatatttgggttagttacgtaataagactttgtattacaggattagtttcctaataggactttgagcgtttgcatattaggactcctagattttcctttatgtatctcttttatgctgcatggaaacggtgcggcaacccaatgaatctgttactttcgtatctaactcctttatactgatatttgccggtcgacgcacatggtttttttcccatcaggattttcacataaaatttgtatttctattatccatctattttcataataagaaagacttaactgtctaattggttattataaatgcactcatacgtataggttgtgcatgcatgcaaaaatcatagcagggctcctattttcatagagcaaataatggtcagctccttttcgtcaaccttgagcttcctttctagagtagaatatcctacggaattaagtaatatgtaagattaaaattcctttaacccgtcgtaacgcacggatactttttctactaatttgaagatgaaacaaagggggcctatgtaccactatgaggattcgatatgatacaactttttagtagtgtcatttgttcgtattgctatcaggcttactgatacaaatttttattagcatcatttattcatatctctatcgaaaagttgtgctgactatgaaacaaagggggcctatgtaccactatgaggattcgatatgatacaactttttagtagtgtcatttgttcgtattgctatcaggcttactgatacaaatttttattagcatcatttattcatatctctatcgaaaagttgtgctgactatgaaacaaagggggcctatgtaccactatgaggattcgatatgatacaactttttcgtagtgtcatttgttcgtattgctatcaggcttactgatacaaatttttattagcatcatttattcatatctctatcgaaaagttgtgctgaccacgtctcatgtctctcattaattatgaactaccaacaatttcgttttcaagtgagatgactgctcggttacatgcgctgaatgcactgaacaagtagacttgttaggtagctttcagttcagcgtctcggattagctaagctagaattttaacatgtgagggggccgacttgttgagtaataataatacttaattgttgtagtaactaggaaggtagcccgcgcagttgcgcgggcatattatttaaactatcataatttttgttgttattagaaagaatttagggtttcctttgtaacacaggatttttagaaaagaatagaaaatggtatataaatgattttgagaaaagaaaagaaaatggtatataaatatgatagaaatgaatgtttaaaatatagtatggaatagaatggatgtttggatagagtgtaaaaaatttaaaatgtattaacccagttagatcaaattatcatctggacaaataataatcaaacaacctttgcattagtagcttgacgattgtctcgatggtaattttttaaaattctgttatatgcaagatatatatcttgcatgtacgtacagatatcgtggagagacgagtgattatgtacgggagggaggtggaatggatttgtatttttaaggattggtctatcggatgtaaataattgttttaccgattaaagttacaatggtcatattttttttcttatattttatatatgttttttattttgaaaagatataatgtaatggtccaaaataacaggtctaagattttaaatcatgtgatagcgtaggattttttagaagcatgtgtaaaatagaggatagagaaaagtggttatctgaattattaacacatagattattaacaaaacaaattacataatccgcatataagctgtgagacaaatttattaagcgtaaataatcggtcattagcaaatgtttactgtagcacggcattgtcagatcatggcgcaattagttttaaaagtttcgtctcgcaagtacaggaaaaacagatgattgttaaattttgttatctatgtagatgaaataattatgcatttgtgaaaaaaaaactgcacttaaccaaacaaattttgcatcactttgctttgactaaaatactaattagtagtaggcaactaatactctgtaactctgtctaagctaattttttttgctcttcttttctattccgctatacgagtatacgtatggatagcaaggagagagtgacagaagaggggaaaatggaaaggatgaggtctgaggggaagggcggacgaggagggcggatggcggatggcggatggcggatggcgcgggccggaggtgcgagcggagagctttgggcaggggggacggcggcgcaggcggcagggatggcgtgggttggcggcgtaggcggcggggacggcgtcagacggcggggatggcgtgggttgctggcgtagatggcggggacggcggcaggcggcggggatggcgtgggttgcgggcagagagcggtagcggagagctgcaggcgctgtggacggggggacggcgacgcgggtggcggggacggaggtctcgatctgacgtgcgctcccgcaaggttgtggagtgcgaggccgagctggttgcgccgccgagctactgcatcgccaaccgcttcactcgcgattgggctgtacaacgggcgctgtcctcaggtattgcatcgtgcatccctgcatcgtcaatgtgtactgcactaatgtcctgttgctctgttcccatgtctttgctctgtatcgatttgtctctgctttacgttcaagttatccctcttgtactgcatatttgagattttttggcccatcatgaagggtgtctgtatggctctgtataattgagctttcgtagttaactaattgtagtaaaaaaagcttgtaacttcaaagtaaaaaatgctttcaatttgataattttatatataattaccataccagaccttcacaaaacttcatatggtaggaggcggggatggcgtggtccgcgggcggagagcagcgggtggcggggacggcgtgggtctcctgtagtttcccgtctccctccctccagtggctgttgcaggcttgcagcgccatgtccatatccacctcccatgttccgtcctcacctcaacatcctccttgaattatctcctagctcagtgggtgggttggcggctgcggtgtgtcgacctctctatcttccttcgtctgtattggttatgtcctctctattttccttgattagtggatttggcatcagctgctggggtgttcgccaggggacaattggcagcgatggagttgttgttcacagctctatggaaagacggtatgtgcataatacgaaagattgcggaattatgatgtgattaaatggctcattggctgtgtacatgtattttggatgtttaagcctgtttaatccattgtctaaaaaaataaatggttcatggatgtttactttctggggaaaaatgttataatagaaggaaaatgtaattatcctataactttatatctctccatttctttttgtttgacgccggttagttcaaaattgcactaatcaacgtcattcatttgaaaacagaggtagtaattattgaatatagtacaaagatgaaatatattgtttgtgaaaggaagatataatgtttgaaatatcatcctatttcagctggtaaaaatactcactgtaaatggtaattttgaattgcagcctttcgctagagtatgttgtagcacaatcaatgttgtactggagagaagcaggaatagagcagctgcaatgaatatttacaatgataaggtacccatgagtagtttgcaacatagtttgtatgatcaatatagatgaatgagaatgatataataccttctagaaaatctctttgtacactatgttcctgaccatatgttcacctggctttcattgtcatctagcattatccgtagcccatctcgtcttgtaactctggagaacgttacgtagagctgcccatgcgtgaatacttgcttaggcagatatagtcctaccatgtttagagactgtccttggcttttattgatggtcatagcgaagcacacactgagtggatattgtcttctttttagcaagaagggccatcctgactctgttggcgtcattattattctagggatatataccttttctcctacatgtgttcctgttatgatctgtgcttcaatgaatcttttcccgagctgagtaatggtcattcgtgtaccattacataaccctgtactttggttaatgtttcgcagtagcatcactggaaggcctagtttcagtttcagcacatggtttggcattccagggaagtttagactatttagaaattctgttggatataggacatcggtttcactgtcattagttgttgctttgcatacagtgtcgcagctcagatatgttatctcctctccttctatcatgttcattataaattcattaatttccctcgctgtctcatttcttgggcatagaattgctcgctgttctaagaaatctcgtttcttataattctgtaccaagtttggatatatgctcttcacaatttcttcctttggatcacctcctttcttcagtatcaggtcatcaggtatttctatccattcctctccatccgctgatgttgttttgccatcaccaatgttcaaaat

SEQ ID NO: 15259 - DNA, 879 bp, Oryza sativa
tgcaggatccagatccagatatgcataaaagggattcatggctttaagcttatctcttacgctccaggaatggatcagtcagaacatcaccaccggctcgcctcgaccgccgccaccgaccttccgctgccgactggtgtttccgcctgcacggctggcctattatgccgccgttgttgggcgtctacgtcgtcaccgaccggcttgccttcgccgctgccgactggtgtttccgcctgcacggctggcctttatgccgccgttgttgggcgtctacgtcgtcaccgaccggcttgccttcgccgctgccgactggtgtttccgcctgcacggctggcctttatgccgccgttgttgggcgtctacgtcttcaccgaccggcttgccttcgccgctgtcgactggtgtttccgcctgcacggctggcctttatgccgccgttgttgggcgtctacgtcgtcaccgaccggccgcctcgtccgccgccgactggtgcttccgcctacacggctggcctattatgctgccgttgttgggcgtctacgtcttcaccgaccggcttgccttcgtccgccgccgactggtgcttccgcctgcacggctggcctttatgccgccgttgttgggcgtctacgtcgtcaccgaccggcttgccttcgccgctgccgactggtgtttccgcctgcacggctggcctttatgccgccgttgttgggcgtctacgtcttcaccgaccggcttgccttcgccgctgccgactggtgtttccgcctgcacggctggcctttatgccgccggtattgggcgtctacgttttcaccgaccggtttttttcgccgctgcctactggggtttccgccctgcacggcttgcctttat

SEQ ID NO: 15260 - DNA, 625 bp, Oryza sativa
gcccaacagcggcggcataaaggccagccgtgcaggcggaaacaccagtcggcggcggcgaaggcaagccggtcggtgaagacgtagacgcccaacagcggcggcataaaggccagccgtgcaggcggaaacaccagtcggcggcggacgaggcggccggtcggtgaagatgtagacgcccaacaacggcggcataaaggccagccgtgcaggcggaaacaccagtcggcggcggtcgaggcggccggtcggtgaagacgtagacgcccaacagcggcggcataaaggccagccgtgcaggcggaaacaccagtcggcggcataaaggccagccgtgcaggcggaaacaccagtcggcggcggcgaaggcaagccggtcggtgaagacgtagacgcccaacaacggcggcataataggccagccgtgcaggcggaaacaccagtcggcggcggcgaaggcaagccggttggtgaagacgtagacgcccaacagcggcggcataaaggccagccgtgcaggcggaaacaccagtcggcggcggacgaggcggccggtcggtgaagacgtatacgcccaacagcggcggcacaataggccaaccgtgcaggcggaaacaccagtcgg

SEQ ID NO: 15261 - DNA, 965 bp, Oryza sativa
cggcatacgatgccatgttattttactacaacaagaggctctccaatattcaggatttctacttggacatcttcaacacatatcttcaatcaagcaatgactactcgacgacaagaagctataattctcgactctatgttcagttgttccccaactaaccaaagagtcgggggctacacaaatataaggctcaaaatttgacaaattttatgtcaggctgaagaaatcaattcatcaaccaacgagtcaactccaggagtcattatcttcatctttgattcggagcagacattctacttcaacaactttaaatatttcggtttagacgagttgggcaacaacatcaactctcctccaagtgaagcatctacaacagttataacactaatttgatggattattgtcactgacatcatcaccagcacctctgcttcatcggccctgacatctccgctgttgctaatggatgattatgttttcgccgacttattatttcaccttgacggttgacctactatgcaaatgctgatgagcgtctttgtcattatcattggttgctacactgctattggctggatcaccgacatcgtcttcttcatcatgtcggttgcgtttgtcgtcgtcaactattttcttcatcttcatgattggtggattttgtcatcacctttgatctacctcgtctgtcaccgactgattattttgctgccatggctacacaattttatcgctgggctccttcatcttcattgttagttgatctgtctgccgccgactggtttcttcgcctccatggctatgcgacttcattacttttgattggtatcactatcttcactaccaccagtattgttgccacctctggtgggcgatattatctctatattggtcgtcttgtctatatgccaactgcgtcagctaccatcaatggacgattgtgactacgacagaaggacaagctatat

SEQ ID NO: 15262 - DNA, 1207 bp, Oryza sativa
gatgaatgcgggaaggaaatcggacgaatcggagggagagagagaggggaaaacgggggaaacgggagaggaaatcacgggggtgatttccccctctttattgcgcgcggggacggcgggaaacggcgagattcgcggcggcggcggcgctagggcacgggcgggcggcgggcgcggcgggaggtaggcgatgacaggtgggccccacccgtcagcgagggcggcgggcgggcccgcctgtcagcggcgcgcgcgcgggggaggccgatgggccgcgggggaggagagagagagagggagggagaagtgggccgagccggcccaagagggaaggggggggaaaaagaacttttaggatttttcttttttttataaaccttttccactttgtttatttcttttcaattattatttgtgctctgaaaattccactaaaatttgagggctccttttagaccaaggagaatttaacaaaaattctccgggccacatttgaatttttcttgtacgtattttagggtttgccaatttcttttcgaattttaattaattctattattccttttagaagatgatttttatttcgggatgaatttatcaggacgtgacacctagtaatgtggaatccgtaaccaattggaaacaaccaaagacagtttcagagatccgcagtttcctaggcctcgcaggatattatcggaggtttatagagaatttttccaagattgctaagcccatgacacggctgcttcaaaaagatgtaaagtacaagtggtcagaagaatgtgagcagagttttcaagagttgaagaatcgcttgatatcagctcctattttgattttgcctgatccaaagaagggtttccaagtgtattgcgatgcatccaaacttgggttaggttgtgttctgatgcaagatgggaaggtggtaaattaagtaaaccaaactttgcaagataagttgaaacagttggaaacgaattttgtacttttgaataacaggtttcaaaagaaataaaaagaaaagttataaaatcaacttgctaaattcattttattgctgtaagattaaataaaacaataaaaacttctgctggtaaatgagccatcagtacagtaatagatgtacagtactaataacactggaataaattttaaatgagaaccattaaaagagattataaagtgcatgtgccattagtttggt

SEQ ID NO: 15263 - DNA, 982 bp, Oryza sativa
ccagatgatttacctggtatgccgcctaaaagggatatagagttcagaatagatttggtaccaggaacaactccgatccacaagagaccatatagaatggcagcaaaggagttggcagaagtcaagaggcaggtcgacgatttgcttcagaaaggatacatcagaccgagttcgtcaccatggggagctccagttatttttgtggaaaagaaagaccatacccaaaggatgtgtgtggattatcgtgctctaaacgatgtgactatcaagaataagtatccgctgcccagaattgatgatttgtttgatcagcttaaaggagccactgttttctccaagatagatcttcgatcaggatatcaccagttgagaatcaaagaggaagatatacctaagacagcttttaccactaggtatggattgttcgaatgtactgttatgtcttttggacttaccaatgcccctgctttcttcatgaacttgatgaataaagtgtttatggaataccttgataagtttgtggtggtctttatagatgacattcttatctactctcgaaccaaagaagagcatgaagaacatcttcgccttgcattagagaagctacgagaacatcagctgtatgctaagtttagcaagtgtgaattttggttgtctgaagtgaagttccttggtcacgtcatctcagcaagaggagttgccgtcgatcctagcaatgtggaatccgtaaccaactggaaacaaccaaagacagtttcagagattcacagtttcttaggtctcgcaggatattatcggaggtttatagaaaatttttccaagattgctaagcccatgacacgactgcttcagaaagatgtgaagtacaagtggtcagaagagtgtgagcaaagtttccaagggttgaagaatcgcttagtatcagctcctattttgattttgcctgatccaaagaagggtttccaagtgtattgcgatgcat

SEQ ID NO: 15264 - DNA, 667 bp, Oryza sativa
acatcttcatccgaccggccgccttcgccgccgccgactggtgtttccgcctgcacggctggcctattatgccgccgttgttgggcgtctacgtcttcaccgaccggcttgccttcgccgccgcctactggtgtttccgcctgcacggctggcctttatgccgccgttgttgggcgtctacgtcttcaccgaccggcttgccttcgccgccgcctactggtgtttccgcctgcacggctggcctttatgccgccgttgttgggcgtctacgtcttcaccgaccggccgcctcgtccgccgccgactggtgcttccgcctgcacggctgacttattatgccgccgttgttgggcgtctacatcttcaccgaccggccgcctcgaccgccgccgactggtgtttccgcctgcacggctggcctattatgctgccgttgttgggcgtctacgtcttcaccgaccggccgcctcgtcagccgccgactggtgtttccgcctgcacggctggcctattatgccgccgttgttgggcgtctacgtcttcaccgaccggccgccgcatccgccgctgactggggtcaccgcctgcacggctggcctgttataacgccaactgatgctatcttcttcacgactggctacatcgctgtcactactaataggcatca

SEQ ID NO: 15265 - DNA, 1659 bp, Oryza sativa
cgagggttcacacacatgtaagcgtttggaattttggatagaaattccgggcgtgacaagttggtatcagagccactttgaccctaggttatgccaaatggttacccatagaagccctctgaaaaatattggaaaagtagaactgttctcctctctttctcttttaattaaaccaaactaatggcacatgtacttcataatctcttttaatggttctcattcaaaatttattccagtgttattagtactgtacatctattactgtactaatggctcatttaccagcaaaagttttacaatactgttttatttaatcttgctgcaataaaataaatttagcatgttgattttataattttcctttcatttcttttgaaaccagttattcaaaattacaaaatttgtgacctcgtttccaaatgttttaatttatttcgcaaagcttggtttaccttatttatttccttttttttactttgattttctaactttattcaaaattaatccaaaaaacttgtgctattaattggataaaggtcttaactccctcctttcacttgtctttagatgccgtgttacaagcctgagtacctgtttggtgttgagggttttgtccaggagttgcgtacgatgtcctttgtcattggatttgggaatgcccctttttatgcccagattcgtcatgatcgtcatgaagaaaagtgccgagtcaaagtcactttgaacagtaatagtgaagatatcccctcagtgatgtttgaagctggaggaagaaactacatccatgcatgtcaggaagtggcaaggatcgccataggagagctccgtgatagctacagtgatcaattggccgacactgagtatcgctaccatcctcgccaacctcagggaagtgaccgtggcagttaccttgagactgaaggaattgagaatgatgttaccacgaagcatttggttgagatgttgtgggctatggatgaaagtcgtgcggagactgtgttagcagcttaagatcgtgaagatcggaatcgtggtaagatttgcaagctagaagacaaggtggatcatttggagaaggaattagccgcattgaagggagaagcaccgccgcagaaggccaggattcgtcttaccgcaaggaagagagctttatttgtccctcgctatcaactggcgccaaaggttcgtgtggtggagaaagaagttgccccagctcaagcggatcctccggtcatcatcataagtgatgaagaagaagaatctaagcgcaacaattccaagtttgagtgggtagctatcaaagatgaggaagatgagccgaacgagccttcaatcgacctccgatgcttggaagaactagagtgacttgttaagccgttgtcttagatcgatgtgttagtttgcttgttttaagtttgcttgtgtgtgtggctcgcatgtgatttacatcagtggtgggatgtaagtgcgtgcgtttgtttgcttttgagtgttaggaagttggtgagtttagtggtgtgagagtcttcagtttgtaataatgaaactcagttaagatcaataaaagttaaagtaattctctgtcctaagtagtttcccccgttttctcttcttatcctgtccatgccagatggtgaacactcgcagcagcgggaatgg

SEQ ID NO: 15266 - DNA, 652 bp, Oryza sativa
acaactccgatccgtaagagaccttatcgaatggcagccaatgagttggcagaagttaagaggcaagtagatgatttgcttcagaaaggatacatcagaccgagttcatcaccatggggagctccggttatttttgtggaaaagaaagatcatacccagagaatgtgtgtggactatcgtgcactaaacgatgtgactatcaagaataagtatccattacccaggattgatgatttgtttgatcagcttaaaggtgccactgttttctccaagatagatcttcgatcagggtatcatcagttgagaatcaaagaggaagatatacctaagacagcttttaccactaggtatgggttgttcgaatgtactgttatgtcttttggacttaccaatgcccctgctttcttcatgaacttgatgaataaggtgtttatggaatacttagacaagttcgtggtggtctttatagatgatattcttatctactctcgaaccaaagaagagcatgaggaacatcttcgccttgcattggagaagctacgagaacatcaactgtatgctaagtttagcaagtgtgaattttggttgtccgaagtgaaattccttggtcacgtcatctcagccggaggagttgccgtcgatcctagtaacg

SEQ ID NO: 15267 - DNA, 630 bp, Oryza sativa
ctcctccgaaccctaaactttccatctcgtcgccggccgccgtgggccttcgccaccgcctcctagcccctttaaaggacccccgatgtctcctctacccgccgcctccctcgccttcgcctctcgtcgtccgtagcgccctagcgccgtgagacctagcgccgccgtcgccgccacagctccagtcatgcgccgccgctgtttcagccgtcgccatcgctcgggaacgccgccgtcgtggtcgccatcgcgtcgccgtcctcgtccgccccttcgccgttgccgaagaccgccggagcaccgtctccgccgtcgacgccgtcgccgtccgttcatcttccgccgcttctttagtcatcggtgagttcgccgcgtcgcgctctacgtcctggtgccctccgttcgcgtcctcgcgccgtcgttcaccggcgagcatgcgagcccgagccgccgagccgtcgccggaggtgacgtcgccgctgacgtcatcgtcgtcgtctctcgtggtccggccgtagacccgatcaatctcggccgtccgttttggatggatcgatctcggccgtccgttcccgtgaaccgtcgccgtgcgcccggtccaccgtaaccctagccgctgacgcaataaat

SEQ ID NO: 15268 - DNA, 2405 bp, Oryza sativa
  unsure (1)..(2405): unsure at all n locations
gaggaacagaatggacaaattgatatgattcctgatacaatacgtcagatatgtggaagaatattgatattcagattgaagttgactaaaaggaatttagaagagtgtaaggaagactacaaagtgaactacacttttacacctaatgaaaagcttgagatgaattatgtaaatgacaaggcagaagaggtatgactatttgcattattcttttttatacatgttatagatcttatattacaatataaatattaatttgcagtcaatgttgaagtacaacgatgattatggcttcactgatttgaaaaaaatatttttgtaatgcatatgatatatatataattatttattggatgttctgtagtttgggcagcacaattttcaggtaaaagaagagccaaaaaatgaaagtagtgatgattatgaaatgaacaatcatcgcaaaacaaagaaagagagatcaaacatgagatctacaaaaagatcaaacaaggtatgtataattgctttcttacataacaattcgtaaagttgtttatagtactacactaataatgatgttttataggaaccatacattaccgattctgatgggaaaacaaatgaaaaggcaatcacaatcgatgatgattccgaagaatcacttgatgattattttgatgaagaatacaatgaaaaggttacacaggagagtacaaagacgaatccttctaaaagaagagttacaagacgttttaaaacatctaacaaggtacttcatttattttactttccaaattcactcaatttaattttcacataaattatttaccatttcaatatggcactatgatatacgctaagaaaggaaaatgtctgaaatgaaaactcaaagaaataaggtacaattcttacttttctttcatatacaaaacgatctgtcaaactattactgacatgttatatacaattgatgggtattaataggaaccatatattactgattgtgagaagatagcaaatgacaaaccaatttcgcttgatgatgattttgatgaagaatataataaaaatatggtcatggcggacaccagtacttctaaaagaaaagtcagacactacataggacaaactaacattgtacttcattgagttttacnttctatttaatgttacctttcatgtttgtccattaatgtcaatatgctattgtgcaggtaaggggaaaaggttgtggaaagaagagtacaaatatgggaacttgcacaaaaagtgcaattgaaaatacaattcaagatgatgaagtatttgatatatttgttaaataaatcatgtattttaacataaaacttttttaattaactaactaagaacacaaaatttaggtgcatgacggaaaaattgcttcaggaactgctaaaagaccatcaaggaaatttataatttcagatagtgaggtactgcatgagacaatttatcaagttattaattaatatatattttttttgtaacaactaatttttttttccataggatgagcacagcagtaatacaaaggtgactggggacagcaccagctgtaatagtagtaaggaagatataaacaaaggtcgatgcaattataatattgagaacattaaagttcacatgaatgagcagtccagtcgatgcagatcaacaaggattagaagaccacccacccgatactcatattagctacaacatattacttctgggaaaatgttggttgctttagatttggtttgattagtaaattataataatatggtctttcgtctgcaggtaatttatagtcaagaaggcccaaaagaaccaattaaaaggagggttcagccaatactttttattgaagaatagtattatatatgttcctattaatttttatgttcattagatattgtcagatgtaacgtacaacttgcacttgccaaaggaatccttggattactttgtttatttctaagatagagagttaataacattcaatataaatgcatgcatgtaccttcagtacatgtatatgagtcgatccctgcttgcttcctctaccgttgatatcctaaaagcatataaaacaagatcagttgatttaataattcttaattaatacaaatccccaagcaagaaacttaatgattaaaaaaacttgattatgtaaaatggaaatcaatcaagaacgatgagctctcggggctaccttcgctctcagccatgcttgatgttgctgcacctgctatccgcactgccccaacacctgccatccccactgccccatttcctacaaataccacctcccataccagagccaactaaccgatggctaacactgctcctgatctagacatcctgcggtggatctaccaaggcactgacttggatgccctatggtggatctagccaaccag

SEQ ID NO: 15269 - DNA, 1145 bp, Oryza sativa
gtatgtatttaatcacaattaatttccgaataggtacaatacatcagaatcagtcaaaaaaaagttgttatatccctgttttgacatccaattttcacagctcaaacttcactgctgaagtaaactcaacggaactcgcacgcttatcaagactgaacaggaaaaggaaacttgaccttagaagaagcggatctacattgaataacagttcgacctgttcaaatccagcaaatcacattgaaaggtaaacatacagaaaatcaacaccattgttagaaaggaaatttttccttattcaacaataaacactgactgtgatatgaataaaatcaggtctagaaaagaaaaatatcagatcccatcaaccaacatggaaacgaataggtatgttaaccacattataaaaatgatatcgtcattcagtttatttttaaatcacttttttcttttatgaaaaaaatatttgtcttccagtctcaagatgaatgatcgagtaagtaaggaaggaaacattacaaggaataaggttgctgtaccaccaaggaagaagaaaaaatcaagcgtgaaagaatggaattttggcaagcctacatgcacatgtcaacactgtggtgcacttttctggtatgaagaaagaactcgtggcaaaggaaaagggccaccttcttttagcttatgctgcaaacagggcaaggttgacttacctacactaaagaaaccacctacttacctttcaaatctgatgtgcaaagaaaaaggaaagagatcgaggaactacatggacaatatcagagtatataactccatgtttgcatttacctccatgggaggaaaagttgacagagagataaacaatgggtctggaccatatgttttccgcatgaatggccagaactaccaccgaataggtactctactgcctgaagaaggcgataaacctcgctgggcgcaactttacatctatgacactgagaacgaagtcaaaaacagaattgacgcatcaacatcatcccataatagagaatcaatagattcacacattgtcttaggcctaaagaacatgctggacagagaaaacgtactagcacagacattcagaatggcaagagatagattcaaagaaggtgactatcataatgtaagcc

SEQ ID NO: 15270 - DNA, 1250 bp, Oryza sativa
caacttattccggaagtcgcttggcggaattgtatatggcaaggattgtgtgtttgcatggcgtccctaagaagatagtgtctgatcgaggcagtcagtttacttcaaatttttggaagaaacttcaggaagagatgggttctaagttgaactttagtactgcttatcatccgcaagcagatggacaaactgaaagggtgaatcagattttggaagacatgttgagagcttgtgctttagatttcggtggaagttgggataagaatctaccttatgcagaattttcatacaacaacagttatcaagctagtctacagatggctccttatgaagcactgtatggtcgaaagtgccgcactccgcttttgtgggatcaaacgggagaacgtcaggttttcgggacggatatcctaagggaagcagaagaaaaagtaaagatcattcaagaaagattgcgtgtggctcagtctcgtcataagagttatgccgacaatcgccgcagagatttgagttttgaagaaggagattatgtgtatcttcgtgtcacgcctctacgaggagttcatcgttttcataccaaaggaaaattggcaccgcgttttgtgggaccttataagattgtcagtagaagaggagaggttgcttatcagctagagttacctcaatctttggcaggagtccatgatgtgttccatgtgtcgcaattgaagaagtgtttaagggtacctaccgaagaagctaatattgagcagatagaagtccaagaggatttgacttatgtggagaaaccaatccgtatcttggaaatagatgagagaagaaccaggaatcgagttatccgtttttgtaaagtccaatggagtaatcactcggaagaagaatcaacttgggaacgagaagatgaattgaagtcagctcatccacatctattcgccagttcttctgaatctcgaggacgagattctgtttaaggggggtaggtttgtcacaccctaaaaattcaaaatctataaattgttgtttaattggaatttttagaaatgattttaaaagcctagaagagaagatctaattttaattaataaattctaatataaaatggggccagataaaattttattaaatactttgcttaattctataattcctagatttttctgggatttatttgagctaaggaagtatttttaataaatggaattgcatttcatgaataatttaaattgaaaaaggtttttaaaagtctcttt

SEQ ID NO: 15271 - DNA, 1197 bp, Oryza sativa
ggagaaggaactagccgcgttgaagggagaagcaccgccgcagaaggccaggattcgtctcaccgcaaggaagagagctttgtttgtccctcgttatcaattggcgccaaagattcgtgtggtggagaaagaagttgccccagctcaagcagatcctccagtcatcatcataagtagtgatgaagaagaagaacccaagcgcaacaattccaagtttgagtgggtagctatcaaagatgaggaagatgagccgaacgagccttcgatcgacctcctatgctcggaagaactagagtgacttgttgggtcgttgtcttagatcgttgtgttagtttgcttgtttaagtttgcttgtgtgtgtgtgggtcctgcatgtgatttacatcagtggtgggatgtaagtgcatgcgtttgtttgcttctgagtgttaggaagttggtgagtttagtggtgtgagagtcttcagtttgtaataatgaaactcagttaagatcaataaaagttaaagtaattctctgtcctaagtagtttccccggtttcttttcttatcctgtccatgccagatggtgaacactcgcagcaacgggaatggtcccaacctcaacaaccccaataacaataacaatggagagaatccaacccttgctcaagttcttgctcaacagactcagctaatgcacatgatgatgcaacaacttcagaaccagcagaaccaaggaaataaccatgcacctccccagaacaagttagcagaatttcttcgggtgaggccgcctattttctctagtaccaccaatcctgttgaagccggtgattggctgcatgccatagagaagaagttggatttgcttcagtgcactgatcaggagaaggtctcatttgcatcacaccagttgcatggccctgcctctgaatggtgggatcacttccgcctgaataggactactgctgaacctatcacttggcttgaattcaccgctgcttttcggaagacgcatataccatcgggagtggtgtctctcaagaagaaggagttcaggtcgcttacgcagggatctcgctctgtcacggagtatttacatgagttcaatcgtcttgcccgttatgctccggaagatgtgcgcaatgatgaagagcgtcaggagaagttcttggaaggacttaatgatgagctttcttacccactcatgactgg

SEQ ID NO: 15272 - DNA, 1129 bp, Oryza sativa
acgacgacggcacccgtgcgcatccagcttgcgcccaggaacccacctccatcagcagctcccgcagcacctccagttctgcccgcagttcctgcagctccagctccagctcccgttcacatgtcagctcccgcgtccgctctctccttcgctccagcatcagccgccaggggtccagccagtggcaacggaggttggttgtctgctactcctagtggcagccacgatctcagcagcagcagctccagtggctcagagtcgggcagcagcgagacttatctgccaggctccaggagtcgctcagagggacctggtgacgagcaggaggacgccttcgactgcaccgaccgcagaagccgttccgagcattaggctcgttttccattagtttatcgactgtctagcttttgtttgttagtttgtgtgtctaggttgcttgcttgtgggtcagttgacggtcgatatcatgtgcctatgatatggctgtcttaataaggatttttgcttgctttttaagtgttttaattcagatcagaacaatggcagtttaaattcctatgtaataaagcttagttcctgagcatctgtttttcttcttttcccccgtctgcttttccctccagatggtctacaccaggaatggtagccgcgcaacaggcgagggcagcaacggcgaagagcgcactgatggggtgcatcccaacggcgattccggcaatggtccaccaccacttcccgagaatccgacgctagcccaggtgatggcacatcagactcagatgatggcagccatgatgcagcagatgcagcagcagcaccatcagatgcaccagaggatgctgcagcacgccgaacagcagcaccagcagtttggtcctcctccccctcagtccaaattgccagagtttctacgtgtcaggccacccactttctccagcaccaccaaccctatggaggcgaatgactggcttcatgccatagagaagaagctgaatctcctgcagtgcaatgatcaggagaaggttgctttcaccacacaccagcttcaaggtcctgcgtcagcttggtgggacaatcacatggccacccgcccaccaggtactgaagtcacttgggcagagttctgccg

SEQ ID NO: 15273 - DNA, 14997 bp, Oryza sativa
taggtgagcatagcggggctcacctaaccacatttattgcggtttggacgagcgcgtcacgccgcatgtaacgcagtgcagcgcactcgtttatccggtctgtgaccagtcacagaccgatcagatcgtgggttaggtggcgacaggcggtctgacgcacgcctcgccccatcccgtcaggatgagagcctccaagcactcgtccctagccggagccggcgtgttagctcctggagatggcacgttggtcccggtcagatatataccaggcttcatcctaaccattacaagcaagacattgtatgaagaggggcgaacatgcagattgataaactgacgcgtggtggacaagaatgaccgatttgtgaccggtctgacactggtcatgtcgtcagcagacagccatgttcccacgtcgcgcctgcttccggcggaagtggaggtaggtatgggccgtcccatcagaaggtcattcggacggcaaccatacaagtctccgtctgtttatgaaaagataggataagtccccacaaaaaagagagagatggtgcatgtggtatccccttgaggtataaaaggaggaccttgcccacttagaagggggagattttgggggagaaaacgatcccagaacgatcgggggctggctcgcactttgtagcttcttcatacacagatccaccaaaacacaggagtagggtattacgcttctcagcggcccgaacctgtatacatcgcccgtgtcttgtgtgtttccactctcgcgaactttccacagaccaggagcttagaatctcacccagggcccccggccgaaccagcaaaggggggcctgcgcggtctcccggtgaggagccccacgctccatcaaacttctacctcgacgagtgtagcttcgtaggaggaatccgggttcggagaacttcttctataaagtaagcatttgttttcctttcttatgttatttaattaattttgtctgagtaagatatattttcatctttgcgggttcattgtttagtattcatactaagtgctctagtactaggactctggataaagaagaaagttcccgcgcaagtattagagtagtaattaataacttagacgtggtgtctaggttagagattacctttgtttgttgtgtatcccatggatttgtcagaggtaggcggcaggtggtgacagccctgaatcccgtcctagtaatcctccacgttcggataaatcatagagctatagtcggaaccacgctggcagaccagcaagggtcggtgcccgaagcaacagatagaaaattacctttgcttagcttagataactaaaacacatagaaagtcctctctagcctgcctagcctacctatagttgttgttcttggattgtcttagccttaggtagattacacacgttccctgagttcgatatccttttaggatcacccgaaggtgaagtgctacagtgctattctgtgcgcttgcagatttatctgtggacgtaagaaataccaacaagcatttctggcgccgttgccggggaacggttgctaatttatccgagtctaggtcatcctcgtatccttatttttatttcttcttcttttattcctttgacatgaaagatttcaaatcttgacttgaaagttttcaaattttgggttgaaatttttcaattctgggttgaaagttttaaatctgagttgaaagtttttcagatttgagatgaaaagttgaaagttttcaaagtttgacttaaaaaaaaataaatttcgagttgaaagtactcaaatatgggttgaaagttttcaaattttaatttcacatatagatctctttttaatctgttagttaaaaaaatctttgaaaaaaagacaaatctacgaatcttacactaatcggattagttacgcgtcttcaaaaaaaaacccgaaaagaaaaaaaaagaaaccgcgcaaaaaaaaaagacctaaccgctctacgtcgcgcacgaattagttttctctaatttactgtagcgtgtaattaactctaatcacagtaattaacgctaatcaccatgattagtgtgataggagcgggctgcaacctaacatgtgagagtgcgcggagttactgtaacggcgtgtatgcgtgaattagcagtccccaaccttcggtgtactttttccaaaaagaaaaaccctacaaattgggcccgcttagtttcacattaggcctactggccatgaagggatcgccgcggcttacctgcggcccatttaagttggcccagaacgttgatgcggactccatgaggcccatacaatgggccgaaaagtatgtgctggataggaaagtttatggggcctcctccacgacggtccttttcgttgggccagaactatattgggacctcagggcggcccatatatattggggcagaatgtgattgcgggctccttgagacccatttatgtatctctctcgaagccctagaccaccacgcctcctgctcgcatccttccttaacaactccgcatgataaagaagctaagcatggtgattggtggatgtggtagagtcggatgtgagtcatatgattcagtcgtattaataacaggatactttatttatagaaggagagaaacaaaacgttcacctcaaagaggcaccagagcaaattgcaaacaggtgatggctgatctgatgcgtttgatggcaacgggatcagatcactgtagatggatccaaaaaccaatcatttctctttgtggatgtcagattcactagcatcaacttttgccctaatttcctccctccttttgactttaactgtctccttaatttgtcggagacgtttggttctcagctggatgagagtgaaattgatcaaattacatttgttttctgcacttctgctagctactactagcctttactacgaagctacagagaaactaaaacgtgtgtgtctatatgaacctatgttacctggatactgtcacaatcacaccaaatctctcacacaaatgccaccgatatattgcaatccactgaagaatacaagtgtttagggatacaaattgaggagaaagagaggtatagtctaggaagagtgtaacatcctgaaaattcccaacaataaaaatcactaaaaatttcgaactttttaaaacttttgcgtcatgctggttgttatgatcgctattgcttgccaaaccgtaaatgatcacaaagaaagtaaagaaaagagctgcattcaagcaatagatataatttacgagagtatattatttatgtttagccctacaaatatttatgcacaagatagtaaaataaaataaaagttatcattaatctattttatcaaatattaaaatatttgaataatgtaggtgggtgcgataatataaatgcacatgaaatgatgaccatttaattagaaggaactctatctataaaatagttttacttgcaataattaattcgatattatataatttgtattgaatcacaaatattaaattatagaaatccatgttgtggtaaaaccaatttaaaaagataaaccaatatgcatcaaaataaataaataccgaaatccccaaatatgggaaattataaaaatctaggataaatattggacaatattaaactttgggaaaattcacatttgaacacataatatggtcactcaaatgcttaggagtaaatacaaatttattttgcaatttttctcaatttataattcaaccaaaagccctaaaagtaggaaaataggaaaaggtagaaaaatatataataaaaataaaatgtgggcaatattaagtgtgaatacaaatttacatttgaataactcagattttgtgtgaaatacgttgtgacaaaataggtggcaatagtccattctctaaattggaaaacatctaataaaatccaaagaaatcggctagtactgttcataggcctctaggtgttcgatgttgtcccctaactaccccctctctagccagcaccctagcctgctgctgccttgcgccccgcgccaccgcgcgccgtctagtcgccatcgccatcgccctgccgcgccgttcgccgtcgccatcgccctgcgcgcgccgctgccacgcctcctcgcgtcctatcccgccgcgcaccgtcgccgtcgccgcaccgtctccaacccgtcgcgtcgcccgtcgccgccgcgtcgccgtcccatcgccgcgcgccgccgcgtcgccgtcccatcgccgcgcgccgccgcccgtcccgtcgccgcgcgcgtgtcgccatcaccgcctgccaccgcacgccgagccccgcgccgccccgagccccgcaccgccacccgtcgcatcgccgctccgagccctgtgcgctgccgtcgcgtcgccattaagctgccgccccttcccctctccttctcccccctcttccctataaaaaccttccccccttctccaccccaccccattccctcctcctctccctcttccccttctccacgcaccatcgtcgtcgtgccgccgcgccgccgccgcaccgtgccgcgactgcgccgccgtcgccgtcgtcgccgccaccgccgccgccggtgagccgtcttccctccccccccccctcacctcgcgcccaccgccgtcaccgcccgggagagcaagagccgagagagagaggtagaaagaagccgggagggaggagagaaaaggaaaggaaaagagagaagagagaaaaagagaaaaagaaaagaaaaagaaaggaaggaaaaagaaaaagaaagtgaggaaaagaaaagggaaataaataggaattaggaggagatttaggatatttaaaatatttggaattaattataggattaactaaagtgtagtatttgcaaaatgatactataatcatagattattatagattattcttggtaatttccataagaaatcaattcgcggtagtaatttaaatgtaattaataactaaacaattagatgaattcttatagactattatagattatttttgggtaatctctataagtaatcgattcacggtagaaattcggatttaatcactaggaatttcagacgtatattacatttaatcgtttagtcatagactaaattaaatcgtataatattataagataattttagggttccatccaatatttagatcgcgatagaaatttctagcctattatatggatataatgctcgggtagattaaattaaaaacttatgataacaaaatatttatacccgcaaaatagtttaggatatatagatcgaaattgggtttgaccctaagtcaaccgggaccggttccacatgtcaaccacagtgggttttggataatgtttccgattaaaaataaatcatttatgaacagtgcattttcacaatattctcggattaattcgaaattgaatctttaaactagcataactcgctcattttaactccgatttgagtgaaactcgaacctaaattcatctaaattcataagctttccaatggtatataatttactattaaataaaatatatttataattattaaataattaatatcatatgattaggttatggtcaacttaaaaatatgctaataaatagaattagtattgtacagtagagtagatgtaataacatttgtctctaacatgtcttgccactgtaacaaccacacaaactaattttaagtgatgtctcaaatgaatggatgtataggaaaatactactacttatttaatattcgacggccatataattaaacctatggcttataggttatttaaatcaagtgtagccttgtgattatgtaactaaaatataaacacacatagatgaatctttaacctgtttaggagaataataacagagctagatgtggaggaatcactaagtaaattaatcgatgcaataccatatagaatagcatatatatgcctaaattgattaccacttattagaaacccaatagaaccagtgcttaaacttgtcgcatcacatatacaatatcactcatagaaactagctaatgtataattaaactataatatattcaggaatcacttggagcattgagtaatacactttctaaataagctcatgtacagtaggcgaccaaaaccttatacgttgttgcacacatatattgtatatcccattatagttatacaattaatttatctttttcatatattaaactggggagtatataacaaacatgaatagtagataaatagtagttataaatcttgacctcatataattataattatagttcaactgtaaattaggattattcattgtaaaattatgtgatgggataatctgtaatcataatatgattaacctaaacaactctaacatacaaagcatggataattattaaccttttataatttattgtgacaagtaaaatatgttcataattaaagtaaagcctccatcaattaaataataatacaaatgattcgttatttgattgatcctaaatccatctaacaacagaacctctggtatgtaaccgtgctatttagatagatgcatatatagccataatccttccatagccatttgatagactaaaccaccgattagccaaatatatatgtataccataaatgctatgttggttaactcctaaatagaccacgatgacaatagaaagattaagaaactttagcccttagcatgattggaatccattagcaaacacgaatagtacattttgttgtgcatatttgattgttgttgaatattggtttttctcgcgtattatagaccttgtgtatcggttagtcgtgaggcaacgtttgcaacttccaggaggtgaaggttgatcaagaattatatcaagaataaggactattctgagcaggcaagtcatatctttcattatgggtctcataattatcattttctggtctaggctcaaccggaggatcattatggagggcataatcaatatccaacagggctagagtaatttccagcttctccttccatgaagcataattacttccattaagttgttcaatattgcccattattccggcaatttgtgaatattgatcaaatccctgaatattgcccattatcagcagctaaataagtaccttcttttattgatcaaatccaaaacggctttggccagagaagcaaatgaacaataaaattttgtgaataagtatttattaatcagctttggccagaataataaatacaaaccacactttatcaatttgtttaaaactccttttattaattcaatcaaaacagctttggccagatttgaattgaattaataaaattttgtgatcaaataaaagtcaatcagctttggccagaatgacaattatttgtcacacttaattataatatttatttgtagcggaaataaactcataatgcataaaacaataataactttaagtaataaatataatgtaactatcataaaataaataaatgaaagataattttatcacataacaaagtcacttattattcttattatcattaattaaaacataataaaatatctttaatgtttaaacacaatgatcataatcataattctttaaaaggaaaaaattaattgtaatattatcttagcccaatctttaattaggcccattaccatgcagcccgttactatgcagccacacaaaattgaactgggccactttctcgagccaggccgcactcggcctggcccgtcattgccgcgccgccttccgcctgggctccaggcccatcaacctgggcctgggccggcgtttgccgcctcccgcacggcctcgtcagcccgcgtcgggagcgagccgatccgagccgtccatctcatcggacggccgggatcgctcccgcgcgggacaaaaccggcgcgcggccgccccccgcgaaaaccctagccccattctctcctcccctctttctctcacgcccgcggcgacggtgagcgagacgacggcgaagcggcgcacgacggggtggagatggcgccgccgagccttgctcgccggggctgcgtgccgccatagctggcgcgcatccccgtcgagcgttgctcgacggtgccctaagcacccgccggtcgctcgcgcgaggaagatccgcggcggcgacggcgagacgaggcggcgacggctacctcagcgaagcggcgtcagcgagacgagcacgcaaagaggaggagccgggccagcacggcgggtcgcgaggccgctcggggaccaagtcctcgggcgcgcgctcgcctcttattgcgtcggtggcgacacggaggtcgccgccggccaccatgcccttaggtaagcccgccgcgctccttttccccatgattttagggttagggttccatgatttggggaatttttggggtcttacttcagctagggtttcggttcttagggatttgtctgagatttgcatgaaattttccttccccttcttctaatttcttcaagccgaaaccctagaaggcctaattccatttcttatgctttgggattgcatgattttggctcaattcaactttaacagagggatttgggcatgaaaacgaagaacaacttgaacataaacacttattgagttccaatttgaggccaaacctggctctgataccattgttggattgttttggatcggtttggcacaaagtggaactacaaattgaaatgggattgagtcataccttgatctccagaggttcccattctctgtctttgttcttctctctttctctcttgtttggaagcacagagagagatgtgtttcggttcttccccgtgttctcagtgggttttgcttgatcgggtagcaatcgaatcttagggtttgcacttaagtatcgatttctatttatagccactgcacacagggggaaccgacactaggatatggcggttatcccccgatcagggatgttcatgagagatcgatcactgtagcgatcgccctaaacaaaatatctctttgccgactttaggtttagccgcaagatcatattttgcgttcacactgacacatattacatgatgggattcagttgcaggagcaggagctgaaggttcttctttgaatttaatcttctgctccatttccatccgatgttctgctcctttcacagctcacagactctattctgctatcctatccgttgattttggaacggaagcttaattagctttctgttacacgaacttgcatacttcttttatgcggttgtgattaaattctgagcagaagattttcttccattatctttcaataggcagaatatgtacttctgttagcttgcaataggcagaatatgtactgctattaaaaactgggtatagagaaaaattaggtggttgttctgccaacaattttttaacggcgatgatgttctgccaatttctttagctgacgttctgccagttttttaaattgaccagctaacatatattttctgccggccagaagcagtagattttcttgttgagatgcaatttttttttcctgggatttctttcaattgatgttctgctattttattttgaggtatattacaaattttctgatcatttcactactggctacatgttctccttggacacatgttcgcaaccattactgctgcgccgaggtctttcgctgcttctgaaattcatgttgtaagctgcacgaatatcatgaagtgaacaccaagcgcatctatctattcctaggatttctcatgggaagaggatgacatccatccaaatgaatgtcatatttctggagagagtgattcatctctttactccgggcagcagtatccatgcaatgcacaaaatcattcctgaccaaagaacgcaccaaatagtcagaaccaaacaaacaaacaaacaagagaaaaattttcaacagaacataaacaaaaaataatctccgatatgtaccaatctgcgggcaggtttctgctgcatgacaccattagctgaagtggttccgacttctgcctccgccggattgtgctgcttgctagaactcacaggcgacgatgcgcgtacggctaccaccgtcttctgccgctcgacatcacgcgttgacgtcttctggcaccgcagaaggcgacggaacagaactcgccgacgatgttttgccctttccaccggagggtttctgctccatcaaatatctgcagaaatgatctgcttgctcacaactccaaaggatgcttctgctcactcctcttctaccctacatcaccgtaaacttatatggagtctccgtagcaacctccacacaaactactctcctggtcgcacggccttgcatgcgtgcggatcaacaagccatgcatgcacaacattcaaatgcctcagcatgcagaacatatagcgcagtgatccaatttttcaagaaaagtggatttgtggatattttctctccaaccgttagtgggttgagacccgaaaccttcatgtgaggtggggacaggtacacacacacatatatatatagtaaatttgtttggtgctccatggtgcccgggcaccattgttgaaattgagtatatacccaattcaaatgagtatgaaactttttcaattacctaggtattaacattaactactttactaactagtttaaagcaagtttgaactgaatttgaacttgtttttgttagattttgattctaggtatatagcatccatacatataattagttaggtatgtaatcatggattgtgaaataaagttaaatttgagttgttttgttgataagtataggtatgaatcaaattattataactaggtatatactcacaatttgaaaattttgaaaaatttgagtgattttgtgcattagataccatggtgcccgggcaccatggtgccccatatgagtgtcctatatatatatatacatatatatacatatatatatacatatatatatatatatacatatatatacatatatatatacatatatatacatatatatatacatatatatacatatatacatatatatatacatatatatacatatatatatatataggacgactcttttgtactcccaggtgtatgtactccctcttcttagtggatatccattagttgataataaataattaaattaaatgggaaaataaattaccgttcacttttgtatttttcgaattctggatgcatgcagttaggccggtacatacggacatacgttaggttcaaattttgatatagttgaggtagcgggcaagtatatacttgtttttcctcgtgtactgtttaaaaagtagtatatgtcactgatgagattcataaattaacagtgtcgtcactgagtatatactgagaattcagaatgaactgtatcagcactttttcaccgtcaaaaaattaagcaatgcgtagcagtatatatactagtttacgtagtagtagttgccgtatatactggagtaccttttaaatagttgtagcagtacatatatacaactttgtttggaggtagtacagtatatgtatactattttttatgtaggaatgcatactttttattatttagtatcagtatataaccttctttactttaacgttagtatactgatctattgaaatgagtatgtactgctcttttctaagtatccagtactcgatcggttaattaggtgtacgtactgtttttatcatgtatccagtatatactaactcagtcggttaagaagtatgtactgtcttttttagtttccagtatatactaaatcaatcggttaatgagaaatatgttgtgtcttttttagtttccagtatatactaaatcaatcggttaatgagaagtatgtactgtcttttttagttaatgagtatgtactgttttttaaaagtatccagcatatactgaaatcctcattgaagcagtatatactattttttaatggcacctagtatgcagtattgtagtacatcgatcgtcgatagaaggtatgtatggatgcacctttttattagattattagcaaaataattaatgaagtacataatacttcaccgagtggtacttattaaataattaagaaaatagtatttatatcacttggtttcaccgaatggtttatataatgagccataaaatgaagtatactagatgaaattgatagtatacatattcccccgcaaaaaaaaagatagtatatatattcaaaacaaaagcagtatgttatgatactacttttatcattgatggaaaaaggagtatagttgtttgaaaaaaggaggaggaaaaagtagtatctatcccagaaaatagtgcatcgtcgacttcatcgccatcagcatggcgtggcaccgatagcagctggcaccgtcgcctggaaacgaccaagggacgaagcacgctgactagtgcaacggattggctactcggctgcgcttggatgaagaaacgccgcgatcatctctgctttgatctgatacgtgggtggatctgttagcacgccgccatgccgtgccgtcgccaatcgatttaaaaaacggccgcagcagccgagggagcgcgagtgatctgtaagcaatagaaatagattaatggaagaactaaacagaagcttcgatctccatgcataaacaagaagcaaagaacaggaaacggaaggacatggcagaatagaatgttacggtgctcatcttcctggcttgatgagttcgattactccgttgcacgcccggcggaaggcaccactatcgcggcgcgcggacggcgtcggtacaccgaggcacagcctagagtcagagcagtgcagccgtccggcgagggtgactagcgatcgacgggatgaaagagacaccgcgccgactggcagctgggaacgcggtagatcgaactaccgccgccgacgaacttgctttttattaatgaaacagatcagtattgttgtgccttccgattaggccgggataattcagaattaatagaatttcttttcaaaaagaaaaggatcaaacgggtttgatacaaacacccggtaggagggtgggatcgattgatcggtgctttccttcgatggacggtggatcaaagcgggagtacatacacctgggtgtacagaatcattttcatatatatatatatatatatatatatatatatatatatatacactagcaaaagtgaagtgcccgtgcgttgcaccgggtgattacggagtgtgtatattgaccaaaagtgttgtttggtctagcaaaagtgcctgtgtgttacaatgtgaagcgtacagattagaaaaatatgcaattaattaaaatacaaattcgctgaaatatttggtatttttaagtaggtatgtgtataattaaataaatttacaagtaaagcaagtgtgagaaataaaatgacatggttaaatttaattttttttaattctccatgattagttacgctctttgaaattatatttgaatttttcagagcttaattgttaattttattaatacaaacgtcatttaacaattatttacttggaaaaagaaagaaaatacttccttttaggtttgcttcgaaataaatacattcaataacttataattgtaatgcttctgaaaaaatgagcactaaaaatgaacttattctctttttttgggcctgagggacctaaaatagacttatttccggcccttgccggtcggtccacggccttttgtgcacgcgcaagtgcacttcccctccccaggccacaacctgggcttgggccagaaaagtggcctcactctcgatccctcttgggctgatttcggcctggacgacaccgatcgtccgatctttagggttttgatcggacggccgagcgtcgatatcggggaaacaaaacccctccttctcctcagccgccgaaaccctagcccatttccctccctcccatctcacatcgccgccctcccctccgcgcccccgagcggcggcgacggcgcccctcttcccgcgagcggcggcagcggcgccctcccccacaaccaacggcgcggcgccctctccccgaacaacggcggcgtggaggcggctgcggcccggcgggagcgggaggggcggcgggccggacctcccctccgccagatctggcggcatggaatcggctgtggtccggcgagtccatcagagctgacggcgtcgtctaaatctctctctctatgtgcatggtggggaggtacggcagtggtggtggtgctggacgtcatggaacgccggtcgggcctcgcctccgccagatccggcggtgtggaggcagctgcagcccggcgggggtggaggggcggcgggccggacctcgcctccgccagattcggcggcatggaggcggctgcggtccgacgggggcgggagaggtggcggcgtcgtctctttctctctctctctgtgaatggtgtcggttctcctggtgatgctaaccgaataggacttggtataacagatgggagtttgtttcctatttttgtggaatcggacatattcttttttttccccgatttttcttttaccgcgttgatgaatcggattcgttccggttttttttcacccggtttttttgacggacgatggaagcacctcttattttttaagtagtagtagatatgacactcatatggggcaccatggtgcccgggcaccatggtttcaaatgcacaaaatcactcaaatttttcaaaattttcaaattgtgagtatatacctagttataagaattcgattcatacctatacctatcaacaaaacaactcaaatttaactttatttcacaatccatgattacatacctaaataattatatgtatgattgctatattcctagaatcaaaatctaacgaaaacaagttgaaattcagttcaaacttgctttcaactagttagtaaagtagttaatattaatacctaaagaattgaaaaagtttcatactcatttgaattgggtatatactcgatttcaccaatggtgcccgggcaccatggagcaccaaacaactttaatatatatatat

SEQ ID NO: 15274 - DNA, 1956 bp, Oryza sativa
ggaactaagagtgttttcccgagtttaggaacccttgtaactctcagtataagtcccatacaggagtagggtattgtggagattatgggtaccccatacccacacggcatggttatccgactagttataggggataacttatatctatgtaatatgtaacagatcatgacttgggtgttacgtttccttgtatattacggaatggcctaaagtcctgatttaggaaacagataccgtattggttaaggtttctatcttgtaatcctgccccccatcctatataaggtgggcaggaggccctctagggggcatatatgacacaacctgatcgtcagatctatactacacccggcggattcaaatccccaaaacggagtagggtattacctctcattgagagggcctgaacctgtctaaatcctttgtctctgcatccatccacttttaggtctcgtgcgctacccccttttattattgccgaaatcatgtttcgacagttggcgcgccaggtaggggttgcgtcgagtttcctatcaacgagcgcgatggaatcaatttcatgagtcgccgacttcgttttcgctttgggagttttcacttcctttccgtcgaccacttcttcaagctcctcttctctgacttgatccaaatcagtcagggggaaactcaatctgatttttatcattatttatcatattgatttttaatctcagattaatttcttactattttttgttgttgttcgcatataactacgcggcactattgaggcgattgatgctggtcatggactcgaggcgtctcagctttccggtcgatcggccgcgagtccactccgccggcttgtcctcgccaccgccattgctgagagcaacaacgacttcaccgccggcctgcctccgtcgccgccgactggtgtcatcgcctatacggttggtcggtcacaccaccgttcatgggcgtccatgtcttcaccgaccagctggccttcgccgccgccgactggtgtttccgcctgcacggctggcctattatgccgccgctgttgggcgtttacgacttcaccaccggcctgcctccgtcgccgccgactggtgtcctcgcctatacggtcggttggtcacaccaccgttgatgggcatcgtcatctacaccgccggcctgcctccgtcgccgccgactggtgtccccgcctatacggtcggttggtcacaccaccgttgatgggcatcgtcatctacaccgccggcctgcctccgtcgccgccgattggtgcctccgcctacacggctggcctattatgccgccgctgttgggcgtctacgacttcaccgccggcctgcctccgtcgccgccgagtggtgcctccgcctacacggctggcctattatgccgccgctgttgggcgtctacgacttcaccgccggcctgcctccgtcgccgccgactggtgtcctcgcctacacggctggcctattatgccgccgctgttgggcgtctacgacttcaccgccggcctgcctccgtcgccgccgattggtgcctccgcctacacggctggcctattatgccgccgctgttgggcgtctacgacttcaccgccggcctgcctccgtcgccgccgactggtgtcctcgcctacacggctggcctattatgccgccgctgttgggcatctacgacttcaccactggcctgcctccgtcgccgccgattggtgcctccgcctacacggctggcctattatgccgccgctgttgggcgtctacgacttcaccgccggcttgcctccgtcgccggcgagtggtgcctccgcctacacggctggcctattatgccgtcgttgttggacgtctacatcctcaccgccggactgcctacgtcgccgccgactggtggtctacgctacacggatggcctattatgccgacgttgttgggcgtctacgacttcacc

SEQ ID NO: 15275 - DNA, 19507 bp, Oryza sativa
ctgaggcctatactggtatgatatttcagcttttccaagaagaatacgaagagtttcagtcagcttacattgtgactcgtgatgaaagtggtcccagccgtgaatatattgttgccattcttgagaaagaaagacggtataaagttcatggaaacccttgtgagcagacagttacatgctcatgtaggaagtttgagacacttggtttcctgtgtagccatgctttgaaagttttagatacaatggacataaagtatatgcctgataggtacatcctgaagcgatggaccaaatatggaaggtgtttgactgcaccgcaggttgaaggtcgaaaggttcaggcagataccacattagaattttctagccgctatgaatacttgtgcccagtatatgttaggcttgttgctcgagcatcagaatgcgaggagtcgtacagagtattagatcaatgttcagtagaactgggtaagaaaattgaagaaatcctgcagaaacaaacaagcattgatgcgtcagctcctcagtctgatattgaggatgtaacaatatccttgtctgcgaatggtactgacaatgaatcagaaagagcactggattattcaagcagcacaagaccgaagcgacgaaaaaagaaaggtcgtaatgctaaaagccaacgaaaaagttgtattgagaaaggtttacaaaaaaccaagaaagtgcaaccagaacaatccccaatacaatataccatgttggatgctgctcaacctggaaatgttctatttcaggtaatttcagcattgttgttcattatatggtgatggcataacgtgatagtaatcacaaactgatattattctaaacggtagccagttggtggtgacatcaagaacctttgctttatgtaaactcccaacaatcctatattgctacagtcatttcaattgagaattcctgtcagattgttctttttaatgtgatatgaactccatgcaaaattggaatcagtcacaaaaacctgtaacgtcaggttgtttctttttctattaaaattttatattgaacaagttatttttcatctcaattttgtagttcctaaggccttctacagcttttaagttctgcaatgcagaggttttctatttaaaatcctatgccataccaccatggactgtggtcataactgatagtagctcaaaggactatgattatgggtattttgggctggagaatcttgaattcactatagttcatgcctcagcaacgttttagtccaacattccaatgccgggccaattcatcacgccatctggattcttttcaatatatatgctgggcatggatgttagatgtacctgaagttgtgtagcctgttctaaccctgaggttagttattgtatgtaacatggttaatttttagttccctttttcattttcagggtcttgacatttctaatccatttccaatggggcaactgaattatggaggagtgcagtcacaaccaggcctatgcccaagcttacctactgtatcaagagtattgtcaattgcctgttactctctttttgataagaaatggtgccccttgcgccgtatctgaatattgaaaaaattacttacacggtcattgctttcaggaacttggttttgctgcatacctttctcagccatcaagtaacaatcaacataatcagcaggtataaattggtaaagtttcacagttgtctctttcctcactttcatgttgatgaagctttgaagttgccacctccttactttctaatttaataaagtgtttagattttttaactctcgtgtagctccatccactttggattttgcacttggcaatttagattctgaaaaaaactatacatatagagcattttaaggtacgtttacatgcagatatgatcaatttgtgctatacgagaaagaaaactaaatcgtcttatctttcatcaaagaaagaaagctgatctatctttacataatttttgttgcacacctatacatgattatatctttacataattttgtgtgtgaatataggtcaacatgctataaatgtttttattttcagaatttcctaaagtcacaatgtgcaagaattgaaaaatggctgtagctacacatgggtatagcaggatctttatctttaattaaactcagctttttgttaatcatggcccacgtcactgctctgttggccattaagcagttaatggatgaagttgctagtttatttctgctgtttattgtccatcttttcagggtttgtagaaatcaacagctctgttgaaaatcatagtgcacatttgtttcaatcttcaatataactcttgggacagaactggccctctgttgaagatcaaatcaacttctcaaattcatatcagtcagtaattgaggctaccaagaacagccatttacctgggtacatccatcagcagcatgttcaagccatgctacgcagcatgactagctgacgattagcagtgatagcgctcaccaagttccagagtgacagccacttggtgttgtgttgattagcaatttgaatgttaaattctcccgcatatcgctcatcaattgtgacataccaagccaccaaggacattcagagcacatccatgatctatcgtcagtagccaacgaagtgttagctctcttgcaatcgtcggatggtggatggtgcagaactgtagactattttgtagcctgtatgtgaacatgattacatgaaccatgtaggactagtctgtagaacagagtagagaactagagatgatatctttggaaggattagatttcatgccactcttagagttgcaggtttagaaatatgccattatgatggggatatgtcaatagcataagctcatttgtacaagcttgtcacacttgtgctttgattgtataaatgctaggagatgtgtctattttgtcaaattagtatctcttgctgactttcctaaatgttcgcaatttgatgaaatgcaagtaaaacgaattcatgaaacaagtttctgcatagcatacggtccctggaatgtaaacatgtaagcctaaatttcaagggttaatttcaacccctgcggaaacttttttttcagttcagagcaaaatgtcagttcgcaagatccaacatttcaaaaaatttcaacatattagcacaaaacaaaatgaaacattccactttgaagcattcattcagttcagaaataccaaacggcatagcatttccattaagattagcaaaccacaacgattacagcatcacatctcccaacctacagactgaaatctggaaaaaaaaaaacgtgccagtttgccaggaacacggaagaagcctccaggcaaggcaagggctaggcccctcttgcctctgatgcggcgcgcgagctggatgtccttggggcgcagaggttggttggtgtcctcgaagagacccatgaggtataggcctcggcggccggcctcctgcagggcggcgaccggccggagctctggaagcggaggtgctgcatgcgttggaaggggagcttgctgcggggatcatggagctagctccgtgctcttctggtctcgcggagcgcgacggtgcccgggcggaagcggtgcggcttcttcgtcgccagcgcgctgcttcctcgatcggcgccttgccgccggtggagacttggcgcgccgtctgcttcgttcggcgccatctctcgccttacttgaattatgtttaggctctgttcagttcccttcaaacttccaacttttccgtcacatcaaatatttggacatatgcacgaagcattaaatgtgaacgaaagaaacccaattgcacggtttgcatgtaaattgcaagacgaatcttttgaacataattacgccatgatttgataacgtggtgctacagtaaatatttgctaatgacggtttaattaggcttaatagatttgtctcgccgtttacatgcgaaatatataatttcttttgttattagtctatatttaatacttcaaatgtgtattcatatacgttaattttctttttgccaaaacaactaaacacggccttaattagcactcatcaatttgagctctcttgaagtttcaatacgtgcagtgcagtgcaggcttgagagagtcagcctgggcttctctttctttagtgcaagctacttcgctctctaccattgctaacggatttaagttgtatgtagtcgacacaagacagtacgggtgtgtttggcacccttttttctaacccctcctcgttttccgcgcgcacgtttatcaaaccgttaaacggtatgtttttttaaaagtttttatacaaaagttacttataaaaataaaattaatctatttttgaaaataaattagctaatacttaattaatcatatgataatggatcgctctgttttccgtgattactgtccttgatggaaacaaggatgcccgaacagtctcttcgattcactcccaaaaaaaaggccaaagatgccaaaagttacgtcaaaatttttgtttattcgctccaaaacattattagcatgctactttttttacaagccaaatcaatctataactataaatactttgttattactatttcttttggtatagtaaagtacactattcaagagcccatacgttacaatggaaaacaaattgtgtttatagcttattaaatcaattaagcatatatttagtctaagtagtacttttatgattttccttattaaacaagtagttgattttaaaatttggggaaagccaactgcgaaacgagagataaatcattaaaggatggtgtaatagtatagactgtggaacccaaataataatggtaggggtggtgtgacaaaacgaataataccactataccactatagtatagacatagcttggcatgcaaatactctgtagaggtatatctagttgtgttggcgaaccctttagatttacgtcatggtcaaaattatggcatatggcaacatctatctgtatgtttgtctatctatcatacataactaatattaattgattgctttcattgagctattaatgtgttcgttcatcttatggcaatataccggtagccaacgtcatggagtttctatacagtacatccacagattacctgtggatgatgcaccctagtaggagacgtcatgcgtaactgtgacgagcacgagggaaaggtgctcctcattctacgtgatggttgcatcctcctcattctaaatgatggttacaacatcattctacgaagacagtagggcaggggcactgtgaatttttttctttcgtgatgaactgtcggcaccagtcctccatttttttctcagtggtccacgccggcgcctttgacctcaacccaccagctgacgaggcagggtgtcaatgccacatgaggcagagaagcgtacatgagcatatgaaagcggcggcggtgagcgggactaaggatgggaaggaggaaaaaaagataggtttttggttgttgtacaaatctcaaagcgatcaaatagaccagaatttataaaatttagttttttttctaacaaaagccgcaatcccttataataattagatgtattagtgttcagcataacccacatcctgggagaaagttataataaaccttttgtagtgcaatgcattttgaagtaataaaagcaagtttaattatacacagttcttaattacattgcaaggcagcgaaagggtcatttgttgttaggtagagtacaaatcaggccaaaagctagcaacaatggagtgatatggaccgagctcagcacttcatcccatagggtccctcgacacatttcttgaagatggttccgggcggcaggcggccgtaggtgtggatgaagtagaacatatcgtccccacacccattgttgaggtcgttgagcaggtgttgtgtgggcacgcgatctccttgaacgcgtcgcaacactccgtcaccgatgccgccttgcacttctttcctagctcggtgaatggccccttcatctcgtcgaaccgcactgggcacatccctgtgttgtgtgccacatgccacaccatgcacgcacgcgttagatcacccatatatatcgccaagctattaaccacacatacatggacgcggtagtatggttcagggttttcaattttgatttcaccggaaatttcggtcattttggtacaaccaaaattcttgaaattttgggatttttgacaccttttggattgattatttaactaaattttaatctaattcgtagaaaattgagaaaaactgaaaatttcggtcgagataatcacttgtactggggggtccgaaattttgaaccaaaattgcaactactagtatggtcgattacctagcggcgccggcgccggcgcgttagcggcgcccatcagcttgcgcgaggtcaacttgtccgccttcaggtcggaggacgcgaactctgccgctggaatgcatgtccacaagagtgtgcgtgatcaatatgtgcaccaaaaggaaaggcgatatgtgcggagttagttattagctgatcagtatttatttatttttttgcaggagtcatgcatgtgctactacctgctacagagtctgcttcggtggggggcaattgggtcatcacgatgaccatggacaatgcgacgcagtagaaaatagtggcaccgacggaagaacccatgcctgtcaaatttaattacgagagaaaatttaatgggaggaagaagggaacgctttttattgattggttagtgaaaactgaccaaccatggagtgtttttataggctgtgaatatatggtgataaaatgtggttaatcctggtttagtgtctatcgtggacctcattgttttgagggcaaggagaagtagtttttttttttggcaaatacagaaacaacagcacctataattagtttgcagttctcgatggtttctaagtatacaatgaaggagattttaccatctttgagaagtaccaagcaccaccaaatcttgcttgctttagatggtgaagtgaaaactatgaagttacttcaaatgaagtaattgctaattgagtctattattaagttttcaaattgaatcattgctatagaaaaccctttcggtgtcggttgtcaaccccacgtgggtgtaggatttggcaatttgcacccgtcaggctgcaccgttgactagagtctcggctcgatttgtaaaaaaaaaaaagtggctcaacacgattcgagccaatgatccaaatccactaaaaataaatcgaaaagcaagtcacaagttcatcatagaaattaagccatgattggaattcctcaaaaaataaatgaaatagatacgcaacaaaaaaaaaatcataaaataaaacatcacagaaccaatattgaattcatcacatggatttggaaattcaagaccactcgctaccgctggtcaccgtgaagaagtacgatcacccactgccccgcaggacaactgctggtggcaagatgagagggatagaggatgggaggagggagaagacaaaatggggagggtgcactgacctttagcgtcgaggacgatgcctgccatggagccatcgccaatatgttggacattaagatataaaaagtaacctggacaaggtcaaggtaatggctattgaatgccattcaccctcagcttcgcactcttcccattgccatggacttcacctctgtagcatgagcatgtccaatgacaatgggaagagtgcaatcacaggcatcgcttcctatctaagtacacgacctcagggcccttcctaaccagcttcagtgaattctgcgccactggctcctgcttttcctcgtctcatttcctcttaccgtcctgttgccgaccggcactctccttgggctcctcctgctccccataagtggatggctcatcatgttcaagcaccgagcgctgcggctttggcaccggcaaataggggtgggcgttcggtctgaccgaaaaattcggtctcggtcttcggcctttcggtcatttcggtctttgaaaagtgaggaccgaatttcttccaaaaaaactcaggaccgacaaattcggtctcggtctcggtctaaccgaattttgacagagggggaccggctcaaacgcgaacgcatcgaatcccccaccgcagtctggctggagacggaggcgacgtggtggtggcgttgaggcagaggcgggttcgtggaggacggaccggcggaggcggcgtctgcacgatggaggtcgaggacggaccgacagaggcggcgccggcgtgatggaggtcgaggacgggctggcgcccggcggaggtggcgcgatggaggcagacgggcggagcgtggagggcggagagtggaggcggcgccgtggaggcggaaggcgaagctgcggaggtggaggcggcgccgccgcagtggaggcggaaaggcagagtcggtattgtggaggcggaaggcagaggcggcggaggcaccgtggaagcggaggcgacgcggtggaggcagaaggcggagacggtgtgaccgagccgagtgcgacgtgatggggagaggcggcgctgcgtgaggctggtgggaggagggattggatgtgtggttgcctctagggtttagtagtttattgggcttattgggcctcctaggcttattgggccaaaattcggttttctcggttaattcggttaaccgagggcaatgaccgaattacccgaataaattttggtcttttaatggccaagaccgaactactaaccgaatttctcggtctcggtctcggtcttttcggttcggttcttcggttcggtctttgcccacccctacaggcaaaacctctatcatggccaccaaatccatcatttccattcataggagctatgcaaaacctacccaagctgcatcagccactctgctctcacatcgcttgttcggattccacaccatcgctaacaaattgcactatacccaaaaccccacaaaaaaaaaaccctcctaaaagatcgcacaccaaatgaacaaatgcccattctctcaccaactccaccaaatcaacccaacaaaagtaagaaataaaccaaggagatgaaaggcacaagagccaaaacctcaccgttggcaactatgtggaaggtgacagcgacagggggagagatggacaagctcccgcactatgggctcgccggcgctggttcaggagacgggtcaagtagacgtcgctgcattggagaatacgcaagcagccaagcaggggaaacaaagaggagaagcccttatctgtggtggcgaggtgacaggatggcaagaatgaagaccgaggatactgatcattgatgctggggatggaaaggcaacttatgcggtgagacggtgatgcatcgtgcgtagggtgacaataatgtgggagccacgcgatgaggggaggagattgtaggacttcttttccgaaggacatgacattttgggaaaggtaggaggggaagggagcagatctgagatgttggatgtgatgcgttggatgattttaggatgttggatttgatgaatgaagtatgaagtatgtaggaccgtgttggtgaactatatggtagaataagctataccaatgtaagatgagtgcaattaagtcacttatttttcaaattgctcaaacgagtcacccattttgtttctgagatgcaaataacataaaacatatgttgtgtgggacgttaatcttctaaattagatgtcatattaatttctttcataaagatgactacaaataagccaatggtgtaatagtattgatagtaaaatctagtttaagatgaattcagttttttattgctaagcactatgcaattttgttgaccagaaatcatatgcatataggagctcatgtaagaatatggaatttaatttgcattttctaaacttgaaacttgcaaccttgttctacccatacggttcacaagtgcatcatcttataccaatagggtttttaatttagcaacaaatattccatgtgacatgtattctataatatttgcaccctcagcacacaagttgagcgatttacttgagcaatttacaagattaacgactaatgtgcactcaccttacaagttaaagttatagtaccaatggtacatgcattttactgcgtttggtatgctaggtttagacattctcttcttttcatggtggttgcccatacatggtccaacaaccggccaaccatagccgaaatatcttggtattagttgatacttaggtttgttgcggaatatgtggatgaatgtatgctatacattatagaaatggtagatgtatatatctaaataatgtaaaaatgatgtgaatataataatttgatattctttcatattgagttctaaaaattaaaaaaaaatgtaaatgatatgtcatatttgtatgatatttaaaatactctagataataattgcgagtgggtgatgatgcagcatacttgcatttgatttaatgtactctagataataactgctagtggatgataatacgacacagttgcatgttaaattttaggagttagtgaacatcatcaaattcataataagatagatttcggtttagggaccgttttggaactcgacgaagaaatgagggatctcttgcgaacgtttcctacctttgtggctctcctacgggcctactaatcggcccatctcagcagcttcctccccacgcctgcccacagggcccggcccggcccggcccacccaagggtccggaatcttcttctcctcctcctcctcacccctcacctcatccctccctcgcctccccaccatcctccgccgccgccgccctccgccctcgccgccgctccggtaatccttcctgtctactagatccgaccgatccccctcccccgccgccgtcgtattctgctgatcagcgcgctgtttatttttctctctctctttcctttccccgctttctctgatcgccgccgttttctgcagttggaatccggatcttccttcgtcgagggggtcgcgtcgcctcgccggcggccgtcgcgagcatgtgagtctctcacctgatcccgtccccttcaattttttctgtcttgcttggtagtcgatcggtcggtcggtcggtctcctgtttggttggaacggatcgggcgtgctgcattggccatgcgtttgggggattgattggttttgatttggaacgattcgggcgccatgatcgtagggggattcagtgaacttgcatcgcggttgctccgaccgaattttcacggccgtatttttctgtcggtggatggcttttgtgtcgtggggagttgcagcgaatggatgcgatgtagccacgcgtgattcttgcgaggtcgcagggcagagtgatatggatctagtaaaaaaagtgagagttttcctatctgattatctcgtcctccatatgtttttgtttatgctgtgctaattctggttgcccagcacccatatccaattcccatgtcattcatgaagcctagcattggctataattgattaggttccttctacatctgcattatgatgctgacgcttgaagttcttttgattcatactttagcaaagcacacctgcaatgcaaacacttatagtcttatgtgatgataccttcagtgcaaaacttattctgaagaccgaaagcatcaaactatggtgcttaccgtttcatagtttagcaaagcacattagcaaactctcctgtgtgctgttaacttagtaggaactgattctgaagattgaaagcgtcaaatatttatactagtgcccatgcagaagtcagttttgattgtttcagttctattgttttctaacagctggatatgaaagctcctcctttcatatcgatgtaattaagagagagtttaacacacacgctgactgccgatggggatcgaatgggtgtgagcacacactccagcgccttgccatctgcattacacctatacagcttctttttattgttgcggttttatcgttttctcatctttgtgcaccatgcgtggacacatcaagtaactctagattgaccaaaatgcaacttgcttgtttctgaaaaaaaggttgacttgctttaaactatagctttactgtgtacaatctcattagattaaaccggtgtatcatattttgcgtttgcatccatgttttatgcactggtggttaaggcgctattgggaaaaagagagtactgcataatattgtgattactctttccaaatttagatcttattgtttgatttattgaaatgcatggcaagtacccggtattgcatttggaaacttgtcctgcattttatggttttccatcaaagatatttgtggtagttatataacaaatagtgcgactttttgttattatattcctgagcttgtagccttgcactctaattcaggtcggatgaggaggtatctgacccgaaggcactcctagaggatcgatcgaaggctaagtgtgtgtaccagtggtatgaatatcaggtatatgctgtttttttttttctgttggtgaactctcattttgtttttatggtctatgtgcccagctatctcaactagatagcagtattaatttgctattaatatccaaccgatacatttggcgttttgtgcttagttttcaacttcacaatattaatgtatcagtactgttatctaaatgtagtcaatccgagcattatttggagaagctccatgctatctatattgctgtacattattgctttctgaatagctattcttctgcacctttggtactgctgggcctggatcttatcttatgctactctatgttgtgcacacagaaatgtgtcaagagaattgaagatgatgagactggtcagaagcattgtactggtcaatacttcgattactggaaatgtgtcgacaaaaatgtgagtgcttgttgccatatatacacttatatttgagtgaattgttgatccaaagaaaccacttgtctctattttctattttaaccttccgaaaatcccagccaactaagtgaacaggtatgggtacttagtactcacatcaaagagatgtactagccatgaaatgtcaatatctacttcaatcttgactggcaccttaataagatccaccaaaattggcgacctagatattctgtttttcttctgattccttgtggatcatggtaaaaactatcttgctcatgttggttatgttttaccatgcaggttgccgagaagctttttgatagcttaaaatgacaaggaaaatgttctctcttgctaccgtttacgcaacagtgagaataatcatatcgtttctgcgccctgtagacatgtcaggtgcttaatatctgtaagaaaaaaagttttgcctgtcggataatacgacagtttttcaaccgccactttacttttatttctgccagaggcattgaactctctacatctgggttcgtactgcgttattggctcatgctttttccctttcggttcataattgatatatccccagattgtgaatgagcacggaatgctgtcatttgccttttccatattgcttctgtcttgttttttgcacgtatgccagtgtctggatttgtgtatcgggttaaaaaaaccacgagctggtaataacgatttcttatctttggtgtctacataatccgagtagaatgctccaagatgttgtgattttgtggagtatatttcaaactgttgtgccatgatgtgtactctatgtgggactatgaatccattttgcacttccattattgactgttggggttcaaattctcgcaagatactgattgggttcaagttctcggatgacgaggcccatctggtatgtcatagaggaggctggttgaactgcttgcagcttgtgcaaatggcgacgcagcgacagctcatttgctgacaaaagagaccacttcgatccgattttcttcagcagatgtgcaacgttaaaccagtttgtcccaggtgaattctccatctggatgctggatgcgtcgcacacatattgtttctgacctttcccttcagtttcagtggtgtaacgttgtggatcatatggtaagtggccggtgtgccctgctcacacgttacaaaaagagagattctgattctctggtgctcgtccaactcgtgcgatgatgcacgctaacatctttcgtgtacgacagtacgaatgaaaatgccaggacatggacgctgccgaagctccttttggcagtgcgataaggtgtggcaccttttaggtgtttgggtgcttggtttactgtttttcatttttgatctaatttgcattgtattactgtgtgtccaaagagtgaaaatgttgcgagggacacgatggtaggataacatacatacattcgtgaaacaaaattttgagcacaaataagggctcaaatgttgtattgatcatcattgttgttttgtttcacaaatgttagacaatatacgttatccaaccattgtgttcttcaccttagtggagtcgtgcaaccactactagtatacatcaatgctgattgctcggctaattgcatcccataactgtgaaagtcagaaaggaattgaagaagaacaagatccgtgggaaaatcaaagacggcttatgtgctatcctccaaagtgagatttcctacaccattatttggtagttttgccacagtaccggaatgtccctttcatctgaaaaggcaggcaggtgccatgagcaattgaaaactatcaccataacacaggccattttcccttggtcagtagcttgattggttaactgggccgagatctttttgttaaagttttaactcaaccttttcctttttcaggtgcatgttttcaaactattaaaaagtacgtttttttaaaaaaaaattatatatgaaaattgttttaaaaaaccatattaattattttttaaaaatatctaatacttaattaatcatatattaacgagtcactccattctacatgcgcgagggatgagttcccaccaacaagcaacaaaattagcctaagccagtggtgatcctctcagttgttctgtattcacctcgctattgtatactacttcctctatcccataatataagagattttgacattttgcttgcactgtttgaccactcatcttattcaaaaaatttgtgcaaatataaaaaatgaaaagatgtgcttaaagtactttggataataaagtaagtaaaaaaataataattccaaattttttttgaataagatgaatggtaaaatgttaaaaatcctttatattagggggtgaagggagtagcttttatgatgacatccccggacattgctattggctaatgcaacttttaagcatgcacacactgcacctgctctcagaagtaaccattctattcatccaataccggagattatgatttgtttcaaggaatcccatgttttgtggtaaaatgtttcaataaacctcatattttattttttattgatatgattattttgacatagattcacatcagttgactcaaagtagacatcccatttctactcatctttttttttctcaattttgcactacacaaaaaattgtcataatcctaacctgataatgataggataatcggttaaatatgtacgtaaacaatcaaacaacgatgtgataatgatcaatgcttgttgaaaagtatatacgtggatatgcacttaaaaaaatgtcattcaacttttttcattaattatagaaaaacttattagttaaatggaacaatataaacttcgtatccaggattttatgaaatattttgtcccaaaatgtggggttccatgaaacaaattataaaacctaaggatttgtgtcatggacaccccaaaatttggggttggggttttgtgaaactccctcttgaagaaacgttggaaaaaatgtaggaataaccatttgaatgaagcacagggaaaaaaatgcagggatcagaaaatagagatagaccaaaaaagatatttttgttcctaagaaattagacttcatgttaaaatttctctaaaatcccttttttttttagccaatccaaagggaatttcatacaattttttgtagctatttcttttatccaaatgaccacatatgcgtaggattaaaaacctccaaaattcaagaatcctttgttccaaaggaatctttattccttattttttacccatcaccatcctcaaaaaacttatggctcctttaaattaaaggaattttataggaattctagaggattcaaatcctaaggaattttttcctaagtaggttattaggagcataggattgcatattgccaaattcatttggagtgcattcctatacccttaagtaaataaggtcaaaccccattttatttttcctttaagaagttcaatgcatcttctatctttatctctcctatctctctctaaaatccttccatattcatgtgttattttcctttcagctctccagacatatcatctttcaattttttttgtgttttcaatttctacgggattcgtttacattgcattccaatcttatgtttttttctattatcgtatttaaaaaaaatcaaccttccaaaaagtagcccttaacttgaagaacatcagtatatttttaatgaaaaagtatattagatacgtaagaaaaatatggtagatttttcttaaatagtacttgtagaacattataatatatcattagaaatatcaaatagtttacaatagatagtagtgttcaaagtttttccggtaaggtatgggatataccataggttctggaactgatgaatggtcacaaattagtcaaaatttgggaaagagttgcggctaagagcaggtacaatagcagatgctataagccaactataaatacatattgggaagataaaagaaaagagtgaagagtagtaggctacatatttataactagatgcagcacggactctaagacacaatgtttgtatgacagatgagaccatgtattaatagtgtagtatatattcatagataactattgtatgaattggctattaagttgactataggtgatttggagctaacagtaggctatactattaaacttgctctaaagggtgtattcgagacgagaggttgggaacctctcacatgcacggaaaacaggataaaagattagcacataattaattaagtatttagtttaaaataacttaaaatggattaataagtaactttcctatagactttctttggaaacaattttagaaagtgtgcgcgtggaaaacaaggttgtaaaagttgagaaaggatagaacacataataatggaaactagggtgatgacatgcaaaaactctagtttcggttgattaaatcggttgtaattgacagatctagtacttgtcaccctctaaactaaaataccattcacccaatgatctatagattaaagtatcttccctctgttttaaaaatataactatatagatttcgtagtaataggatacgtctcatccaactaaaatctcttatattttagagaggttttacagtgtttgtgaggtacttagaggtattaagaggtagagtaatatgcaccgttgatcaaaagaggggcaatgtatggaataaaaattatcataaccaatgaaaatgaagtaattaactagtgaaatattgccattattgtcgaatatattgaataccttgcttcgttgatcattactgtacgatagagaaaatgtaaatctacctaggcatcaattagatctacacggaaaaaaaatcaggttgtgtcttctttctcgtctcccacatcgctttgttcttactagggtttgaattggttcactagaaaaaaaacaaagggagaactatcaacatggttgaggattgaagcggagatgaggtcgaccgatcaatggcaaggcgaagcgcatccgctaagattccatttacacagttgattactgatttacatagctcacaatttcattcagagttctcccctgttcttcttccagggtttgaataagtgcactcgcaaggagacacggtcgtcatggttgagtatttgtgcaatctacaacgaatatatctctggatatttggcatgtggtgcggacgttgcggcaattgcatgccttctaaagtggcatgcaatccgtggatgcatgcatgcacatatatgcccaataaatggacatgcaatcgggggtggtttccattttatcatatatgaggtaaatcagggagatggttattttcaggtcagtattaaaatctaagtgtatggatgacattataaaataagttatttaattccctaagacataaaattttgttaattagtgaattctacaaaacttgtaaaaaacgaaatgaatgattactgtgcgaatctattcttaaggaaaaaatgtaaatctcaaaaagaacacgtaaataatgtcatggagatgacaactaccagtaccaatgcggtacctatataccaagaactagacaattatacccttctctatctactagaatattatctttttacccttactacctaagtacatgtgccaatattaaaatactttttaagtggtaccttttattgtggagcgtggatctttgcctttttagaatgcaaacacagtaaaaccggaaaaaattttggtgaagaccggatgtaaccggccgcatctatagccctgctccggatggatgccacgtgaatgacctaaggatcaaacggttagctcggcccggctcccggcgctgcgtgacgaggacacacgcacgcagcttggctccacgagcaaccgtgtctttcaggctctccgtcggcttgattcgacacatatatatcgcgcgcatctcctttgcctggtgagcagtgacctgggtcttcctccggtgctgcagggatcgtcatcttcctcctcctccagcaccgcggaaaccatggccaatgtgccgagcaccacggctccaccaccgacattgcttctgaccagctagaggtagaggctacagcgcttgaacaccgtttagactcgaggagggtcaggtgctgtcgccggccgcttctccatggcatgagaagaaaacatgcaaattaaaacgcgctgcagggtcatcgtcgaagccgtaatcgatcaaaattaaagtgcatccaaacgcgccgcggctcaccggcggcggccgcctggaacgggaacggagaaagacggtcgtcgatgtagccgatatccaggcgaagagacgcgatatgtgttgaatcgagccgtcggcgaggctgaaagccgcgtcttcgctacgcctggagccaagccatctgcatcctcctcgcacagcgcctagagccgatcgggccacgtgacccgttcgattcttagctagtccacgtggcaatcatccagtgcggggctgcagatgaggccgattacacccggtctccaccaaatttttttccgtaaaacctctatttcttggtactgagagagtaccacttaaaagacagaac

SEQ ID NO: 15276 - DNA, 4256 bp, Oryza sativa
tgcgaaaagcagacagataaaatctggatatcaagatgggatagatggatctggatttttcacaattagatccttttgaaaaacttatttcgcaaatagacccctgaaaaaacttatcctagaaatggtcccttttggggcgccagagtggccggcgccgtcatcaggcgccctcctcctgccacgtcggttcgcgtacgccacggtggcaggaggacggcgccagatgacggcgccagccactctggcgccccaaaaaggaccatttctaggataagttttttcaggggtctattgcgaaataagtttttcaaaaggatcaaaatgtgaaaaatccagatccatctatcacatcttgatatccagattttatctgtctgcttttcgcaaagattgtacaaaactaaaatattcagattggaatggatgatcgggctaaactatcttaattacttccttggttttaaattacttatcgttctatgttatactgagtcgaacatgtccatctttaactattaattcttataaatctgtgtagtttaataccatatgaactgtatattataaaattatttctcatagtgaatctaaaatataaattttataatattaaactgtatgagtttagaaattgatggttaaagattaaaatgtttaacgtaagataaatatagaacaataaataatttgaaatggagaaagtatatattattgtaagatccaatgttgttcatatctaatcctttacccaccgcattgtatcagctacttcattcatgcattgcttgttcagcaaatttaagttgacatgcacactttaaaaaagattatccttccaatacttgtgacttggccaacaacgaggaggagagcaaatggaggataaatggagacgcactcagcagtttgatggtggctgtagctggccccacaagctcagaatttcagctaaaaacgaatggatatagccacattacgtgcaggaaactaataacgactgtcactaatcatgagtgttactagatcagaaggcaacagagcaaccaaataatgaaagtgatagatgccattagaatttcttctttttttttatctggcatttcaatactgcaaaataatgtctgattgttagcaactagtatatattttataataattgctgtaaaaaaggccacaatcctaatattagtagacttcaattaaaaatctacacgttggggtctcatatgacaattgtctccgaaaaaaagggctaatcttgctcctaaatctcaagccatccctctgaataaacaactaatattaacatgcaaagctaatccaatcagtgaagcatatccagaaaatcatctgcttttgttgagctttcaagatcgagtagtccaggataacgatgaagtaatatattagtgcttgcaaagcctccccagtcttatctgatacttgttgaaagattgctctttttcgctacttgttggcaggtcaggatctcaatgtggatacagcacgttgtgccaactacggcctagaagattgaggattagcagtaacccactttctttccacattaggcctaattaaacttttcaactcgcttgactctagacagcgaaatctgctgggagcctggaaaatgaaggtatgactgtaagaggtcaaagttactactaccaagttaccatcaggagcagtaaaaagtttcttcttgaaaaaaagatgcaaaagttaacttccacagttagacgtacttagttttttttgttaaaaaaaaactgatctggccacttaatacaaagtaaagtaatcatgtcttgcttgcaaccttccactttaattaaaggaactacggctaagatgtggcaggcaggtgtagcgtcagtcacaatctgtttcccttctatcactaaggccttgtttagatctcaaacaattttaagtcaaaaacatcacattaaatatttggacatatgtatgaaacattaaatatagaaaaaaaacaattacacagtttgcatgtaaattacgagacgaatcttttgagtctaattacgccataatttgacaatgtgatgctacaataaacatttactaatgatggattaattagacttaataaatttatctcgtagttcatacgaggaatctgtaatttattttgttattagtctatgtttaatacttcaaatgtgtgtccgtatacttcaaaaactttacacccaaaatactaaacacaccctaagtttcagcaaagccagcaaagcaccagcagcatctgaagttctacagattttacagtctttgcagaagcatcgaagaatatagcaaatggaaccatcacatcaggtagagaacagaagaggtaaagatgatgcaattttcatcccatcaattttaacttaactgtaatatcctgacgataacaacattataagctgcactgactgcataacgcattattacatacagaaggcatcggggtacaacacaacgcattaggagtactaacttcaggccacgacaacaacacaaagctacactgcaacatggctccttgttataatatataagctcctcttcacttcttgtggatgctgcagaggcagttctcctcgcctacgtctttggcgaggcagggaggctggcatgatccgtcctggtaccaggtcgcccgcttctccgtcagctcgttcaggaagtagtccagcttgtcgatggtcacactgggcatcaccacgacatgagcgatgttgccctcgcaggcgagctgccacctccggacgaactcctcgtccttgggcctttcgaacaccacggtgctgctcagctcgttgagcatggcgccgattccagcttccttgaggcggtccttcaggtagtgagcgttcctcaggcacttctggacctccttctggaagcccctgtagcctttcctgttcagggtgtaccagaggaagatcggagcatggccgttcctacttcccatgatcgtcgcatctcttgatgccagatattcaacattgctagaaagacgatttatgtgctccagtcttgttatctggacaccacatggcatgggacatcctacaaacttgtgcccggaaacgctcacactcccgataggcttcttaaatgataccttaggtgcctagtgaacaaatttacatatataccacatcaggggaatgaactatttgaaaccattaaggatagctgtgcaacagataaggcacaggagggactcagcgggaagaaatggaaattaccttcttgacaaatggtatcatcagtccaaaaagagcaccgtcacaatggatataaaaccgatctttaaagccaccttcttcaagtgttttaataaccaagtcaagatcatcgacagcccccttaacagttgttcctgcatgttaaattcgttttaaaacagtccatatgtgctacaaaagcactaagctgggacatggaggaatgagaccaagctcaccaatgttaacattaataatggcaggtttgtctctgtttagcaataactttctctgaaaatcttcacaatctatttccccagaaataagggtgtccaccttaacacaatccatcctatacatccttgctgccttgaatactgaatagtgagactcacgggaagcatacaggattccatcagggaatacctctctcctgaaaaacaatttgttgagaaagattcagtacagattttacagaaatgacattttgacaggaaaaaatgcactttgcagtcaatagaatagggtcttttcgactactaacccaacaagaataccatgcaggtttccttctgtgccacagtttgtaatgtacccccagtactcattcttttccaactcccagatgcgagcaaaccaatccaatactcccacctcaaactgcctggaatgtacaccatagttgctctcgatgaagggatcaccaaggttgttgatggagaagtgttgcagctggccaagtgcaccatagtcgaagtccaggttatacgggtaaccttcatcagaacaaatggacatgtgagattagcttccaaaggaagaaggattatgtgatatttgaatgggtcaatttatcccactggattccatgtttatgtctatgctacccttttctaattgatgaattgttcacattacacagtattgtttttattccgaaaacatgagttgcagctagcagcaagtgattgagttctgtaatcctcagaaaattattgactagagatatgg

SEQ ID NO: 15277 - DNA, 583 bp, Oryza sativa
accgaacacccagagaagcaagtaactcacaagttcgccctaatacaaatcttgtatatctacaattacgccaaacaccacaaaactaacctgcataataataatgcagccaataattattgtctagtttaaaaatcgtacggcgtgacgaagccttccggccggagaggcgcgaggaacggccggaccggcggcgtggcgaacagcggctgccggcacgtcgggcaggtggagcgcgcgaggagccagcggtcgacgcagcggacgtggaagccgtggttgcacttgggcagcacgcgcacgcgctcgccgggctccaggtcggcgaggcagatggcgcacgccgggctcggcccgcccgccgccgagtacaccatcgtcggcatcgcccgcagcgccttccgccgcaccccggcggcctgcgccgccgccgacggacccagctcgccgtcatctcccgccgccggcgacgacgacgaagacatcatcatccggccgccgctcgagcaccggagcgcgcaccgcacgatcgagttgagccccagcgcgcagatgagcgcgcacaggagcacggccaggatca

SEQ ID NO: 15278 - DNA, 16092 bp, Oryza sativa
gcactgtttgaccactcgttttattaaaaaaatttggaattattatttttttgacttactttattatccaaagtactttaagcacaacttttcgttttttatatttgcataaatattttgaataagacgagtgatcaaacagtacaagcaaaaactcaaaatcccttatattatgggacagagggagtatatagcaaattttattaaattataataatacaagaatagatgaaaactaatatgttgtgttgggaacacaaaatctcaaactcgtatattatgggtcaaactacataggtaaaatctcttacattatgccacaaatgagggagaatttttttaaccttttaattttaaaaataaactctccaaaaattagttctaaatgtgaagatattttttaaaaagaaaatcaaaaggttcaaaattaatgaaaattcacctacctgccacctcactctcgtcgacgtcagatcactggtgcacgataacgtccgagaatcaaaatatcaatgtgttttcactcgagattttggtccacgtgcttttctgttgttttacatactctggcctgctagcacaacatatcacaaggaaaaaaaaatcgtatcctccatttcaaacaataagaggtgcatttccaaaatataataacctacgaccgcacgtactataaatctgggataggctaaaaaatgactcatcctattctagattcttatattttgtaatggagagagtatattacatttaaactgtatttaaagggtccatggttttagtctaaagaatatgtgtttaattctcaacagactcatatttttttctaattatttgatagccaagttttttcttggttatctttaatattacactttgatggttaacttgttataatgtattacaaaaatattaacatcatatggaataatctcctaatatgatacataacgctgaactacatacacttatttagcttaattattacaaattgttgactttttaaaatcatgtgcttgacagggccgaaccgaagacggaaaccaaatctcccgtgtcgctctctccagggcaacccgggaggcgaggcgaccgtcaccaaggccagccgttcccacgcgtacaccgcctcgtcgccaccggcgacgctacgcccgttggggcggtgccgccgccggcgccccccctccccccacccaaacaccacgacctccttccaccgtcgccttcttcctttctctcttttccttttccacatccaaaactcttctactcggtgtcttgtctcccagccctgttgcagcctccggcgacggcagccggccgtggtggtgggtgggggatccgcctcctaccacgctcctcctccccttcggtcccgtcggagttggagcttgccgacggcttgctgcttccgccttctggcgaggttgtgcggtggggatgggccggacggcttgctacctgcaatgtcgtgcggtgggttgcgactccgcgtgtcgccggtggccagattcaccttccccgttttggttggatcagcagcgaccgaggggctgtgtgtagggcggcagtggatgaactcgggctgctccactgtggagtcgttgggtgtgtgctgccgatgtggtcgccttagtgacaacgctgccgtctttgccaatgtctgctcaattcccttttcttcttgtctacccggcggttggaagcattttgagccttgccacgaccagctcagcccaaaattgcatgtctaggagttcgctggtgcttgttgcctcctctaaatctcctcaattctagcatgcttctcattcgtttacttgggtctgtcttttcgttggcacacatgcttctccagcggttgtgatgctcccgatctaggttcttctctcatattgatgttccatccaccagtaagatccccatctgtttcatttctcttttgttcagcccccggatcgccttcaccctctccgcttgggtgtccctaactgcaatgttcagcggcccttcctcctttggggcttccttccctcgaagggcgttaaactggctagcaatttgttaaagcccgattgaagacgacttcttgagggtggcctatgaccccatccttcagtggcctagcctcctttggggcttctttccccaattgtcgttagtgggcattgattcaagcagcgacatgactaagtcgtatttctgacggcttgatgtggatggtcttggataaccacagtctttcgactgccagagaaccgagccggcatgcgcgtggcagtgatgccctctggcaccttcgattcctggtgtttcaagtctgcatgcgaattggatgatgtcgaattagggttctagcattagtttgatttggaatttggttgggtgttcttgcaggtggcaaacgtcaaagcttctccgcttatatctatgcatttgtgtgtgtacttagtagggatgttgtgatgcatttgtattctcttctctgtatatctccgtgtattttttttattatcctccagcgcttctgtgcttgcgcagacgaatctgccctgtgtaagatcgttggaagtaatatattcaggtgggcattaattcgcccctagtgaccagtaaaaaaatcatgtgctttcacattttaggagagaaaaagggagagtatataacagtatagtaaacagctaagcatctgtgaccgaatattttgggacatagggaatacgcagttaggcatgtgtgcgcgcatatatgcggatgctattccagaatattttcgaattttacttagtaccaaccaattttaagctgcctagattttaacaacatagcaaataaaggaagcatcctgcgaagattttggtatatatgttgcccatgtgtttctctcccatggacatgaatacttttaattaacgtcaaatcaaacaatcaactttaactctacattctcaaaacgttggttaccagttttggcatgacatcaaaaaacaaaatggcccatcatgatttttttttgcctttgtttcttaggcctctcaagtgctcctagctggagcgttcatcagtagtgccacggaggattcgcgtcgacgtggagcgggcgaccgcgtcttagataggtttctcgcccccaagttgagcgacgcgaaacttcgttgcggcgagggcgcgagtggaaggggaaaagcaaggcacgcgcgctgtgggcagcgtttcttcgctgcctcgtgccctcgcgagcctgtgggggggtaaatccccaaatcaccctccaaaatccccacgacatcagagatgctagcaatttcagattgaaaaaacatccatctcgaaagaataatcaagaatagaaacagattgaatcacaattattcttcattaaaatctgagaaagagaacatagatgataaaacaagaaagcacaaaatcctttctctttcccagccggcggtggaggagctggagtgcggcgaagaaaccaagcagaaaacacaaaaacgccgccaagaacgctgtcgaccgcgcgccctttcttgacccgccaccaagaacaccgaggacgagcatgccctcctcccgaccaccgccttggccaggtcgatgccgagctccaccgccacgcgagcggccgacggcgaggcgaggcggcgccatcgaccccgccgccctttcttgagccgctgccaagaacgctgaggacgagcgcgccctcctcccggccgctgccttggccaggtcgacgccgagcggtcggcggcggcggctgccgcgcaccctcctcctcctcgcggcagcggcggttgctgccatgctcgccgtgtccacgtgcttagggtagagagcggtcctcccatcacggtcgcgcgcttccagcggatggagtcggtggagaggaggctcggcggtggaggggaggattaggagcggcagaagaggaggaggaggaagaaacgcgaatgaatcgagaggaggggaggataggagcggcagaagaagaggaggaggaagaaacgcggaccgctcgagggtagttgaggaataaattcgttccgcagacccgtgtccatgcgcttggggttccgcccactgtgggccctgtttccccacagtaacttcatccaattaagccacacatatatgggtgtttgcactgtggggtgaatgtatttggaccaattttttgaactaggggtacgagccccatagcttgcactgtgagaggccttagcattagcaactgaaattatgttgccctctaattcacggcactatatacttactgtacctacttatgtacctacatcttaataaatggcacgctagctaggatgtgtatatacgtgccctcaatctactatctctccgtcctaaagtatcgattacctctgcgttttaaaatatactcctcgtctctgacacgatgtcgttgatttttttaaacatatttaaccgttcgtcttatttaaaaatttaaataattattaatttgttttctattatttgatttattattaaatatacttttatgtatacatatagttttacatatttcataaaaatttttaaattagacgaatagtcaaatatgtttagaaaagtcaacggcgtcaaatatttagggatggatacagtaaaagattttgaatggatattttattatatattttaagacgaaatgagtatataacaatattagcgtgtaatgaagtaccgaacttttgtgtaagcggagggagtataggattataatgaaaagtacggcttcagcagacgatttacttaaactctaagcgtacgaatacgattcaggctgaaaactaaaaagatgttttgtatagctgcccttgatattgagtcatgtatatacattgttcgattacaactactccattccaaaatataataattttagcatttggaattgatcaaaaaatataacaatttctacactaacattctattctcaactaattacaacaccctccactattcaatttttacatatttaatttcacctactttctcaataactgtgttcacctttaaaaattcttatccaattacaatcttcacatatttaattccacttactttctcaataactgtattcacctttaaaaattcttatattctgggaaaggataatactagattactttctcatcataaaatatatcaacttttaacatttataatctatttcaaaatataacaacttcacttctccaaaccaactataaccatctctaatttattacttcacatacgttatcatctcaacaaatcacggtgattatcaatttaactttcacagccaaataaattatacttacaaagtagtactttttaacaagaaaaatgtttaaatgtcattctaaaagttagggacggtatggtacgtcgtatatttattgtaagttttttttaacttttaaataaaaatatgatataattatactacaattacactataaatgtactataattacagtacaattatatatataagttgtatgtaactaataaaaacatgtgtatcttattcgaaaaaaaaataaaaaacctgtgtacgatcgggtggatacggctgatgcatctgtacgggcagctaccgtcccaaaatacggagtataaagaacagggcgaggtggaagggggtactgatcgtataaacattcgtatttaaaagggaattaatagcttggaacgtacatacgttaaatgtaggcagccaaggacgtacagataccgtcccaaaatataaagaatatgattagagatggatatgaagaaaacatgtagaattatattgaaaaatattatgagtggttgagatgatgaagcatatggagaaattaaacagagaaaaaattgtgattgattaaaaagagaacatagatagatactacctccgtattttaatgtatgacgccgttgacttttcgatcaacgtttgaccattgtttttttcaaaatttttgtgtaaatataaaaatatttatgtcatacttaaagaacatttgatgatgaatcaagtcacattaaaataaatgataattacataaatttttttaataagacgaatggttaaacgttgaaaaaaaagtcaacaacgttatacattaaaatatggagggagtaagttattatattttagaacaaacttttgaacagaggaagttgtctatatactactataaaaagccactagtggtgatggtggctggttttgttaccaccacttttatactgtttacatatatttatcgatactgtacaataatttaatatttattttgaatcaaataaagtaaacaagtaataccatgatatttgataagaaatactccctccgtattttaatgtatgacaccgttgactttttaataaacgtttgaccactcgtcttattcaaaatttttatgcaaatataaaaatacttatatcatgcttaaagaacatttgatgataaatcaaatcacaataaaataaattataattacataattttttaaataagacgaaatgtcaaacatttgtcaaaaagtcaacggcgttatacattaaaatacggagggagtagtatattttgcttatgctattattatatatatatatttttcttttaaccatagtaaagtatgccattttgttactccctccatttcatattataaatcgttctatttgttaatttttttaagtttggctaagtttatagaaaaaatgacaacattgacaacactacattaatttcattaaatctaaaattaaatatattttaatgatatatttagcgttaaaaatagtactatgtttctctataaatttaattaagctaaaaaggtttaactagttagaaaattaaaacgacttataatataaaaatcaagggagcaatacagtactccatgaaagtaggcatgagcaaaatcagtcacatggatggaagtacagtttggtttgtctttccttggcaaggtaggcatggaactcgtacacatggatggacgtacagtttggtttgtctttccttggcaaggtaggcatggaactcgtacactcgtactaaagtagtaataataaaattagtagtacaagtagagtagagttgtattttctttatttttaaaatataagagattttaattggatatgatacatatagtactactcaattttcaattttcagtacagatttatagatttatagtatcaaagatatgtctcaactattcaaaatatcttatatttaagacgtagggaatatgtgagaccgggggttgctgttggcgcgcgtgcgccggcggcacgcgcgccaactgcttccggcccatcaagcccatcaaaccatcagccattttttccttttctcacgatttgtttttcctttttcttttgcgatatttttttctttttttctgattactttttttaatctttagcacacttattttttaaaaaaaatgttttgagctgaaagtttttaaatcttaaattgaaaaatttttaaatctgatttgaaagtattcaaatctcgagttgaaagttttggaatctgagttgaaaattttcgagtctgagttgaaagttttcaaatcttgagtcgaaagtttttgaattggactcgaaagttttcaaatctcgagtcgaaagtttttaaatctgagtcgaaagttttcatattttttcaaatcttaacttaaaaatttcaaatctgtacttgaaagttttcaaatctcaaattgaaagttttcaaatctgagttgaaagtttttaaatctgagttgaaagttttcaaatctcaatctggacaaactttcaagtccagatttgaaaaatttgaaaactttcaatttgagattcgaaaactttcagatcgagattcgaaaactttcaaatcaagatttgaaaaaaattgaaaattttcaaatcaagatttgaaaacattcaagtccagattcaaaaattttcaactcaaaatttaaaaactttcaaactcaagacatgctaaaagattaaaaaaataatcagaaaaaagtgtgaaaaaaaacgaaaaaatcggtaaataaaagaaaaaaaaaggtgggatgacgcgagcgcgcgtcggcgctgggccctttgggccgaaacgcgcaccgccggcacgcgcgtgcattagcgattccggtgagaccgtgagggtgcagggcacgaggagtccaggatcgagtaggcagtgttgtgaaacaaatctcttggagataagtttcttgtgggccaatccgaaccggagtagagataagatctatctcctcctaagacccctatatatacaggggcagggtgtgacatctatagctgatggctggcttgtacttcagatgagatctataatgaagagatagctccaccctatatctatgtttattgtctacttctgcaatgttcttgagtgcaaagggatgggcgtgggtgttctacatcatctcacgcctctactgctgtgggagggacagggaacggatccggtgatccgctaataggcgcgttggtttacaacatgttatcagcagctctccgttcaccggtttgtcgttccaatctgttgttgttgttgttagattaatttctaattacagattgatctgctatggtattgcttttgtctacagtaccatcgacgttgtcgatctgatcggtcgtaaactcgtagccacgccgccttgtgtgctcgtgcggcagctgcgcggccggccgatctcctccacgccacgtgcacgagaggaggcgccgcccaggccaatcgccaacacagcgagtacgtgaagcgatgtggtccgctgcaccacgcccgcagtcggcgggcatacgacgcgatttgcgggctctccacgtacgtgcatgcagctgcggcctgcgggcacgcctcggaggcgtgcgcaccgccggcctgggagttcgaccgtctgacattggttcatgccatcgatcggttgtgtgtgtatgcacgccggtcacaaggaccaaacggcgagccagccgcaaaagcccagcgcctcgcatgcatgaatgaattggtttgcatgcacgttggacaagcagatcgatcgacatgcatctcacatctacttagttgaagttaatttgttgatgctaattaaagattgattttttttttgcctgtttacatgtccggccggagctacgacgcgtgcggtcgtactgaccacgcgcacacatgtgcccaggactgcgcgcttggactcgccagatggctggccgcgtatgtggtacgcgcgcactacgcccagtaggagccttgcgatgcaggtgtacgtgcatatttttttggcgagcacgtaaactgaggtaattagtaagattagtttctaaactaatttactaatatatagatgcatccgggcatgtgtctattaaggtatgcggtctatatatatgtttttatgattgattatattttctcgtttttatcatattatggatgctttgcttgcagtagatttgatcctgctcttgatctagcggtagattaatttcctgcttttgatctatatatgcatctattttatttgatgaaaactagagaaaaccgtgtgagagaaatcactaaaattgatgggaaaccctagactggagacgtacctaattcggctaggccaaatcggccgtctcgcccgcctccctcgcatctctctgtttctctctttctctgatgatgccacaccgggaacacggtgacataatctcagtccgttttgctagacttggagacgtgtaaaccgtcgttcgctgtcgctgttgggtatgccgtcgaccttgtgtcgatgccgccgcaggaaaccgccgtttcggagaaagccctaaacccatgtcgttgttgccgctggagttaatgctgaagcgatgtgccgccatcgttgacctcccatcaacgctgccgtcgagccgtggtgggaggatgatgggtcgtcgcctgcctgctaccggattaacctccaccgagacgatatggccggatgcaatttggttgccgttgttgaggtctcagttgccgtcgttgaattcgcctcgccgccgtcatgaggatgcgcgggtcgacgcgaaactccgtcgtgtgccaccgagccgccaccgcaccaaattgccacacgggagtgatgtcgttgccgccgtcctgccaatcggggtagtggatgggtcgtcgatgacctcctcgccgtgcgccggcctaaatcccttcaaagtcgacagtcgacggcctccaacgccgccgccgtgcccgaggggcctgtgtgccaggaggtggacgccgttgcggacaatgaatgggaaaggggaaaccctaattccccccttccctctctcggtcacttaggcgaaccggctgggtcggtctgccttcgccataccgaataaagcccaatagtaacgagacagcccaaacaaattaataaaaataataaacctggaaatcctcatgggcctagagtttcggaaattcggcccattaggcattttgggctacactgtgcttgctagcccaaataagatcgtggcctgaacggtaattcggcctgattaatttcagtttattgacaacttgcgtttaagcccccggagtgttgggtttttatgctatagttcactgtttaaatgtcttgttgcttaggccctgtatagtttggttttgcatgtgggtcttcggactcgtaaataaccatgtaatggtgttttttaagcattgctttgcttttaaaattgatgcaattccaactaaataatctagagatggttctctaggttatgatgcttccataaattgtgttcacatagtgtagaatcccccattggaagcattatgatgggtttattttcctgcatttatgtgtgatggttttctgtgtggcataaatattgggaatataatgccaaataagaccaagtaaataatagaaaatcacctaatgcatggaaattctgggaaattaaatatccatggctatggataagaccactctttactgatacactcctccatacataaatggtgatatcgatgtgtctacaagatggagtcacgtatacttgttgtacgagatccatgcttttgccgaattcactgtgcaaatcgtccgtttgcgtgttgcgttctctaagaaccgcatgaaacgattcggatgatagtgtgggtgatttcacgtaaaggccctcaatgactattgtctggctttgggcattaatgtagatcactctatccctatgatcacactcaagaatgggattttgagtcgttgaaatatgtggaattagacaatgtgtttgggattcattgtgcctttcctctagtggcttaacatctcaatcagagtatggtcggactacggtcgacattttgctttcccaatggttgagagcatgcttttctgatttggagataaatgattatacctcaatttctggcaacgtggagttgcgaggttcaataatttgagatatttttcactcggtccggtgaaagatgtaaagtgttttccatgtggtggaacgacactgttcatatggttgcccctggtgtgcacatatcttctcaatattatttggaacctattgtcttgcgaggacaccggaaaattggaggcaaatctagcggaataagcccgagggtagatgctgtgaataggcgtgattcccactccactatagcgtcaacagctaaacttgggtgttgacccagtcttgtcctcgcgtggatctagcgctaatgaccacctttggttgatgtcgatggttggtggtgtctgtctaataagttgttctgacaacgggagttgtattgctagttttgagcatgtcctaggaggacattggccgctatactattgccaagcagtttatcttttgcttagtttggaactttgcattagatcgatatttctcagataaataacgttcttggtctttcatgttctattctaaagcttatcttcatgctggaattgataaaatgctttagtttagaagaacaattagtgtataatccgaggagttacaaccactcacacagtccgatgtaactgtatttcagacaaatgttggctatgcactattgcgttttatcgcgctctcgtagtcgatgactactccctagttgtgttggttgatcatccacgggttgatgaccatgcttgtcgcacactggcgtttttcgcttgtggacatgtgcaagcgatgcaaaggttcgtcgtgttgcatgcgttgagctcgttatgccaacgacggttgcaccgacacattccactatttttgtggatatgtctgaatataatggttttattatgaatattaccattgtcagaggtattgattatctcttgatggctatgtccaggggacattagcaaatgtggtttgataattcgctcatggatcgtacctaatacatgctgcttaactatgacccaattctagagtttggtatgagtaattggggtcaaacttgggcattaaacgagatggactttaaaacaactctgcaccacaaaaatcttcttggcagcgcaggctagtggccgcgcattttgctatcatactccttgttgagcgcatcagaatgcgttttgccaccataggttgccttcttaagcatatgacatgcgatgtctaacgcacgtcgatccggaatcgattgtgagtttgagtggcactaggtgagcattaatccatggagagtgcatttggctaaagtatttgcatgttggttgcatatacatttggtagcaatggtggtttttgcagacctgtatatcctaactaggaggttggggataacccttcggaagaaggaagaaaacagtattcatgccactgtattggtatatgtccaggctcactgcatataatggaaaaatctctcctattaaagtgtgtaatatttcccaaatatatcaccaccgtagcatacattcgtgggagaacatttgtgatcgaggtgaaattccttaatcctatgccacgatatggggattggtagtatgctattgtaagatatctcggcattagggggagagaattgcccattttggaatgcctggagatttctttgagtgaacgcactaaatgagctgaacttgtatgtttagttcatactcctggttgcttggtgcacggaatttttgccaacaaaatcatatgaggaacaactagatagttgtcaaaaatagtaatgctcccaattgtggtaaatgtggatagacccgggaataatatcgtgtccatataagacttatggcatttgatcatgttatgcggggacgcctgctaacacagtccgtaggcctcagtcagagcattagagttctcactggatgtgagcagactcctctaattctccgaaaggagaactcacctttggaaggtgacatacctcacaatgatgttcgtcatggagatgacattcctagcaatgcgcgcatattatggtgctaggaatacggaacaaccatggatcgatcgttttgggaaatgacgaagatctagttaaatgtgtaagtggggataaatgtgtcgacactatgtcgcctcttgctaataattctctgtgagagaacccggatccggaaaaagtccttggcatgagcatgcgatgctcaaatcgggtcaaatggaaatgcaattgaggctgaaccgaatcgctaagtaaaagtcgcgaatgttgttcagatttttacgggtcattattgagataatgaggtggtgatgtgcgatggttcaagtaggccctagatgagacatctcccacgttagttgaatgttctgctaaataaaggtattggcaaaatggcatgaaattaaatatgcagttagcggatttaggaaatccatgaggtcttgaatagactccatagtgaaattgcggcatgcaaatcttgtaccaatgggtattccggtaagagtaccatctcccgttgggagaaaatctcattgacagaattttctctaagggggagaccttattgatgaattttcctctgagatacaaaataattagtaagtctgaacacaccatattgtataatcccttggagggatgatgacccatttatgacccggtaagattgaaatgaggaacctgataagatcacagacggggtctataggcacatgtgcatctcgcgattatcattggagtgtgtacactcgtgaaatctgttccacctgatggttggaatggtggtgtcctctaatacctattgaggtatacttggtgttgttggctgtgtgttatcccccacagtgcttaaatttttagactagctagttactctgattgttacagcatgtctttggaaggcttatggttgatcttgtggatccccaattgttgttgacatcatcagagaaagttgcaatgatcaagacctagttcttgatggagtcacgccgagaaggtgcgtaccgttgtgacttatttatccccataatccttctgaaggatgaaacagattgcgttgcacaacactgtggtattgtggtatatgatagtgatggaatgcattactctctatgttccctattctcgttttagcggtgaaatgagacaagtcttttaagactaatggtttgaggatctgaaggattcttgcgtacgcatacatctgagagatgtttaatgctatgggaacatggtctgtgacaaaggttgtcatcagggggagtatgtgctatgtgttgattgtcatttgcgagacattgaaatgtcttagagtatgctcagggtattgactcgatgatgatcacttagacctgtttctaaggtcctatcataggaagacctgtctttattgaccgacaccagatacaagtgggctacctcagactactgaggcgaggtgaggtgagtagcaatttaagttgagtgataatctagagtattgatcacctagtctctcccaactgttagttctcgaaagcttttccggagaattgggataagaagactttgatgtttgctaggttcagggggagagcaccctagaacatgacccacagtatggaccgtgtagtctatagtgttgtactctttttccttgagtgagtggagctgttgttcctcacataaggtttttaacgaggcaacaacgtgcaatgcatgagcgataactatgtactctttctcctagcctttttcccactaggttttggtaggagttttgacgaggcatgagttagtcgcggattagcccaagggggagtgttgcgaaacaaatctcttagagataagtttcttgtgggccaatccgaaccggagtagagataagatctatctccttctaagacccctatatatacaggggcagggtgtgacatctatggctgatggctggcttgtacttcagatgagatctataatgaagagagagctccaccctatatctgtgttcattgtctacttctgcaatgttcttgagggcaaagggatgggcgcaagtgttctacatcatctcacgtctctattgctgtgggagggacagggaacggatccggtgattcgctaataggcgtgttggtttacaacaggcagattctccacggcatgaatctcaccgtagggctaggctgagcctggggagatcagccagcctagcccaccagacgccaaagatctcatagtccacaaactagagtcttcaggcctcatctcttgattgacctttagccgagaacaaatcagctcaaattacgaataagttcactttaagtccatcatgttaacgttgagtttgaatcatatccctcaaccgcaaaaacaagtataacgcatccctcatttttccaaactggtacaaatgtagtcccaagatagtattgaagccattttcacagacgtggaaacagaagcaaaattttattaaaaaaaatcatgtagaacccatatgtcagtgaaacatcatcttttcccttgtccctctccctccgtcggtagcgatggcgggcggagcagcatggacgcttcgagcagggagcaacgcagcaagtagagcggagcggcggcaggcatgctctgagcaaggagcagcaaagcaggca

SEQ ID NO: 15279 - DNA, 6889 bp, Oryza sativa
ggccttctcgcttcctcactcttcgcctcagtgggggcgtcgagctccctctctcttcggtggtacagcaatggaatagcttgcaggggatgaaagaaaggcaccgctatagccaccttcttgacctcccccaccattgcggtgaggaacgtggttcggtggcagctgcatgagctccaccgcccgatgacctcctgtgccacaaacgccgtagacgcggtaacccccaccataatcccctctgctgacattgtcgccgtcgctttcgccgtagcggcctccgccgcctccgctactagggcaagatccgccaaagagcgtgccactgccaccgctaggtttggagagatgtgagctgactgtcggcacgcgccagccctcatgtgaagagcttaaaagagagataggggaagagagggatagtgatgtttttttgtctaacatatggaccccattgttgtatatttctttttgtggactgtaatagccacggcacctaaaaccggtctcaataccgcttatgactacacttacaccggttttaaaagatcatggatgcattttaccctgtttttcggttgagtgataagattcaaactaggccttttgataggggacctagagtggacttattccccgaatcatttacagtgtgcggcaaacctcacttccagcttattagcaacgtgtagtccgtttgcacccattaaaaagctggcccaatttaaaagaccaaaccgttagcgttagcaggctttagctcctcctcgttcacgcaggcctgaaaattgtatgggcaaccacgcaacggatgaccacatgtgagttccaaagtaacgtgattttaaaaagagatctcaatccctccgcaacaaggaagaaaattgcttagaaaaagaaaaaaaatgtcgtaatttctttttaagttttttttttaaaatataactataataaataattctcgctgtcaacagagcaaaatggcttggcttggctggagcctggagcaagaagcatcaaccaccggcagccagctcgatcaaaatcagctcaacgtacctcgttgtcttccttcaaaacttgtttggttaatcctaaaagaaaacgaaattccacatcaatacatattaaataaaccatcaacaaatcaccctcaatctccttctgacatgattaaccaaaaaagatcttatggttctaattgtagagctccaacttctaaatttagcttcagaagttagggtttgaaatggagttgtggagctgcctaaacccaactccacttttctagttcattttgtcatgtgagagagctctattcagctccgctcctattttaagtggagctgaaactgtgtggctgaactctaactccagaagaaatagaactggagctggagttgtaccaagcccgtacgtacgctacatgcgcgatcaggatcgccttgcctcctccatcaaccgttctgtctggcctcctctactctcctatcccctttcttgaggaagaccggccacattcgaccaatccatctatcatcaccatcacaaaacaccacagctaatccagcaatattctagttgctgcactgcagtactacaccctaagtacgcagtcgcacacatgatttagctagttagcatgttttttttaattgttaaatgtcacgttttgtacataaaaaacaaaataaataaattgattattgtttgataattaacaatccattaattatatgctaatcataactctcgtgtgactaataaaatattttcaacctttgtctagaaggacctttaatcaagtgtcaatttaaagatgtgagatctcaatgtagtgactagtgaaacgaaaggaaattggaaagaagaaagaaaaccggcgatcgatgatcgaatgcaaaagtcaatcgcgtggctagcaagtgattgattcaacctcatcatcttaattcatttcctccatccattttcctcctctctgtagcatcttccgtctctgcttgcgtacccttctcttttaactactgtcttcaccgtacttctaggtcggtagccatatattggctgtgtttgggttaaaattggtatgatgtgactgaaaaatagtgtgtgtatgacaggttgatgtgatgaaaaaagttgaaagtttggattcaaagtttggatctaaacacagtcattgtcagcagcaagtcgcattaacagccaaacaacaatgtcacacattgaccttttaccctgctaataaagattcagcctaattcattctctccttttctcaatcagcatatgaagtaattaaccagcaggttaataatctcctcctgctgaaataatgcccttgtcatcaggaagtctcttggtccttggagcgttgcgctcttccagaagtagcacacgttcggtttgacgctgtcaatcttcggtgatgccactaggaaacaggtggtcacggacaatttcttttctggacaaggaaaaacgagagacatcggtgttcagttcaaccgagcgagcagaagctacggtgacctaacatttgttcgccgatgcaatgtgtatttgagagagagagaggggaaaagaagaagattgagaagatatataaaacaaggtgagatattagttagtacatgatttgactataaattattggggatggttaattggttggcgacatatttttgggtcaaaaatcttgcagaattcttactatgggatttgcttcgtgattcaggtttcagcgacctcttctccagcagctctaaggacacattcttctctagctccgatagctccaacggtcctgacataggcaaattaataaattcgagtttagagtcctagtttggggcggagatggaagggggtacatcgcttggcttatagggatgaccgcgggagacggtgaccgatggtggacatagacgagtgatgaagcggcggtggcggtggcgatgccaaagccgtgaggatataggagagcaggagagcagtgggccattgttgatggagagggcaaaaacaagcttatacttaaaaggtggctgctgatggtgatggatccgatgatggggagtcactagagacagggaaaatagcggagcgggggagagaagggaagaggatgagggaaggggaaggaggctggccagggaagggggggaggtgggggctcaccggtgctgttgatgccttttagccagccgacatggctggacggcagcacattgaggaggtgtcacggtcgagtgctcgagtcgtgtatcgcacgtggtggggctaggagggagaagtgaacaagggaggagaggatgtgtagggttagtttagaggttgtgtacaaagctcatagctatcaggcgatgtaaaattcacctgattaattcttagaggtgttttctttcaattggtagatagacaacctttaattattttgaacatgaaaaataaataaatatgactttttaaaacaattttcttatagatttttttttaaaaaaaacatactccatccgtcctaaaatataagcatttatggaccctgacacggtatccgagatgttattttgaccaataatatctataaaaataagatgttttaaataaaaagagttgtatattatgatagattgtttaatgataaatctagtaacatcaattttacatgattaattttttttactttaatggtaaaagttataaaagtttgacttgtcattacgctaaaaatgcttatatttttgtacggagggagtattatttatcggttcgataaacgtggacatgaataacaacggatttcttctctttgtccgctgcaaaagaacgcagccaaatcaagcgtgggtaacaacggatatgcttcgatctcgatcgcttgagtttgttgaatcgaacagccaaatgatggcgccgcgcggcgtgcaaaatcccagtccagtcaaaggattcatcaaggatgcctttgccgggcagaaataaagaaagatttgaggtgagatctgatgattcccggaggcaaagtaaacagtggccaacttgctttgcgatgcgtaggggcatatgcagtcaagcaggggcatcaatgccggcacgcacctcctctaccaaccttaatcctcctccctcacattcctttccttcctgcgcatcatggtgaaatcacgttttcttgacgaaataacgtgacaatcttgaggtatcgacgtgggacgaaagcggatttcggtgcgattttcgaatggttttctataaattcaagtttgaaacagtgaattctcgatcgaaatttgccgataactttcatacctcttaaggtcaagatcaccctagtccatcatataggtaaatcccattgccattgtcaaatgatagtccgtcaatagctaagatcctactgcgataatacaaggatatacgtctagatgtaatatagagagagtgagactcacgttttttatataggttcgagccccaaaagagtaatagcactacaccaatttatatggattggctagaaatatcagaccattgccaagtatgaggtgggttctataatctaatctagccaacacaactaatctcaacagaacataaatcggagattaagtcagcgaccagtcgtgggctcctataatcatagctttaaaccctgtcactgaacaccggattactaccagatatggttctgctgactatcacacgtcgatagcaatgacaaatgtcagtgaggtaataaactgataacattttcaaccattagcactttaccaaaatttgaaaactctaaacttctacttgaaatcctctaccttcaaacaaaaaaaaaaattctcatcctaccaaattgtggcaacgccaccaaaaaaaaaaaaaaagctcttactctcaaaattgatttttcatcattgttccggttaacacgcaatcgacttattagccacaacgtacaaatgtcttccaaaacatggcttgtatctaaagaattttgctaactagagtactactactcctaataattaacaagggtaccattttgtaccacgagctgctccatttaataagcagtatatatatatatactactccattgcttaagaatcaagacagctactaccattaccgtgtttcttcttagctgtactgagatacaagtgagagtgggcagaggagccgcgttgccggcgtgagcgcaccgcaaaattgcatgtggtcgtcgacctgcttcctcttccttccactcatcccatctaatccatccattcatcggaacgtacacgctttgccgcctccttttagagccccatcgattagcctaataaaccaaagcaaatgctaaaatttaaatttttaaacttaattttgatattgactttaagatattgttaacataattttttattaatgttggcttttaagtcgctacgaataaatatataagttttacctataaattaatttttatttcctgataaaatgtttcgagttattagaaaatataggtaactgataaagctctcaatcctctctttatggctgtgtttagatccaaacttctaattttttctatcacatcaacatatcatacacacacaaagtcacatcgtatcaatttcaaaccaaactttcaactttgaaaaggtgctcggcagctggttttctttctcttttctcaggtcaaaaaggcactagtctacaaatcctgcaatttttaggatagccatgcagagaagatggatgctgctgagtcagatgaataatgcccttttgtgcctgcatgtattatggtgaaggagatttcaatgactctcgttgacttttgtgtgatctcataatctttcggtccacctgtcaggatccggtcatcagatcatggtcagcggtcaatactccctactccagtatcatagcgtgtgtagctggataatctttctttatcctgatgaaacatgctccaagatggagcaaagaaccatgctggatgtgcacctaatgcatagtatttttttttataagctcttgttttgaccgattttaatggagaatcgaatcgttttggtgtttttttttcccaaacgatggtttgtgcgatgtgaatcgtgtgattgatgcaaagatgaaagtcattctgcccttcccttgcaacactgaatttgtttgaacacatcatggcagtactgaattttggccaaagaacaaagaaaaaatttgatctgtttctttctaggaaaaatttctctaaccatgtacaagtttgtctttctccagtctcgattcttttcctctctatcgaacgaagctgacaaattaatggagaatttgaatttctctttttttttttgggttttagaaaggcatgatgtgggtggtcttggagtcgtagccggcgaggcagctcttggcgttcaccttgaacatcttgaggagctccgacgccatctgcctcgccgccggcgagcacccgctctgcatcagcaggaggagcttcgtcagcccgccctccgacgccgccgccgcctccaccgcgcgccggtccctgtaccggtggcacaccgcccacagcaccgacaccgccgcctccgcgccgcccatcccgccgcacctcatcatcctcgacaccaccgccgggatcgccgcctccgccacctcgcacaccgccgcgcgcccctccgcgcaccccacggcggcctccagcacgcgcagcgcctgggcgtgcgacccgccgtggtggtccgtggccaggacgcgcacggcggccgggacggcgccgagacggaccatctcggcgcgcgcgcgccgcgtcgcggcgactatggcggcgaggcaggagaggccggcgtccacggcctgcgcgtcgaggctgcccttctcgttcgtggggccg

SEQ ID NO: 15280 - DNA, 2887 bp, Oryza sativa
gagcgcggcggcgacgcccctcctgttttcctcctcgatgcagtccgacgtggcgagcaccgcgagcacccggacggccgcctcgacggcttccacgccgccatcatcatcatcacccttccccctcctcctgagcaccgacgccacggtttccgccgcgccaccggccctcgcgagcgcgttcttgtcgaactcgtcgacgtcgtcgtcagacaggaacgccgcgagcttgcgcagcgccgggcacgggtccaccccgggcgccgcgacccggcggaggagctccgccgccgcagcagccggggtggggccaacagccgatggcgccgccggcgacgacggcgcggccgtggaggcccagagcgcgatgaggcggcggagggtgaggttggggacgaggtcggtggaggggagcgggagcatggtggcggggcaggtggtgttgccggagtcgatccagcgctggatggaggcgcggtcgtaggtgacgccggtgcagaggctcaccggcgagcgcatgacgtcgagggagatggggcaccggaagaacgtgggtaccttcacctccaggccctggtactccgccgcgagcctgccgccgccgccgcccatctccttcctcaccatggatggctgctgctcgatctcgttccgaccacaaacacttggtgttgcaacaatggcgatggcgagctgaggcctgagggtggaagtggaggagatggaatggaatggagtagaaaagggagaggaggaggaggaggaggatgaggggtccatgtggggggaggaggctagtattataggcagtggtggccttttcgtttcacaccctgactaaggaaacaatttacgaaacgctccttggattgtacaagtactctacctggaaatgaaatgcagaaatggcagctcagttcgtcctcacgcgctattttcaatgctagctttttttaaaaaagaaagaaatttatcacccacacgctattttaatgttagcttggaaatggacttctatgagaaatatagccaattaaatgtagaaagcatacggcagatcacccttttgaatgaaaaaggatatcattgaaagtagtttaatggtagttattcatcttcctatattattttgtactatcattggggattttttttctttaaaaataatgttagatttgttcctaacaatctgaaacatttacccttcgaagatatgcatgcaaattacaatatcgaatcataaatacatctacaataactctattatggaagcactcccaaaagcttgagtatgaacactttatatcttttgtcgtcatgccagctctaagaaacggtagcgaaaaatccgtggacatattttgaccgtgataactagcaagaaacaagccaaccttttatattcttaaaaaaaatatcagacttaaaattcttttgtgctgggctgcgagtagctttgtatagctttcttttgtctttttgttgacaccaaaataaaaaaaagggctatccaaacttgatgctacacaaagctatacactctctttgaaattcttaggatctcctaattacagacaaaaaattaattttgcaatgcactacatccaacaaaaattggagtgctcaaagctaccacagctacctagtacaaatctaaaaataacaaaaaaaaaacagtggacccactacaacaaaaaactcgtatagaggcacttttgtagaggcattttgtaaattgcttctacaatcagaagttttatagtgtagagacactttaaaaattgcctagaaaacttttactctagagacatttttatatcagtttgttagattttatcttgtagaggcattctttcggcactataaaatgcgtctaatatgtaaaggcattttgttgagacattttaaactatgtagagacactttttagaatgataatgtgtactaaacgactaaatataagtaattaaaggaacaaatatacaagtaatgacatggagttgagttggttagtgtatcgaagattaaaatgatttaaccaaaagatcatgagttcaagacttatcaaaagcaaggaaactattttattctcttttttgactggttttatatgtttgcggtacaatttagtctctaaaaaatgcctctaccatcttatagacattttataaaatgtctcttcgtttgtagagacaattcaccataagacacttattggacattttttaaaatgcctctacattgttgtaaaggcatttgataagtgcctctacagtactagaaaaatgtctatacagagtatttttcttgtagtgaccgtagatgaacgtccaagcaccaagttgtaattttggggctttgcagggtggccaacggaaggcagtgagaaactgaggtgtggaacgaggaaagctgggcagaggagaaagatggtcaaaggggaggaaacgaggatgacgtatggacggggcgccgaggaggtcgctgtcgtcgtcgacgctgctgctgcttttttgtggtcgtttttctcggcattgtttttcccgttttgccagttgtttttgctgccactcgaggcgaggcgacagctgcgtgagatgctgaaattccattctcattttctttcacctgtttaattatacgctctcgttaaggcttcattcttttttcacaaggagacagattttatcttgatttttgttattccgttttttaaactgctaaatagaggcattaaaaaactgctaaatagtatatttcatataaaatctttttatatagaaattgcttaaaaataatgctaaataaattattttttaaatctgtaataatcaaaatttaattattgatgcggtgacagcttttcttgtttatttttcatatccta

SEQ ID NO: 15281 - DNA, 678 bp, Oryza sativa
  unsure (1)..(678): unsure at all n locations
aaaattgatgataaaatgtggagacgttgttctaaaagaaatatgcgatatgtcttctctcaaatatccgttgacgtattcgttccgtttcgtattcgctccgtatctgtattcgataataatcatttcatttccatatccgggttttcgattcagattaaaaaaataaaaacgaatatgataaagctagttttcatccgtttccgatccattttnnnnnnnnnnnnnnnnnnnnngggaaatgtcatctctggtgctctttctatcaaccaccattttcttttatcacgtgccgcgcatagaaagagggtagtatgtgttgacgaaaaaatggaacacaccggtctgggagatctgcttaactccagtgcaggtccaaaggttggtgagatgcggacgtgcctgtcagtttgatcctgcaactgacaagatatgcaaatagtagatcaaacagccgatcggctgactgttgacgaaaaaatcgaacacactggcctgggagatctgcttaactcctgtgcaggtccaaatcttaatgagatgcgggcgtgccagtcaggttgatcctgcaactgacaagatatgcaaatagtagatcaaaatagccgatcgactaacaagccgatggagtagttccagccgatagccgataatagccgatgccgataccagccgata

SEQ ID NO: 15282 - DNA, 70928 bp, Oryza sativa
  unsure (1)..(70928): unsure at all n locations
aacatgttctacacctgtctttaaatattacaagctagaattgaccgatggaatatatcttagtataataaatagtaggatatatctaatccaattctagatttaccatattttgaaacgaaggaagggagtagcttgagctatgctggagtaaaatcccaacacgaaactctcactacacgacgccactacgggttcaagccgatcttaagtcagaaacaaagtgaccttgttccaagccgcagtagcgagcatttctttatatttagaatctgtttggattgctacctaaaattttggtagggtaacaaaccaaacacctctattaaaatactacgtatgctacaaatttggttttgcccataaatttgtctcttataggtatatttttggcttcaatccaaataaacattttcaactctatcctaccaaaattttagtagtaccgaaacttgcccaagatttggcactaccaaaaatttggtagagcattaatccaaacatgccctcaggatgtgtccatttggattggtttggaaacctctccccttcgcacgcaaaacggaatgacgaaataacacatgattaattaagtattagcaagagtttgaaaaataaattgatatgattttttacaacaactttttctaatgtttttattttttaaaaaagacactgtttgtttagtagttcaggatacgtgcgtgtgggcaattagagaatagaggttgggaaccttgagtgaagaacacatcctagggcaaatgaaatggcgaaaccattataaactctccaggtgacatttactcatggtttatatgtcagtcaaatgaccatgaaaaaaattggaaaaaaataagatagattaatatgcgttagatcactctacaaacataacatacaagttaaatttctcacttttatatgttgcaaaaacaaaacaaatttgactctaaatatactttaactatctgtaatttatttttttcttattgcaacttataaaagttgaattttaactttctaaagtgatatatcacatgttaatacaacttcttattttttacaatatttttgtaactattttaagtgtcatgcaaactgaaaagacgtccccctcgagagtttaaaatccactccataatgaaatgccattcaaaattgtctgatggttcgagcagcaaaataagctataaaaaaaatttaacaaggcaacaaaaaaatttataggtaaataattattactagcagtttaaaagtagtagagataaaaatacaatcaccaaaattaaattataaatttctaaaaggaatcaaaccctaaagatgaatctgaacacacatatggctgtgtttagttcgcgccgaaattggaagtttggttgaaaattagaacgatgtaattgaaagtttgtgtgtgtagaacagattgatgtgatgggaaaagttgaaagtttagaaaaaaactttggaactaaacaaggcctatgtcattcatcgctggttttgatttttgattttttattttttgcacagagagagtataagccagcaaatagacttgaaaaccgaatctctgaagaaatctccgaggagtacgtacggcagttcccacgctagttgcattgggaagacgaggaaagccaagcagtggcgtcggcgaggcacctccggaacgtgtccatgctctccggcggcagagctatgcccacctcgatgccgccggcgccggaccggtcctccgccgccgacaccgcgccggtcttcgccacggacacgatctccaccttcgccggcctcccgaacccgaagtcgacgtcgtacacgcggaacctcgtcgacccggccaccgagaacggcgcgtcgtccctgcacgcctccatgacgcgctccgtccacccttcccagtacgcgggctcgccgcgcaccgcctcgtcaatggcgacggccaccgcggcgcaggccgtgaagacgccgcccgcggcgtcggcgagctcctcatgggtgcggcgaactcgtcatgcctgtccggtacgtcgcggatgagcgtgcggtcgattacgggcagctccgggagcttccggtcgccggcgcaggctgcggcccaggtgtggaggaagtgcgtcgagcccaccccgtcgcaggcggagtggtggacgatgacgccgagagcgaggccgcggcgcttgggcggcagcacggtcacctgcagcgcgagcaccgcgccgccctcgggaagctccgggacgagcggcgcgatcttggcgagctccctcggctcgtccgtggcgagctcgtcgacgccgacgccgtcgtgctcggcgacggtgaacgccacgccgtcgccgagctggtagaggagctcgtaccggttggtctcgctgggcgtggggcggatgcggctggcgagcgggtagaaggcgtggatagcccggggcagcgactcctccatccgggacagcacggcgtcgacaccaccgtcgtcgtcgtcgtcgccggggccgagtcggtagaagaagacgcgctcgacgggctgggcgcggagccacatcgcgtccatgaacatgagaggcagggctcgctcgggcagcgcgggctcgccggcgggcggcgccggcgcgacgcgcgtcgtgcggaggacgcggaggccagcggcgtgagcggccggttgcgacgccattgtctcgccgcagaacaggtgtggtttgtgttgctcgtggttagctgcagagcgatggagctttgcttctactcctataatacttgcatctccgcgagtgacttcacttcactggtccatacccgaattacgcccctaagttattatgtgattacgaattaccccttgaactcaaaaataagatatctttcaccttcaactatcaatacaggatgaaaactcccttaaatagctttgagagcggttttggtcctacgtggtagttcagtcaacaattcttttatcaactaatcgatggggcccacccatcagatctctctcctctctctctcccctctcaaacctctctctcgcacgcacggatgccgacgacgaggatgaggcatgtgccggcagtgctgcaccatcccgacggcgctcacatgccgccccattgttgcctcagccacgccgccaccccgccgccatctgcccgccccgagcagccttcgccacctcccgccaccatcttgcccaccctgagctgcctccgtaccccgcccttgcttgccgccatctactgctgtcctcggcgccccaagcggcctccgctactgcccgccaccccgagctgcctccgcccctctgtcgtcctactaccctcgcccaacacaatccaccgctatcctcgatgcccgagcggcctccgccattgccatcgcgccgccacgaactgcctgcacccccgccgctgtcccactgtcctccccagttactgtcctgccgtacatcatagaaaacatgtaaatacactcaaaatttacgaaatatattgagaaatgtaataacacgttacgaaatataaggattgtatttcagtgaaatataatgaaatttacaaaatgtattgagaaatgtaataatacgttacaaaatgtaaatattgtctttcagtggctttcataagaactccaataccagaaaaagaactcccctctacataattgaggaaaagaacaccacaatctacctgatagcttcaggtcatccaaaccaacttcaaaagatgacccagtgaccctctcaatccacaggtacctgtaaataggtacctgtaaacctatagtaaatgaagttcaagcagcagtacataatcgaagtaaccgtaatttttttaatcatgttgttaatcacagaatatgggccagcggcatccacgagcttgaagtgtaactctacaataatcacaagagcaaagaccaattcatagctaatcctgatacaatttcagaaacatgacaaagttatactcctgaggaacctgaccagcaacttgtgatgcaccatttgtttgcaatcgttcaacactaacaaaaaacaaataaagttacaagacaaattgtatttaaaaatcaaagcaagtaattccaaagatatcaatattttgtttcctggtcatttaagaattcatctcaaaccatgaaaaaaaatagacttcaacaattagagcccatttcaaaagaagcggtttcagttctcacaaatataacaagcaatttgttaatcttaatactggtgggctaaccatataaaggctaacatggaaatgaagcacatcagttgaacttcagattcagtagtggtagaaaattggcatatttaggcattgtattataggagtagttttttgagcaaaaagaaactttcacttcatagagcaatatattactaactccacttcatgtagctagaaagtaacagaggagcttgataaaatagatgtgcaacgctgattagaaataacaggatgatgatgatgcttgatgataactcatccagataaagcaatgctatatgcagtggctttttaatattccactccatgattcacatgacctttttatcaataaaagaaggcaaataacagtaataaggtaatactgggaagggcaagtcaccttactttacatttgatagaacggactcagataattcttaatggcacatctgttacatcttgttatgtatggactaccaaatcagttgcagttgaacaataaagggacatatcttaaaataaataaatctcctttttctgtgggttaaaataaataaatctcaaaaggattttatatgcaactaaagattaaacaaatagatatactgcagccgagtccacatgtcccttgaaacactgtccaggattgctgatcgattacgaaatatgaatttatctgcaaacttttgactgcagtagaaagaggagacaaataaatctcagtcaagaaacaaagctattgtgttgggaatatcaagtaaaattggacatgttagcatatctatatcactattaacatactgacgtgactccaatagtcattaaaaagtgaagtatctcatagtaaatctatacactaaaataatagggtgttctaccctgcaaaaatgaaatatttgtttgcactatatgaagtattcgagaccaaggaacaattcaattttagtttacataggcagagcttcaaatcacaacatacagtgaaaaatagagtaaatatgagataataataaggattcaaacagtaacaggagtgcacctcgatcatgcatttcatcaaacagttggtgtgctgcccatgggcacaccaaggaaccaccgtgatagctgatctggaagacctcactgtaatggaagggtaccatccacagcacacagtagctgcagccgctaaaggcctaggtgcagacgttgaggcttgcctgcgcggcttcagcgatggcggcatggaattctacatatctatcgaacccaacttttaaaacaatctatgcacttgtgtaatcacttgaacaccatgtggatcagtttaatgataacaaaatgaaacacattatataatcttatgattataactaactgttaagtttgtattcttcttggtccctgaaagagaaattttcagctcctgcacttgaatcttgcatcatttacataggtaaaccaaattgacagctgcatttataatttcatttaggatttgtcatgtaaattcaatgtaaaagtgaaacaatacctcagaggtactgtcatcgtgtgcaaggatcaaaagcaaaaatgaccaactgataaattatgaaatttgggatctggggcaatgctttttgtagttgattaagtacccagaatcaatgatttacataaaaattgagcttttcattttatataattttcatagcataatcaaacattttatcaattttgttattttcatatctattggaattgcattctaacatgtatcgatcaagcaaatttggaaatcaacggataagacaatgaatcagtgtgacatagggtcatagtaggttgaatgttgacattatcacaaattcaagattaacatatagcatattgctacagattccattcatttatttttagccaggggaaaattctcataatatgatcagcattcacggaacaattcattgatcctatttgatagcagaaaggagaaggagaaactaaatgcaatctgacaaggggcacataaagaaattgagaaggagagaaggatgtggaaaagcaaacctgggataatgccggcagatggcaacagctttgctgctgtgttgtaaaatcattcatcgatgagaatactggcacaacagaaagaaggcggggggtgtgcatcaacctccgcggtaggagtcatctctcctcgggcgtgtagataacgaagaagttgcacacgatggagaggaggacggcagggatggaggttgtccggtggcgtggagttgggcagtgggcgtccggctccggggcgtcgagggtgaagacaactaaacatggcgcacggcagggatgcgcacgatgaagacaggcgatgagtgcggcggaggaggcagcgaatgggaaagacctcgcctccggttcagtgcgcgacggcggcggaaggggacgacctcgtgggtagcggtgaactgtggcggcggcggtggatggggaagacctcgtctccggcggcagcggatggggacgacgtcggctccggccgcgactggggacggatggggaagacctcgcctccagcggcggcggatggggacgacgtcgactccagccgcggcggatggggaagctccggcggtggctggggaagacctcgcctctggttcagtgcgcggcggcggcggaaggggacgatgacgcgagaagggttcggcggcgtcgcaggattcgggtgacggcgatctcggcggcgtcgaatggggcgatgcgacgcgatggaacgacgacgcccctcacctcccctgctctgctcacgactcgcgagatggggatcggattcgattccgtcctgactggcgtggttctagggtttcgccggtggtggggggaggggaaaggatgggcggaggggcgcgagcagcggccagcgggacagcgacgacggcggtagggcgatgatggcggcggcgcctgatctggaggaatcggtggcaatggcgatttgtggcggcgtatgtggcagatcggctggtggcgaggttagggtttgggcgccgatgtggagcagctgtcagcagggggagggggatgcgggcgctgggggatggggaggaaggaggattaaggcgacgctaggacgacggatatcggcggcggcggcggttgatacggaggggatcgaggcagtggttgagaggaagacgggagagaggggaacgcttgcgcgtctgcgctctgcaggatcagagcgttgcggaagcgatatgagccattggattagacaatctgacaactcatattccgcatgtatgatagggttggagtaacggccacaactacagaattttaaaagtagtaaagaaaatgtcgatgtccttatatgtcctagccttctttctatccttcattcgatctagcgcatgtgtatgcgtctctcctccctcacgcgcgtgtgtatgcgatttttccttgaagatgccacatgtcctcccctcacgcgcgtgtgtatgcgtctctcctccctccccgtttttctcaacggtggttaagatctaaatcattattttgttattcattttaaataaaagttctatgggtagatcatagccgaatctcccagttacgggtgtcttcatgcaagcctacatgaatgcagagacatgggctaatatatttgtgatcgtctatgaacaactttttataagttgagttgtttgatgattagtctttttttttatatcatgacatttcaatcaattatttaaggtgcacatggactatgatttattgtcaaataaaaaaaatagtgtgagccctatacctgcacgttatacattttattacttcctccgcttttaatatattgacaccgtgaactttttttatatatatttgaccattcatctcattcaatcattttatacaaatatgaaaaaaatagttcatgtatatattaatcacatatattttgttttttaaaatgagactaacggtgaaacatatccatccaaaagtcaaaagtgtcatcccaggcccaccctcctctctcgtgctcgggtctagcccggtcatccaaatcctacatgacgtgaccctatcaaacgggcaaggcccaaatacatcaccttggcgtatgtggacaaataccaaattagggttaattatgcctccgtgtgacaagcttgccgttgcatcgaccagaaattacataagcccgacaggcatgcatgcacgaacttaaaaaatagtagctggattttatgatgagagagactaccccatggtataccgtcaaagcaacgggatacatcgtttatgaccctcacgttaaatcagtttccacgtagtcaagtacaaccatgcaagatgtcagttggtcattaaacaatcccgtcgggacgtgatcccgttgcctagattttctcttttatgattgataaacaacataaaaatattttaaaatcaaatcaaatatatgtgattaatactcctaaatattctctttacaagttaaagaaaattctaaaaaaaggcagacgtaatttaatttatatacggttatatatgtattgtcttttatagcgacttaagttttctccctttttttttatggaacttcaagaaccagctgccttaggtaccataatttgtgaacgtgatctgcagtaggtaattttataaatgacataattaaatttatcatgcaatgctaatggataaattcatgaagaaatcatacttttaaaatccaatagatattattctgttagtatactacccttacatcgcgcgggctatcttcctggttcatttttaaaaatctcaccaaagggatcagtatttcatttgaggtactgttcacctcgatttgcagttgggatttgctatctatcagtggacacgtttcttgcttcaaatcacatgattttcgaccttacgttaaaacaaaggaacggataggatttaaaacgcacaacgaacaaaaattgcacccataaaccttaatcatgtgaactaataaatttgactgggccagcccaattaaagtaaacaagctagtacaaatcagttacgtatcaaattacattgtaaatatgatgtaacaaagaaatgagaggctgcatcaattcacatgaaccgattctttgacctcgattacaattgcaagaaatttcataacattgtcatgttctttattcttgtaacctaagatcaatctcttattctcatatatgaatactgcaaaaaaatgatattaagttctaaattatcaaaataaataaaagcctaaaacacaaaaacatccatcgatacagtttccgaactctaatcatttgaaaatgacaactactccctccgtttcacaatgtaagtcattctagcatttcccacattcatattgatgttaatgaatctagacatatatatttagctaaatttattaatataaatatgaatgtggaaaatgctataatgacttacattgtgaaacggagggagtatgaacaatccaaaatcagaagtctaaaccacaaactaaagaaaatgcactatgctacctgaaacactaaactatgcagagtgccattaaaaatgcatcatcaggagttgaataaataaataaacactaaagaacactatttcaaataataaacacttttagaactgatctgcatgttaacaaccgattctctagaccatcttttaggtttcataacattgtaattcagaggaacaatacattgcacaaccatcatagttcccaaaactatggttaagacttaagattcagattaagaaatttaaaattagagctcaaaaagaacatagcaaatacaccccttatcatgtattcataataaatataaatatttagatataactaaatcacacatgtaactaagttgtaagtgcaatataactacggtgtaactaatgctattttttctgtaagtgcatttaatataaatatataaaaaattatgcatcatgaaatgattatttgccattttcataactgtggcaatgaatctgaattttcagccgtaggaaacaaagcaatggacgagattaatgcaatataacacaaaagacaacaaacttgtacatattgatgggtcatccaaacttcaaaattaactgggtaaacaaatatttgtattgaactgaaacaaatcagaaatatgcttgttaacaccaattgtagtctattgaatttataccatcctatagtagtctgaagaatataattcagacaaacaatacattttcacataacatattgcttccaaaaaaactaatatgccattgaatttagaaaatgtaagaaatttcaaaatcagggttcccaatacacgctaaatggatccattagaacacattcacaacaaaaatatagaaaattacattatataaccaaagttttagatagagttgtaactaaaatgtaaatgcagtataattactataactacatttgaattgtggtgtaagtgaatttaaacctaaattcattactacccatacattagaaatatttgatagctatatacttcacaatgatcaaaaaaataggttggaggataatttgactaggaatacatgtgatttttgaacataagcagaattttgttgctacttgaaaacataatctatttgatagttaaatattaacagtaataaaataggttggattatagtttgaccacagaaacatgtgacattatactttacttaaactcacaattaaatcatagtagcgaaaccgtagtctgttcattgggatagaaaagcagatattgagatccttcagtcctttttttttctttttggcagaacacacttaaagatcaaactattccacctgttaccaattatgtactttgtatgtatgtacacattaacaagatatattgatatgtacaagaagtccaaaggacagacaatcaatcacaacaaatttttcaagacctgcattgcaggtgaactattttgtccttcactatgctattatttattgtttcacaaagagaccctctatagttacaaacattattaatagttaaactttagaaaggctgatatatcatattctaggatgttaataaaaaaggaacggatgtagtactttaaataatgggcaaaattggaatgacaattgaaaaaagggaactactacacaattcatttctttcgcaaatgctttagtgctctacacaataaatttcttcttcacaattgtccatgctttactctggctgggatagtggtgcccattcctaaccagttcttacaggaaatagtcccatataaattgttgattgttttattcagacaagtttgtaggtacaacaaggtggcattcaatcatgtttgggtgttagatacttcatacgtattgcggcgtgagtgctaacagaatattagcttgaatacaagccaggaagaacacagcttcaggtagaaaagcattgcagcttcattcgtccttccatttgttgcacaccaatagttgcctttctatatttttgtatacctctcatttgctcatttcatttcctttgccttcttatgttgtgcagatagtcaactaaagagtataaactactgcaatcaccttttttcaggaacataactttcatcaaagttattctctcctaggcctaattcagttaggactgacaatttgccaacccatactgtaaaatggtccataaaaagcatttgttgatatagtattttgagcaagtgttgaaagataaggtaatttccctgacaaactgtttgttgacagattaagaacctgcagatttgtgcagttggctagcactatggatgcaagttagaactatagatccagacattcgtcttgcttgtggttaaaaatatgtcgcatagaatctgagatgaatcatacgtaattgttagtaagactgttcatgaaacaagccatcaagcaagaccattttatgtagcatttttaccatcaaattagcatttttgcactatcactgcagcggatttggatttggtaaagaggcatgaagccttgcgagatacaggtgaggagaagacggggttctaacctactttctagtgatgatggaaatactattaaattttattagtagagaagagacagatatatgaatatgaatatggatatggatacagagtatgaagactttgcgtcaatagattcatattgtaaagcagttttgtatactatatggcagattataaacattatatattgtaaggaaatccatgaaaaaaatgttcagtttggtagatcgcaccatgtcaaaagataacattttacattactcttctcttctattttagtttcgttttcatgcgtgctcacactaacaaaaaaaaaaagagatatttttgggacacgcctcttgttttttttgcaggcagagagtaagaacgtccgtatgtaaaaaatagtgtgaaggtgcctagttttttagataatggaatttatatcccggcctttactcaacagagctacagccaattattacaaagtaccactcatacaaagagtgtgaaggtgcctagtagagacccacttatgaaaatccatttttgtaggtggtcctcttaacatgtctgtttgtgaaaataggattattttcagaggcgggcctgttaaaaggtccccatgtaaaaatcctttcacagccccacttcctctccttttattaactcttctctcctttctgtctcctctaccttttctccctctgtccctcgacttctccttctccacctccgcctcctccctcatcccctctcttcttctcttgacggttgtcgttgcgacgggagtagacaaaggggcggcgttgaaatgggagcagcctgccaacagggtgacgccgcgataggagcaaccgacaggcgatgtcactataggggatcaactgcctccggccccacatcgcgccatgccttggctcctctgatctcgcgtcgcgctgcgcctcgactccttctccaatctcatgtcgtgctacacctcggctttttcttcagcaacaacggcgaactcgcgacagctggatccggtggacggccaaatcctatgacggtgaccccgagacgagcaaatccatcagcgactgcgcacagatcgtcgacaacatcccccaccacggtggcagcgggtcttggccacagcagatccattggagttgaggcgcagccaggggcgacgccacgttcagcttgccaagtgcacaggcaccagggaaaaatttagtttttagttattagcatctaatctccaccttttgtgcactccccagaaaaaaatatgtgcaccaccttcagctgcccagcaggctgcaggcagcccatgaaggcccaatttcttacgtgcagcccaaactgtccaagtgcccaacagctacagcccatgcgtaaatgaagtgtgcattctggtccttcgtgctctagattcgcccccgcgcagcgggcttcgggcagtggtgttggaggtgcggcgtgcttcgggcgacatcaaggagctcagggacaacagatccaccggcaacaacaatagaagcggcggatccgctgcctgcgggctgtcgggctccattcgatggtttgcatgttcttgatatgtatgggctagggtttcaagatttttttttcttttttattcagaaaaaatatttacaagcgggtaccatatcatgagaatctgcttttgcgggcagccctcctagagaagctgtttgcgaaaatggtttttacgcgtggctgtgacgcccgtatgagaaaaccgtgatttttatagctagacaactttggccagacgggtagagcacccgtttgcaaaaacgacttttgaccgtttgcaaaaatcaattctgattgtcacttcttttctattcatttgccgtgtttactcgtcaagctttttctagtgaaaaggcgtctatcatagttactagttcaaggatacagattttttttttggaatgcgcacttgattatggaaaatcttaactaattaaaatattcgtaattttccttttgtcacctctctttttcatccgtgttttcatctgtacatcatatcaaccgatttggttagcaatagcgatggaaaaactgcaaaagaaaaaagaaaaagagaaaccatcagcggtcaccgacgccaccaccgccgccggagggagaagagaggcggcggagggagccgctgctgccggatccgcccgcggtcaccaccaccgctgacggatccacccgcgaacgccaccgccgccatcggagggagaagagaggtggcagagggagccgccgctaccggatccgcccgcggtcgccgccaccgccgccgctcgcggggaggggggagagggcacagccgcagccgctcgttgggaaggggaggggggggagggcgccgccgccgctcgcggggtgcaggcaccttgtcgccgtcgctctgccagaaatcgccgccgccatcgccattttagcctaaggggatcgggagagaaaaaaaactaaaactagggttagggtttggtacaagccgttttgacgaattcggaaccgatctgagccgttcatcaaaatgagcgactcggatcaatcccgcatcgagccggcctccatctttgggctgcagcactattgggccgcgcgcagcccatgaagcactagcagcgtccgattgaattgttggaccacattcggtatggttagtctttttttttaaagcaacaagtccactttgcctctctcaaatatatctcctatctaattcatagggaaaaactaaaaataaaaattacccaacaacatacaattacccaacaagagaaagttagtcttttttttaattgctacaaaaccttagttgatgttaaatctggtaaacaagaaatatattgttttcaacatgttgtttattggcagatttatatcaagaataccatattctaaaaggacccatatcacaaattaaattctaaaaatatttattgtgattttagttaaaattattccgttgcaacgcactattgaataataatttattacgagctactatatatttctctctatcatttgtgactttttctagcgagcaaaagtaccaaagcagtgtgaaaataacttcggttaaaaacaaatatttttagttttaatacaccgtagcgaagcacgggtattttgctagtaattataaagtgtctcctagatacactgtagggttacgatcgaaggacaacgttactagagtgtttataagagcgagctatcaaatgagttgccgcattcaggacagtataaacgtcattaaacaaacagcagagaaacccaccgccatgactcgttcaaggatacatttgtttacgaggatatgctttattccattatcttaaaaaaaaagctctatttcttaaagatttgaacctttgtatttcttttaacaaacgaatgtgtagtctaaatttatttattattacctacggagactcttgtactttttttttcaaacaaagagcaaaaatttgccactctaaccctcacttccaaagtgcgaacggtacactgtgtgatgaggacacaactagctcggatataaccgtgagtaccttatgtattaatcaactaaaggtgcatatgttttatattagatttacttgttatatatttggaaaaacgttgctacacaatgagttttgtgtgttttcgtttgcagagttacttgcttgggcgaaagaaaagagaccgaacgtaaggaatgcgtggatgattgaagaagttgattggtgacaaaaccaagaccttttccaagtcttctttcatctcaccacgtcacttttggtccatagaagacaagagataaagtttcgcatgctttggattcggactcgggcttcctgacagcatcaacttcaaacggacttagccgctgatctagaaggaattttggggcccataagtacttgttggaaagcttatgaagtctactttccgatggttttggtcccatgtcaaaattcttactgagctgccaggaatctgcaaaacaaatcatgtacctcatccagtcctaatctgatttgggttttgggccttataattgtgtcgtgggctttagtcccagggggtgcgcgtcctaggctaaccctaggacgtccctaatcatatttattcagtagccgtcatcggttagagtcgggtttttcttagattattatgttaagaacagtttcgtcgctagatcggtttgtagaatcccaaattcgtgtgcttaatcatttatacgcaatttggttgcaatctatcttgttcttgcttgtgttcttcgattcgcatgcagggattagccttcttggcgaggtcaatcaggtttcggcatggttgataaccagaggagacgtggtgctgcgattgcggaactcagtagcgtgttcgttcagaagccagatcgagttgtgtcgccactccgcccaaatcgactgtttgtcaatacctatcggatgatcaggacctaacatcccctcatcagttggtatcagagcgcggttgcccgttaggtaatttatcttccaataaccagaaaattgccacacaaaaatatttattctttacctaaacaatttgagccgttgtgttgttctattagattttgctttgttgaattctagattgcatcgtcgtgtcgagtgctagtttagttttagatttaatttttagatttgagtattgtatctgttcatcacttaggtctaggtctagggttcatcactcaagtcggtgtgagttgtacgtcagttttggtcgagtttttcatctcgtcggttgttgccgggaccttgaaaagttgaatcgtctcgttgtcgggtttccgtttttgtagtttggagatgtttttgtcaagcggttttggagttgctcggttgctaggggtccggttaccgtgcttgtgtatgtcggtgtgcagtaccatgcgcaggtagaaaagagaaagaggaggttttcttttggttgggaatagcagatcggtttatgttggttgaggataaattatctaaattttcatgtgggaccaataggaaaccaagccgagtcacacagtggccaatccctctcatcctcacgttattttccccacataaaggcggacctctgttacatcttggagaatttttttttatgtcggatttgagatatttttgtaaaaaagaaaatgacatgagcaatccatttttgaggtgatccaattttagttttgtactttgctgagtcccaataattttcatatttacatttgagtccctgttcgaggtcagtggttagttactgttgaaaaaaaaaataataataaaagaaaaggcagaaggtgcaaagaaaaaggaagaaaaagccgcaccaagaaaaaaaaaaggcagaaaggtgctaaaaaaggcagcaccaagaaaaaaaaaagaaaaatcattcatcctttgagtatgttttgagagtgcagagttgtgcattgattcatatctagtccttagtattgtcgggtgcttgcttgagctagagttgggtctaggctaggccagcacattgactagtactttgaactattattgaactttgtattttctgattagcacaattgcgttcctttgctactatatattgtgcctcccaagctctacatatatacttctggtcagcaccactttgatctttgcaatcgccacatcacatccttcgaggtgtcacgaactagccacggttgtaccgtccttagcattgctggtaagacacttgtaatagcttgataaggtgctccatttggctgagttattgagaggcaccactacaccgtgtagcagattactgtttgctgctgtttttgtgtttgcaatgacaggtatgagtggcgctcaaaatcagcgataccaacaaggtaacaataatcgcgtgcccgatgatccttatgttaaggttaagtttaaaataccatctttttttggttattatgatgctgagaaataccttaattgggagatgacagtagagcaaaagtttagtgcccaccttatacctgaccaacatagagttcgacaagccagtagtgagttcaaagattttgctatcatgtggtgggctatgttagctgacgatggagttttacctactacttggaaagaacttaaggtagctatgcgcgatagatttgttccaccatcttatcttagagatttaagcaagaaactgaagcgtttagaacaaggggataaatctgtacaggattactatggtgagctacaaaaggtatttatgcgatgtagcatagtggaaggaaccaaggattccatttgtcgcttttacatgggattgaggcgcgagattcaggacatattagataataaggaatttaacattgtcaaccagttgtttcagtttgctatgcttgcagagaaggaattacaggggcatgatcaacaggtcaagaacaagacgaacacgtacacaccgcgcacgacgccatcttcgagtctgcccaagcctatctctttctgggcgcccccaccagcgtgcaagcaaccagttgcgtctggagtttctacagcgccaaaaccacctcctccacgacctgcagatttaggtacaagttctttgcaggtacccgccaagagtgcctcatccgtcgcttcaacgggacgcattcagtgccaccattgccaaggatttggccatatgcagaaggtttgccctagtcaacgggcatacgttgctacggaagatggctacatcagcacctccaatgttgaagatgatgaggaggaagagaagaaagatggagagcaaaaagacctatccatagtttcatgcatacttgaggaatgtttaattgactaagtgcctataatttctgaagataagaaaaaaaggtaatgataatggtgctacaactactcaaggtatgcataattatgatgtgccaactatgtccactacttgtgctacattagagcaacccatagtggaaacaattgttgaaatacctttgtcacaaaacaatttgcttatgtttcttgcgataaagaagagttgtgcgatgcttcacttatatccatgccacaactagtgaatgaatatattagttctatagtagagccatcatgtgttgagtttaaacatgttattcacattgttagcgagaatgaagagcttaaattgctatcttctttaaatacttggggatatattcaatttgatgatttttgtccactcaactgcttagagaagaaattgtttgctagatttgaattgccatgcccttattatgtgatttttcatgttattggcaattatgatagcaaaggagaatataatgtgcatcgagtagatttagttaactactattaggtatgtggtatccataaccctgacacaaatgttgctacacaatgagttttgtgtgttttcgtttgcagagttacttgcttgggcgaaagaaaagagaccgaatgtaagaaatgcgtggttgattgaagaagttgattggggaccaaaccaagaccttctccaagtcttctttcatctcaccatgttactttttgtccatagaagacaagagataaagttccatactctttggattcagatttgggcctcctcacagcatcaatttcaaatggacttagccgctgatagagaaggaattttggggcccattagtacttgttgtaaagcttatgaagtctactttcagatggttttggtcccttgtcaaaattcttaccgagctgccggaaatctgcaaaacaagccacgtacctcatccagtgcgaatccgatttgagttttgggccttgaattgtgtcatgggcttagccccaaggggtgtgcgccctaggccaaccctaggacgtccctaatcatatttattcagtagccgccatcgtttagagtcggtttttgcttagattattttgttaagaacagtttcgccgctagatcggtttgtagaaccccaaaattcatgtgtttaatcattcatatgtaatttggttacaatctatgttgtttttgcttgtgttcttcgattcgcatgcagggattagccttctcggcgaggtcaaccgggtttcggcacggttgataaccagagaagatgtggtgctgtgattgcggggctcagtagcatgtttgttcagatgccagatcgagttgtgtcacgactccgcccaaattgactatttatcaatacctatcggaagatcggaacctaacatcccttatcactttgttgggttaactattcctcgaaagtcttggggtatttattgtgtggctatctataacgggccgcaaccaaactccgtcaaagattaactctgaatggtgacgagcttcacaatcatctttgtcggaccatggcatttgcccgtcactgatgaccctaatcggtgatggggttttgttgcggcccatcaccaattacttttaactagaaaggaagcccgcgcagatgcgtgggcaatttatttattgtttgtaaaaagaatactaaaataagtcatgtctcactatatttcattataagaacccaacattaacatataatcgtaaaagaaaaaatatttatactgttaaataaaccatagaatttatatactaaatgaaaatggctatcatattcaaacagaaatcactttgtctcaattatatgtaaactcgcctatcactgtccttcgcaaacataatatagactttgatttttttttcttttattatacatctaattcacctatgcatgtttgttggtaatatacgaaggaataatttatattgttgaaattatttgtgctaattgttaacactatttacatgggaacaacataattaaaaaatgatataatatggttccgtatgacatttccgattgtacgtatgtatatatattttttctggtgaatagtaatcgtacgcacttactttttcctttttttaacaaatatttttctctcatatggggtagggtgtgcgtatatgtattcatgggtgggtatgtacatgtttatatgagcgtctatgatcgcctttacattattttttttaaaataaaacctttcaagaaaattggtgggatggcgtaaagcggcaccatagcggtgttgcttcttcgacaacatcgtcaggagtggctgctacatatatgcacaatttgaagaaaaaccatagggctataaagaaagaaacgaaaaactatccaagatgggatggatcgtatgcactcttcggtttttcttcttttcgatatcttttgtgtacatacatacatagggatagattagctgatttctaggagcaagggaatagaatagaccaaatctaatggttgaaaatcatgaactgatcggtttaagtgtaaattgatgactatatgttttgccttttcttatattttctcttatttattagagcgtcacataacatcttaattaggagtgtttgtaggagtgtaagaatgctattactcatactcacaatctatttgtagtcaactattatttgatgtggcttggtggcactctctatttacctatcatttgttcatacttgcccttaggctgagttcggcactgagagttcctaactctcctccctcattttccgcatgcacatttttcaaacagctaaacgatgtattttttttacaaaaatattctataggaaagttgctttaaaaaaatcatattgatccatatttcatgtttttttactaatacttaattaattatactctaatgaactgcttcgttttccgtgccagccaactctaacgaatgaaaatcagccttagtatcgtccttaatttaacctccgtgcttcatgacaaacatgtttattggatgtcagctaattattagacgcactgtgcatagataccatgtaagcaatatgacttggcaattggtagatagtatataaaacctatatacatagggataaattagtggggacatttggttgatatgttaggatattcttgattgacaaattatatattgtatactacatgttaagtgttttagtacataaataacaaatttatggttaagttctaaaatgcttatctgattggctactcacttagttatcgtgactatgtttaccaaattgctaaatagtgcgtatttacaaaatattttctatacaattttttttaaaaatcaaataaattcattttcgagtttataatacttaatacttaataaatattgcgctagtgacctacgtcgatttgtgtgccctggacatgctcaaccaatgagctagatggaacgaaggctaagtagaagataaaaaaaacatcaatatggtgccaaaagaatatatttgttctttaattgtccaataatatatgaatagagaaaacaaaaaatacttgaaaaatacatttatgataaatttagaagtgtcatttgtatatatgtgtattttttttgttgttggagtaatttttattctcgaaaatataagtctaatttaactattatataatctacatttttcaacccatttatgtttttcatggatttttcaatgacatgcgtctaattaaaatacaactagaaataacatattccctctatcctaaaatataattatttttagctatgaatcgggactaatgcttgttcaaaatcatagttaaaagttactatattttgaaatgaatgtagtacatatttacaccttaaagcataatacccaacttatatgtgtattattattcagtgtggttttagtatatttttattgtatcattgttatttggttatcacacaaatggcaaaagacagtggtacatatatatgtttaaagttagaagagtgttttctcatatgtggatttaatggtttcactggtttaatattatggatctactgaattaaatggaaattaatgggttaaattttttgtttataatattttttctaaatttaaaatattagctagacaataggaaggtgagagagaggactcttggaggatggaggaagtttacatacgggcctacgtgcgtgcacggggtgtttggagtctgcttttcatctaatctaaatctaaatgtaagaaagaaaaaaaaagtgcaaccggggagttcataagtacatacatacgtttgtttttcttttttggcaggaatactatgcacaaacttaatcggtagtttttgaaagatattttctggaatacgtacttacgtgtactttttaagtagtatacacatgtacatatatctaacttattgatctaaaataaatggtccaccaatttaagtgaaaatcgacggcatgtacaggtctaatctaacggtataaaataatgggtctaccaatttaaatgaaaatcgacggtgagatttgactgtgccacgtggcagcctatgagcgtttgtaggagtgccacatggtggcttgggagcgtttgtagaaagtttaatggacttttagtatataatagaatagaatagaatagataatagatagatagatagatgggccaccaccaaaccccattttcgataagggtaatcggtgacgggcctggttctgaggacttatatactgcctctcggtgcctatgtgacggggtattttgtagcccaacaaatataagtacctttgtaacgggcctcaagtcttcatcactcacagatggatcgattgggataccctgtcctatggtagtggaagtatattttctagactttgcaccaattaatacatataattatgtttacggagcaagtatttgaacctagcgagtagagtcaggtactcataactgcactagcacaactacactatcacatcaattgtgctttccctaagccattacattttcttattttttttcggccaatattgcagtgtctcgatataaatgtgtataagtatcattatggatatacaacatcctcaaattatagtagcatttacaaactactatgcatatccgaaccgcttgttatcaactagaaagtaatttatgagttatatatatgtgtctttaacgattgaaaagcaaatgttggaaactacgatgatcagaaaaccataaaatcaactcctagtacaaaattatattttaatattagcttataagcataaacataagcgaaaatatgaaatgattgggctttgtattccattaaaaggacgtaaaatagggaaaacccgcaccgatattttgtgataacatggaatgccacacattgaagtgaagataatggtttaaatctctaaccacagcacgaaacgtcccatgtatgcgtaaagaaggtaatagaatttaaacttcagtgagatagtagaataagtatatagtgcttcttttttttctcatgatttcttgacgtttatgggctaggcttcgttcttttcagatgatttacataattattaaagcagatgctccgacctttaaaatatatgtttgcttaaaataattattgcattgtttagacctacttattttcaactatttgttaagtgtattaactaattaaaatatttaatatatttctataatctagatgagtaattaaattgtacaaaataataagctcaataatataaatgatacggaggctaaggtacgttgcagccccatgtgcatttggcaatttggcacttggatatgtatatcaaggttgtgaccatccgttatttttgtttggcggtgttgatcctgaggcgttcgctggccgctattgccgtgggtcagaagaaattggctagtggctacgacggttgacctcaaagttagtgaaattggctgtctggtggttttgggtgccaatggtttttcattctcgggtctctgaggccctgtttagatgggactaaaacttttttattaaatgtttaaatactaattataaatattaaatatagactattaataaaacccatccataattttaaactaattggcgagacgaatctattgagcctaattaatctatgattagcctatgtgatgctgcaataaacattctctaattatggattaattaggcttaaaaaaatttgtctcgcaaattagctttcatttatgtaattagttttataagtagtctatatttaatactctaaattagtgtctaaatatagagactaaagttaagtccctggatcaaaacaccacctcactgggttgggaaattattactactttatgtgtctcttttttaaaaaaatgttcagattcataacagtagattgtgtctgatatagtattagctatgttgttagtttctagaacagaggaagtaaaaacttttatttgtcatccattatgatattgcttgtgattcctactacactccctctactgaggtgtattatttagatatttaatattttcatgtttatctataacctctctaaatcacatactactagaaaaacaatttttaccaacatatttttattttctcaggtggagagaaaaaaatactctcttataaccgtttacaaaaatagagatttagcctcgcctggcaaaatcaatttttatgtttggagtcttaagagatccgcctataaaaacatttattttcataacggacgtccgaatatatgatttttgcaagccgtccgtaaaatatggggatcctattaggtcatggctcctctcctccatcccctcttctccctcagctctctctctccctgcacctactcccactacctcacactccttccccacctccatccctatccccccaccattgcctccagccgataatgacgacaacggcacaatgcttggatccgccaccggccacgacgacggcagcaatggcgaagatgacggctgcgactggctgcgacgatgacaatgacggtgcttggacaatagcaatgggattcgcttcctgctggcctcgggtgcatggatctgccgttggccatcctcgggagcgcggatctgccgtcggctgtcctcgggcgcttggatacgccggtggaaggagtgagtggtggcggctttgaccggcggtggcgtcaggaggtcagggtgggggctctcaggttgcggcagggcttcgaccgacgatgaattttctgctttatgatgatatctaatgaatttgttaaatgaatttgagtattgtgatgagttcgttgaatggatttggagattgtgataaatttgttgaatggatttgaggattgtgatgaatttgtgaatggattaggaggtttttgaatatgctcttataggaatgtttgaattttctgggtttttttgtggtctttaaatttgctctttacgcggccgtttgcccgcctacggaaatacactagtttcgcaggcctttgccctcaggcggttgggctggccgcctgcaaaaagctgatcccactactacaacaccgattgtcccgggcgggcgagccaattttcgcgtgtgggtgggcggtagagattggtgaataagatctcttaatcacccagtagtcccttaaagcccacatgacgatttaatctagctattccattattataatagattatacgagagaaaataaagtccagtggtggtacttacgattgtttaggcttgctaagtaccatgcatgtaaaaaatgttggctaccaaagcataagtatattttggtaatgccaaaatattttggcaacccagctatgtgtggtatcggtgaattttggtagcaatactattcagagtgcagataacttattaggacatttattttgcaggcttcgaaccaaaaatggtccttagagcatctccagcagggaccttaaacccagtccctaaataaattttgagggttaacataaaaaactagatccagtaaagaccctaaacctagcccccaaaataataaggccctcagatccacccccaagcccctagtcctgggggctccgagcatagccccatcgatatttttctggcgccaaacgacaattcactttcacgctctcgtcacattcccgcacggcaccacgatgctggatctcatctgggctccggcaccagcggccatcgattcccctgcacctccggcaagattggcacaaaaaggtgagaatttcccctacctctgtcgcccatcatccgcaaggtcctccggccgccgccctcacgagtccgccgtccacacagtgtcgcacgacctcccgccgtcggtccgcacgttgctgtccacacaccaccccgcactaccatggtcctcctgctgcacggccatcgtccctaccgctgtccgcccgcatgccactatccgctcgccggcaggagaaccggtggctgcccacccccacgctgccccattggcccaacggatggagggccaccgccttcgcactgccggagggccaccgctccaagccagcctacacgccgccctatgctcgccgctctctgccccctacggcttgtttggcaccttgagggaatgggattgggagtttacacgagggaattgatggtgagattaagatgggaatttggtttttattcccaatatcttgtttggcagaggtggtggaaattgacagggagtttagttggagattaggtcattaatgaaaatggatggctgagatttgtttaggcaaagcaaaggagaaattccctctcaattaccacccctacccaggtattgaaaaggagggagttccttcctcaattccccatccccatcccaccaaaattcccttgtctcctgaccaaacaaaacaaataatagccccatccctctaagctcccaatccctcctaaaaactccctccaaccaaacggaccgctagagttttctggattgaactaatctctgtggtaggagtactactagcagagaagtattatacttgaccactttttgtgttagacattgatttgtttttatatattttttttagaactgtaggagtagtagacttcttcggtggtagagaagaatctcaaacactgtgcttgtactagtagcactgcattggatcgtgggactgtacatactactagcactgcactgaactgtcgttgctatggatcactaggtgtttggatccagggacataactttagtctatgtatttagacattaatttagagtattaaatatagactacttataaaactaattatataaatgaaagctaatttgcgagataaatttttcaagcctaattaatccataattagagaatgtttactgtagcatcatataggctaatcatgaattaattaggctcaatagattcgtctcgcgaattagtccaagattacggatgggttttattaatggtctacgtttaatatttataattagtgtccaaacatccgatgtgatagggacttaaaagtagtcccatataaacaaggtcttatgtagcacttctttttataggctttgagtcttaaatatatactccgtactgtgtattattatgaatataattgtctattttgttatttgagatagtggaaattaaattttcttattaatttacaatattgtgatggtagtgattattttatatggatttctacgatgatgatgatctccttgctcaatggtgggagcaggaggaagcgtctgacgacgatgactactatattgcagctgctcttcttactgacatagagcataagagaaccaaaaggaagcatcgtggttcagtcatgggtcaagagataatttacagggacagatttgctggcaatttgcgcatagtggctgattattttgcagatcctcctatatatagtgcaaaattatttagaaggaggttcaggaggatgtcaagggagctctttttgcgcatagtggctagtgtggaggcacatgatgactactttaggcaaagaccaaacgcggtgggtcttcttggtgccactgcattgcaaaaggtgtatggtgcagttcgcatgcttgcatatgatattccagccgatagtcttgatgaagttgtgagaatttcaaaaaacaccatgatagaagctttcaaacactttgtcaaggctgtggtggatgtgtttgctgaccaatacttgagggcaccaacagctgatgacactgcaaggttgatggctatgaacactccaagagggtttccagggatgctaggttgcactgactgtatgcattgaaggtggaagaattgcccaacaggttggaaagggcaatactcagggcatgtggatgggccaaccatgattcttgaagctgttgcatctaaagatttgtggatttggcattccttctttggattaccaagttctcttaatgatatcaatgtcgtacagagatcaccactctttcaaaggcttacttcagggacagctccagagctagagtttatggtgaatggtaagaaatacactatgggttactatcttgctaatggcatatacctttcctgggccacttttgtgaagaccatttccaatccacagggtaacaagagaatccattacacaaaagttcaagaaggagtgaggaaggatgttgaaagagcatttggtgttttacaagcccgctttgcaatggtgaggggtcctgctaaattttgggataccgagaccctatggtacataattaatgacagcttgtgtaataatgcacaacatgttcattgacagtgagcgagatgaagatgtagacttcgattatgatcaggggatagtgaggtgttgaggaaagaggagtaccaacgacgcaataaatttggttagagaagtttctacagatacataaagaaattgaagaccgacaggcacatgagcaacttcgagatgatcttctggaacatttgtgggcgcttcatggtgctcgatagtttgtttcgttgcattttctgtcaactatcggttgtgttcaatactttcttgtaggacatgtcattttcatgttaaaaattttgaattcaaatttgaatcatggtgtttaaaattgtaattttcaatatggttgaatttcatgtgctagaattatttgtgtttaaattattgtgatgttaaagtagacacaaacatacaatttatactaaaataaaagagaaaaagaaataggggctaaaatatgagagctactgctagagttaatgatatttttagtgtcctaaagaattagtggcagcccccatttgatctttagggctctaaagtaggggctgctgctggagatgtcattttgctacaagcacgctgatcagatcacacctgcgatgacgtcggcgaggtacgtcctgaacctccccatgtgctccggcggcagagcaatgcccacctcgatgccgccggagccgccacggccctccgccaccgacatcgcgccggtcttcgccacggacgcgatctccaccttcgctggcgtcccgaacccgaagtcgacgtcgtacacgcggaacctcggcgacccagccaccgagaacggcgcgccgtcccttctggcctcgacgatgcgctctgggtacctctcccagtatccggtctcgccgtgcaccgcctcgtcgatggcggcggccaccgcggagcacgccgtgaagacgccgtcggtcacggtggcggtggccgccgccttcctgggcatcgaggcgtagcacgggccgacgcagttgccgaagtacctgcttgggacgcggccctccatccgccgccggtggtcggtgacgaagaggaagtaggcgcggccgccgccgtcgtcgtggccgccgtcgttgttgtggccatgtgtagctcggaggtggcacagccacatgacgccgtacgtcgcgacgatggacgtgcaccgaggcggcgggacgacgccgcggcgtgccgcctcgccggcgacggcgtccttgatgctctgcagctgcgctgacgacagcgcgtacgtggcgacgagcctgtccatggcgtcgggcgaatcgaaccctttctgagccctgggcgcggcgaacaagtcgtggatgtccttgcggtcaacaatgaagctgtggtccatgactggtggctccggcgggacatttccggcggcggcgcaggcggaagccgcccaggtgtggaggaagtgcgtcgagctcgcgccgtcgcaggcggcgtggtgcacggtgacgccgagggcgagaacgcgcggcgccgccggccgcaggcccaacaacacggtggcctgcacggcgagcaccgcgccgccccgcgggagcgccggcactagcggcgcaatcgtggcaacttccctgggatcgtccgtggcaagctcgtcgacgccggcgccgtcgtgctcggcgacggtgaaggcgaccgcgtcgccgggctggtagaacagctcgtaccggtcggtcttcccgggcgcgaggcggatgcggccggcgagcgggtagaaggcgcggagcgcgcgggacaaggagtcggcgaggtggaacagggcgccgtggacggcggcgccgggggcaaggcggtagaggaagagtcgctcgacgggctcgacgggcttgagcggcagagcacgttcggagagcgcgtcggcgtcatcgccggtcgacgacggcgtgacgtgctcggttcggaggacgcggaggcggccgccgtgatcgtgaggtggcgctgccattgccgcctcgtagcttgtagctaattaagcaatgtgcgagagaggccgatcagaggacgaatgctctcgtcggatgatcagaggcgcgtcgccacagcgtgacagcgggcacgctgctcggctcttcgactagtagtacttatagagttaacgccgatcattatgccgaaatgttacctacggcaatctaccggatgaacgtccacccggttttccatgtaaactactaaatgattattaaaaatatattaatatgaaatgtatcactcaacaaaattaataaaattaatatgtcagttcaaattcgacttcaagttataacaaaaataacatattaaactctaactagtacttatcgaaactgaagttgaactggtatatttatgaagtgttatatttcatattaatctatcttgttatttttctaaaacatttttctataaccatttaagtggcatgtaataaacggggtagatattcacccggtatccaccctagtggttgaaaagtttccctaccataccaacggcccatggttgtcaatgtttttttttaactcaacttgattttgctgccccatcacttatttaaaaatttttataattgattatgaccataaattacttctgatgattatattatgagtgatgaaaaatggatgctcatattcatgaagcttttacagacatcaataatatagcatatctataacatatttctaagtgtttatagttttctttagaaaaaaaagccaggcaatcaaagtctaaactagattagtgtccacgttaattttattcgagaatggaggaagtatatatcttgtagtaactccgtcccaaaatataagaatctattactagatgaaacattttatagtacgaaaacgtctcattcagttttaggtttttacattttgggacggatggagtaactaattactccctctgtttctaaatatctgataccattgactttatagtacatgtttgaccattcatcttattcaaaaacttttgtgaaatatgtaaaactatacatatacataaaagtttatttaacaataaatcaaatgataggaaaagaattcataattatttaaattattttgaataaaacaaacggccaaatatgtttagaaaagtcaatggcgtcaaatatttaaaaacggagggagtagtctttaatacaatttgaatacgatgtcttttctatacttattgagagcggaaaatgtgataattagcaaattgtaacacatactcatcttctaactttaatgttctaatttaccgacttgaaattggcacttctttctaagattatatatggatgatagattttgtgtagatcattaatttgtgttttttattctaagattatatatggatgatagattttgtgtagatcattaatttgtgttttcaaaaaacttttacatcagttttgtgtagatatttaattttgtaccatactttttcttgacatcatctctactattataaaaattaaagatgtttttgcctgtattttggtacgtcattcgtatttgagtcggtttttaagtttgtttgtttttggaaatacatatccttgtttgagtcgattttaaattcgttttcttttggaaatataaaaagaagtcgtataagaaatatctttaaaaaaactcgcatgctaacatgagaagaaagtcggactcctaattacagttcattattttcttaaaaaaatatccaagcaaattcccaaagtgaatttcatcctagctaaaccgtataaaactagcatcacccgttgcaatgcacgggcatttttctagcaatatacaatatttgattcttcactgtaaacaattgtcgatattatataatttgattcttcacttttattttggtcattttgctatatgactttgtttcaataatttgaatttgaatttcaaattatgacaacttcaaacaacatttataaatactaaatgatttcaactgaaaaattcatcaactacaaagttgtataactcatcaatatctataacttttattttgataatttcttcatccgacaaaatgacagtaacattgttcacaaaaaattacatctctctcttgtagtttataaactatataagagatatgtacattttgtgaacaatgttaaaaataactttctcggatgaagaaatgacccaaataaaagttatagatcttgatgagttataccactttgttattaatgacttttcagttgaaatcatttagtatttgaaaatgttgtttgaggttgtcatattttcaaattcaaattgaaactgttcaaaaaaatgttatatagaaaaataaccaaaataaaagttatagatcttgatgagttatacaactttgttgttgatgaatttttcagttgaaatcatttagtatttgaaaacattgtttgaagttgtcataatttgaaattcaaattcaaattattgaaccaaagtcatatagcaaaatgaccaaaacaaaagttgtagatcttgataagttatacaactttgttatgggtaatttttttcatttgaaatcatttactacccgaaaaactattttaattgtgaggaaggaggcaaaatagacatctcggcgagagaggaacaaaagggctgggccggcggcccaaagagggagaagaagggagagagaggctactggctgagggagggagagagaaacagctgaaaaaggatgagaggaattttaatttgttttttatttattttaataagttaaataaactttgtggtattaaaattagttactgagcaccaaaaattcatgaaaaattttagagaattatttagaccacgtagaatataaaaaatatttccggccatgatttttaacggaaagttttagttttctcattaattcacttgattaaattgttttaacttttaatatatttttttagaaatgcattatataaatttatgacgtttgctttgtgcccgttatgacaaattaatattcgtcgcgatgtcccattgaaatactttatgacgatttctagttggtattaacaacgaacacctttttttgtcactaagccacccatctcatactaatcgtcataaaataaaatgtgctagtgacgaatagctccgactttacaaggaattcgtcacagaagatcatatttctcgtagtgtccaattatcgggccatatcattacagtttggctgattatggatctgtgcttctccgacctaaacaatgctgctgcccacccgatgagacagaactacggctaataaaccgctttcgtggaaccgatgatggtcggttcgaggaaaccgatcagttttagctagttttcgtgcagcgatgacaaaaagctacagttttttttatcggttttaattatgttttgagaaatcggtaaggagcggtttttaatttcaaaacaaaaagctaaaacaatgaacgaaacacgagcacctgccctatatcctccgatgagctaaagctcaaaagcttccagcaatggaagtcgcatctcagccatcacctcccccaacacaaagttgcatagacacttccaccaccttgacaatgagccaaccgtcgtaacacaatgggatcaagctgcttaggacatgtacaatacaccaagagtgcttagaaagatcgatacttagaaaaaaccgtctcaaagttaagaaccacaatctccaataataaaaaagcgtattatggagatgggcgtagaccgaggtgacaacgctagattgcgtagactgaggtggcagcacgagatgtgcttgcgagctcaatagatctcgccaaacatggggtgatggcaacagagatggagctcggcgatgttggcatcggctcaaccaatactgccttagcgttgacgaagcacccatatcctccatagggcacgaggggctcaacgagatattgagctcaatcgagctggagccgacgcaccgatatggtgaataagactctggctcgccacgttggttcactacaaatattgttactacccgatttgtttcatctgtttagtttttatttatttatttgttccattctcatattatcttattttcttataattttatgcattgtttttatttctttgttttaccaatcagggcaatagtatacatggacatcgcatgttttatctgttattcaaacaattaatcataaaataattataataaatgaaaactcgatagagatatcgttgtacaaatatataggttaaaattaattcaatttaacacggttaaaaatgaaaaacgtacccatagttgaggtgtgcaggagttggacatctggctctttcacaggtgaagtaataacgagcatgcaggactctcttcagggcgattgatatgtacagggagatagtaggttcaactggtacgaatagtaggttcaactggtatgaatagtttccgtccgtccagaccattttttatttcggataggttcggtcggaactattcgaaaattctcggatttagaaacgattggattttttttctcagaaacgaaatgaatacagtaagattactatccatcggaatcggaaaatgatcagaattaactatccggaatatccacagacatggatcaaattttagagaaaacacgtatatatacataacttttttatatggagtcggatgaagacaaacttttataaaaaatgtagagctcagtgagatctacaactttcttgttgactattttattatataagatcatttaagggtctaaatattcattataaaataccatatatgtttttacaaaatctcagatctacaattcaaacgacatctgatggagacgtattccatatcaaagttgtagagcttaatggaatttaccactttatagtttataacctttgtatttgaaaatgtttaaagtataaaacaaacactctaagttttgaagatgtgaaataaaataaaaaaagacatctccaatttatacaacaagaacttgttaagttgtttagtgaaatggtaagtaagctatacatgtagtaaaatgtcttgggatgaggggaacagtcatgaaaatcgattttcacatccttttgtaggaccgcctacaaaattgatgatataaatgttggagacgttgttctaaaagaaatatgcgatatctcttctctcaaatatccgttgacgtattcgttccgtttcgtattcgctccgtatctgtattcgataataatcatttcatttccatatccgggttttcgattcagattaaaaaaataaaaacgaatatgataaagctagttttcatccgtttccgatccattttnnnnnnnnnnnnnnnnnnnnngggaaatgtcatctctggtgctctttctatcaaccaccattttcttttatcacgtgccgcgcatagaaagagggtagtatgtgttgacgaaaaaatggaacacaccggtctgggagatctgcttaactccagtgcaggtccaaaggttggtgagatgcggacgtgcctgtcagtttgatcctgcaactgacaagatatgcaaatagtagatcaaacagccgatcggctgactgttgacgaaaaaatcgaacacactggcctgggagatctgcttaactcctgtgcaggtccaaatcttaatgagatgcgggcgtgccagtcaggttgatcctgcaactgacaagatatgcaaatagtagatcaaaatagccgatcgactaacaagccgatggagtagttccagccgatagccgataatagccgatgccgataccagccgatagcgatagggtttaagcaatcggctatatgtccaatgtagataatgatataatggcaatcggctgatgatgatgtaataaaataacaatataatccagtataaaccgatcggcaaataatgatatgataaataagcatcgatccgaaggttaacgcacatatcggctggaggtccgacatcatgaaatccacaagattagattaaacagtgaaacctttgttgtcatcggctaaatccaacttatatgtatttataatccttatgagtcgatgcaacgtccagataactcaccggctgaaaccccgatgaaacctttattggcaatcaagaagcaggctagagattatggttctaagcacgacttagtagatcaaacttaactgatacagcactaagtatgaaaagaaacataatatctagacaatcaagccgttgactgagtttgcagggtgatagatgtctaagctaatctaatctagcaacgcaatttagccgataacggcagaaaccctaaaacgagaagcagacgatagagctaaattgatatgctaagactagattaacagagacatatgataaataggtaggcaaatatatcatccaaaccagagcaatccaagaggtcgaatgtactgatgcggccttgaatgacgccgacgtaaacgatacaattgcctgggccggcgaaacattagacttaccccttagcgggagatcgaacactgatgcagccccgcgtcaggtgccaagtcccgccggacgataaaataaagtagaaaaggtaaaaggtggcgatgcgccgaattgtattgatcgtgaggatagattacataaaccctggctgtatatatttttacctatgggttgatacaagtccttgtcggacaagaaagaaactttcctaaagataaaaggaaaagataaagtccttacaggacactaaacacactttcctaaagataaaaggaaactaacaaactattcctaattaatagataatttgccatgccatattctctttaaactcggtctcttatagataagctttctttagtagatcaatttccttaaccgaatatagcaagaatccgacaactgacgacttgacaactctcatcggctaatctcaggacttcgaagccgatgctgactctaagccgatgactactccgggcttaccaaatttaactgttaacattgacaagccgataaagtagttccagccgacagccgataattgccgatgctgatactagccgatagcgatagggtttaagcaatcggctatatgtccaatgtagataatgatataaaggcaatcggttgatgatgataagtaataatatagcaatataatccagtataaaccaatcggctagcaatatgatatagtagaacaagtattgattcgaaggttaaagcacacatcggctggaggtccgatgtcatgaaatcaacaagattagattaaacagtgaaacctttgttgtcatcggctaaatccaacttatatgtatttataatccttatgagtcgatgcaacgtccagataactcaccggttgaaaccccgataaaacccttattggtaatcaagaagcaggctagagattatggttctaagcactacttagtagatcaaacttaactgatgcagcactaagtatgaaaagaaatataatatctagaaaatcaagccgttgacttagttttcagggtggtagatgtctaagctaatctaatctagcaatacgatttagccgatactggcagaaaccctaaaacgagaagcaaccaatagagctaaattgatatgctaagactagattaacagagacatatgataaataggtagacaaatatatcatccaaaccggagcaatccaagaggtcgaatgtactgatgcagccttgaacgacgccgacgtaaacgatacaatcgactgggccgacggaacgtagcacttaccccttcgccggagatcgaaagccgatgcagccccgcgtcaggttccaggttctgtcggatgataagtaaaaacctcggtaaagagggtggcgatgcaccgagagtagttgtattcatcgatagattgatagattataatgacctcgggtgtacatatttatacccacagggagatactagtccttgtcggacaagaaagaaactaaagataaaaggaaaagataaagtcctcatcggacactaaacacactttcctaaagataaaagaaaactaataaactattcctaattaatagataacttgccatgccgtatccttcttgaactcggactcttctggataaattccctttagttgatccgactccattgaggacacggttgctggcgatttaacgactcccatcggctgattctataactctgaagccgatactgactctaagccgatgatgactttagtcttatcaaatttcgtcgttaacagtatgtactctcctttttcttccgcagggccagcggaaggatgacaccggccgaaggcagaaagaaagagagtacgaagaggggtacatgacaacatgacggccagagcttgacagtacaaaagaagaacaagtccgcaggttggttttggagctcgcatcatcgaatcggtagtacaatattgcagcaaagctttcaggtacgaattaaatggtcatcccacgtgtttttacttgaaattgatgtacaatcaagtaaggtcctgtttagttctaaagtttttttccaaacttccaacttttcatcacatcagacctttcatacacaccaaacttttctatcacatcataccaatttcaaccaaagttccaaacttcagtgtgaactaaacacaatgctaacagaatctgcataactgacattacacagtgcattaatttcagcttcatgtcaatatcaaaagcgattttttgtaggcaccctgtaccgcacatcacaacaggcatagtacgtaatggcacccacttgtaccggttttgctaattggcgcgcgcacgccagatccgtatctggcgcgcgtgcccctccacccgccacgtgtccttttccttttagcgattttttttccgcattgctttttttttgcgcgattttttcctttttctttggcgcgacttttttctcttttttttggcgcgattttttccctattgggctccctcccctcggtgtatttttcatctttttggtatactttttgattttttttaaatttgaaagttttaaaatctgagttgaaagttttcaaatctcgagttgaaagttttcaattctcgagttgaaagttttcaaatttgagttgaaagtttttaaatctcgagttgaaagttttcaaaaattttcttgcaaattgaaaattttcaaagtctgagttgaaagttttcaaaatttgagatcaaagtttaaattttaagtcaaaagttttcaaatgtaactcaaattttttcaatctattagtaaaaaagttatcctaagaaaataaaaaatctattcttaattacagtcattatccttgactaacagagttagttatggtaccgcgtccttccaagaacgtgctccgcgtgcgcgctagttctgctcgcggcgcgtacgcgcgtactaggaacgccccgcttgtataggaacgccccgcttgtacagtacatcagggtaggcgtaagggaccatatgtggaaaccaattttcacatgtaacatatgaaaatgcccccatttacacagtcttaagtgatctccttacgaaatgtttgatttttcaaagcagtcgcttaagatatatagccgcttatgaaaatgatgatatttatgtaatcaagcatattaaactgaccgccttagagaatgtgtttatcgagatggcgctcttaactgtctgtatatgtcctgtcttttcatctacttcgcgaccttcaacaatcatgcctaatcagtgtgtgcttatgcatcatcactgcatttcttggtttcaaagcccaagaaaccaggaagaatctcaagagaaaactaaactaattaaacaagaaactgattaacttgtcatcagacagacagagcgctgctcgctgaaattaaatcaatagtattaagagggggacagtggcagaggccgtatctaccccgggacggcctgcgtcgggaaaggagcacctcctcctcctcatcggcgtcgagcagtcgcccggacagcgaccggaccagaccggaccagggcgccgcggaggcagcaagggaagggaggagagagagggcgcgccgccgtgcgcgccttgccggctggccaccgccgctcactgcagcaggggagggaggagagagaggggatagtggatttaggaagagagagtagagagagattgagaggatagaggggaaagagaggagagtcttataggtggggcccacactactttttttaaaaaaattttgctgactgtactcacgtagaactgaaactaccccgaattaagccggaggttatttgtccgattgtatagttaagggtgtaaaatatccggtattcgagtttagggagttaattcaatcgcccatgatagttcaagggtgtaattcgtaccttttcctagcaaaacacacaacgtttaaccatttgaaaagcgtacgtgcggaacacgatggagaggagttggaaccaaggatttaaatctccggctatagctgccgctattgccggagatagccgctgggagaagcaaccactaagatatgtccaatttggcgctacacattctatggcgctattagctgctcttagctggctatagctgctaaatgggcccttaaatagcggcagctaacttggtgggctgagagcctaaaactaaacaatggggcatatagaaacaattcaaccctaactctatcactctttcacagtcactctgtcgctcaccctctcccctcgaaaaacaggcacagcggctgtgcctggaggcgacggcggcggctgcaacctgcagcagcgacggcgatgaaaacagcagcggctgtgacctgcagctccacatggaggccgcaacggtggcgcccggaggcggcggctgtgcgtatgccagcaccaagcatctgcggcggctgtgatgggtggtagctgcaccaatccctccctccccactcttctctattctccctcaagctgctacggaggcagttgtgccgaagacagtgagggctgctgggcagcacaaatcctctccctattcttcgctagtttttctttttcctaacaagagacgtgcaagatttttttgctatgattctctgatattgaatgtggtattgaactattcaatgtaatatcaagtgtcttggctctttaaactgtacaagaattgcaaaatttatgttagtttttgtaaaaccgctaatgagcttagctgcagcaatagccagctatagctggttgttgacagttcgatcagtttcgaccgtcaatattactaaaataggggagaactagtgatgcttgcaatgcataaatatgttagaataataatattccactagtattaggtatacttaccttttgcagagaatgacaataaagtggaggagaatcaacatcaactcagatgataaatcaatcggatgatgtcgagaaccagacttatgtatgaatgggccaagaactcagaaataacacgacacattgggccaaaattcacaagtctacggaggaggacaacaaaggaggccgccagccgaagatgggttggggccgaacccaccgcagctccgtttgatccagggttctcctggacggctgagattgctccccaatgacggttggagggtattaccgactattccaaccgttacaaccgtcattgggaggctataaaaggagcaatcatcctcacttcactcacacacctcaagcaatagctctctcatttatctcaagtttagtttagtagtatctagctggtggaataggaacatagtagaaatcaggagtccggaagccttcggaagagtttgggtatggctctagtagcttttctcttctcttttgtaagccaagccttgtacttttagtagaatactcttctaaatacatttatggtattgaaatacattccgagtatatgagtacctactttacattatgttcatcttatactgaatatacggctagcttatctgggagatgctttggtgcgggtataatgtttgcctatgcaattactctatgtcatgacgatgatattagagtagtatctggtagtttagacgtggtgtctagattacgggatatcattatttggggttatatattgcgaatgagaggtgggctgctgatagtgacagctcagtacgggtattcctccgcgccggtatataatcctaagttaattccctagggaggatactcctccgtatttagccccggttgtatggtcatgacgggctgtcgtaaggaactcggcagtcaggagtggcttctcgaagtaccaggagggcatcggatagagggtattagttagtatatcggttaactagaatgtatgtatactatgtatattagaaatataggaatagattttcttttcttttctttccacttagcttaggtgatatattatgagaatgagtagttaatgcttgtgtgtcactctacccttggattatcttaacccctgcttagaatatgattatcacaagtaatatataaattattagtcaagttctctctacatgatctttccacgggataaaataaatacgatacccttggaatactctcgggtgaaacactacaatggtatatctgtgggcttgcggatgaactctgtaaccataatatatcagaagtacttttgcgccattgctgggaattatatttctagtaatgtcgttaagaaatacgaacaagcatttctggcgccgttgccggaggagattcataatagagactacttgaactaatattttatatttgcctctgtataatcattttcctttgcaggctaaccttggttgttttcacttttgttgtgaaaacagggtagtgcatgactggtttcaacttgccgaaaaacttcaaagaaaatccagaagctttctttcggagcattaggccgtgagtcgctgctccgcagaaaactctaccgatagataaaccagccgtaccaacgccaccgaccttcaagactatggctaataagactctccgcgagttcgctgctccctctgctgacaatgtggccattgggccgcaggtcaacataggggacgtggatttcgacttgaagtccagcctcatcacgattgcgcaggcaaacccgttctgtggtgagcctaatgaggggtccaatgctgatctgcaacagttcctggagatctgtagcacgtacaacatcaagggcgtcaatcccgacaccgtcaggctgcgactgtttccgttctcccttctcgggagagcgaagcagtggttctatgtgatgaggacatcaacaccaacgatacatccacacttccacaattacaacttcatggtcctattacccacgctcgtgcatgtcaactcaactatcaggaacaatggagaggatcaaacggggagaggattcgcgcgggatggattcggactacagcatagcacaaacttctgacggccgccacgacttcctgcgaactccgatttgggcttgtaagtacttcatggaaagcttgtcaagtctactttcaaatgaatccagcctcatgtccatatcagttctgggcagccacaatcttcattttactaccgagtccttttctgtccacggtgccgcgtcacctctttgggcccaatgggcagtgtattaagttgggtccattagggacacgtcgtagggtgagagaacgaccccagcactcctgtggtcgtcctcttcctcttcttatagctttctccgccgccaagaataatcgggttttgtttagatcaaagtatagcgtcgctactttgccgagttgatcccgtgatcgattagattgccggattgcttgttattgaaccccacttgttacttctattgattcaatccaacatctttgattcgcaaatttagttgcttgttcatcttgttcttgctggttctcgattgcttgcaggaacaaataccctcgtagttgggctgatcgtgcatccgtcgagattcacgaccacctctggagttggggtaacgattgctaaggcgcaacatccccggatagttgtagtcggatcgccaacgtcactccatccaatcgacttatccctctcatcgaaagatcgagacaccctcgagcacatcaggtggtatcagagcccaagttgctcggtgagagatttcgtaattttcttattcctacagtccagaaaaagccaaaaaaaatattagattagttttctatgatcctactagtactgcttagttagggcttgttgagttttcgattgcatcggttgtgttaatttgttggttttagtgtttagtcgattagagtttcgagttctggccaccgcacatcgccatttttttctttcatcaccaccatctcagccatcaccacttctgttgtcgtcgggatctacgaaaacggaaccgcctcgctgccacggttctattttagtagattttagaagtttttatcggttggttttggagttgtcaagttgcatataaggtttgccgagttggccgtgtttctgtttcggctgtgcttgtgtctgttgcgcgaggaagaagagagaaaggggatactagatcggtttttggatggagtcttacaatttgtagattggtttctatttgggcgccatgcagaagagataaaaaggaatcgatttccttctttcattttttttaaccgagtcccacccccttgcgtcggtttccatccccctctcccaagtccgactccccctctcgtatctcggtttgaatctataccgtgagttagctacataccttggtgaattttcgtttggtgtcggtttcaagatctgtttggaaaaacggaactggtgtaaatttagcattccatttttgtatagttttattttttggttcggacttttacacttgagtccctgtattttttatatttacattggagtccctataatcttacattgaggtccttgagttgtttttgctaaagaaaatacaaaagagtgagaaacggcagaaaggtgcaaaaaaaagagaaaaaaaagccgcaccgaaaaaaaagagaaagaaaaaagaagaaagaaagaaaagagatgagaagctgacttgtgtgtgagtacaccccccccccaaaattcagtgttgtcaccaccatcttcctatcatcgctcatgtttggtttgtgtattgtggcgtcctttgtggttaggctcgtgtctctacttcggctagcctaggaccagcattgtaccaaccttgagagattattcaacttgctttgactaacgtggtttctagtttttctttgactcattacacagcccacccatagctccaccggttcgactaacacttgacagggattcagctaccaaggcatcaatacaccttctccagaggttcgtccaagtccgacggttgccatcacctcctgtttggcatgatgagaattggtaagagcttgtggaacaggttgagagtgagtgacttgatagatagaaccacatccaactagttttgtaggattttttcttcttcttcttcctttttcatttgctgctccatagtatttgttttgtctgtttattttgtttctaaccatgtcaggtgttgagcattccaacccccactcaccccgcacaaaaggaattatttagcattttgacaggttagtgagggaccgcacacaagggctcgaggaggatgtttgtatcaccaatgaaaagcttggtcatgttgaacgcacgcaaattgattccaacaccaagcttaccaccttggaagcttctgttgcgacggtgaacaccagtcttgatggtattgtgtggcgtcttgatgagatggcccgagcatcccaccatggtagtgagatggatgaccatgactacgttggtgattctgaggatgatgcggaccagcgacgacatcgcttcaatcgccgtggtgtggctcatcgtcggccacgccgtgaggtacgaaataatgatgattcatttggtaagattaaattcactattcctgcttttgatggtaagtatgaccctgatgcctatctttcatgggagttagtagtagatcaaaagtttgcttgccatgatgttcctgaggataagagggttagggctgccaccagtgaatttactgattttgcttctgtttggtggtgtgaataccgtcgtactcatataaatgctttgccacctacttgggatgatttgaaacaaattatgcgtgctagatttgtaccttcatattatgcacgtgacatgttaaataagctgcagcaattgaaacatggtggtactagtgtggaagaatattaccaagcgctgcaaatgggtatgttacgttgtaggttagtagaggacgaggaggctgccatggctcgatttttggggggcttagatcgggaaatttatgatattctcagttacaaagagtataataatatgactcggttatttcactatgcctgtaaagctgaatgggaagtgcagggatgacgtgcacaaacaagggctaacattcctgcaggtagaactccatggacggctcggagtggcgctgcccccaccgatcgttcatcagtttcgacatcgacatctgcaccctccaacagcaacagcaacaaagcgtggccaacaccttctacggcccgctctcgtgcttcagaggttgcagaaaagcccaccaagagtgcctcctctgttgcttccacgggtagaacaagagatgttcagtgccaccgatgcaagggctttaggcacatgcaacgtgactgccctagcaagcatgttttggtagtcaaggctgatggtgagtactcgtctgctagtgatttcgatgaagatacacttacattgcttgtagctaacaacatagctagcgaggatgagaaacacatcggggctgatgtagcggaccaatatgagagccttattgtgcaacgtgtcttgagtgcacaaatgggcaaagcggagcagaaccagcggcataacctttttcagacgaagtgtgtcgtccacaagcgttcctggtgcacaatcatcgatggggccaccgggactaaaaatctgggggtatatatattcccggtgctccctcgtcttctccaccaacacttagacgtttttccatcgagatcgatctcggcttctccttcgccaccactgcctagggcaaccccgcgccgacgccgccgtcgtctctcgccgtcgcttggcggtcctcgccgcctccgccacagacgccgccgccacatctcttgggtgagagccgccgctgcctctctctctctctcgatctcgatctctctctccaaacctccgccgcctagctcgttgccgacgccactactacgccgcggtcaaacgccaccgccgacgaccgactttgacgccgccgcccccgcctcgagctcgccacgccgccgcgccacgccgccgggctgctacgccatgccgccgcgacgccacgccgccgccgggcccccacgctaccgccgcggcacgccgccgccgggccggcccacggcaccccgacgccgccgccgcgccgccacgccactgccgcgcgcgcccaacattgccgaacgtgattgaaacgtgaccgaacgcgaacgaatgtgaacgatacgtggacgactgtgaacgaacgcttaacgaacgtgaacgaatgcaaacgaacgtgaacgaaacgttaacgaacgcgaacgagcgtgaacgaaatgcttacgaacgtgaacgaaacgcttatgaacgaacgtgaataaaacgcttacgaacgtgaatgaaacgcttacgaacgcgaatgagcgtgaacgaaacgcttacgaaacgcgaacgaacgtgaacgaaacgcttacgaacgtgaatgcacttgtactaaaagtgtgagaacgaacgcgtttagactaatacattttcctggtaatacatatatgattatatatatgtaacttggcccgtttagactaatacattttcctggtaatgttgcagagaagacgttgtcatcgtccgtcaagccgaagtggtagctagccatcgaaggaattcgcgcaggcaagtgatgcaaagaagtgattgttagagatttaatataagattgttagacttagcatatatgattattacaattttaatataagatttgtagcgatttaatataagtttgttagacttagcatatttgattattacatttttaatataagattagtagcgatttaatataagattgttagagatttaatataagattgttagacttagcatatatatatgattattacaattttaatataagattagtagcgatttaatatgagattagtagagatttaatataagattagtagcgatttaatataagattgttatacttagcatatatatatatatgattattacaattttaatataagattattagagatttaatataagattgttagactaagcatatatatatgattattacaattttaatataagattattagagatttaatataagattagtagagttttaatattacggttagcaaatatgacctatagatctaacaaatattttttgtatgcacacatggctgatcgcgatgaggaacagatactatacgatacaaacgcagagggaagcagccagtactggaacgaagaagaggggaacgaggatccaaaccagtacttgaacgaggaggggaacgtggagagcgatgcggaggggaacgaggagggaaacgatgaggaggagtctactggaagtcatccctctgctggacagaagagggcacacggacaacgaggtgccgcaaagaagatagagggtcggcacatcgtaactgaggtggacgaagacggccgacctagtgccctagcagaagcagccaagaattttgtacaccacagcagttgggttgtgagggacaacgtgcctgtcagcacggtgtactggcgcagaacaagggcacgcagggataatgacagctttgtcccggactcagaaaaagagatgctgtggaccacaatgctcgagacgttcacgctacccgcaggtacgaagaacatagtgaaacagtggactctgaagaaaatagcagaacagttccagagcttcaagggagatctctacaagaaatacatcttgaagggactaacaccgaacttcgacgtattccaaaagctaagggatcattgggacgagttcgttgcttacaagacagggcaacaagggcaagcgatgatggccagaaacaaagaaaatgccgccaagaagaagtaccatcaccacttggggtcaggcggatatagcgtcgcaatgccgaagtgggaggagatggaggcaagtttgattgagaggggtatcgaaccggccaccgctaaatggccggatcgatcgaagttctggtactatgctcacggtggaacgcttaagccagttgatggctcccttgtcttcagtgatcagatacgcgacgctgccagtcgactaacggacgcggtggaagcctcttctcagggcacattccgacccgacagagagaaggaagagctgtcactcgccctacagattcccgagcatccaggacgaacacgagggaaaggcgtgattccgtggaagattggatttaaggaggacatccacacgtataggagtcggatgaggagcaagagagataccgaggcgaagattgcagatcttgagtacagggtatcgagctacgagctcagcatgcaagagaagatggcaaggaaggtggatgaacgtatggccgcacatcggtcccaggatcccagtcgtacattcctcctgcaatggtcagcccatcaggcaatcgtagcagctgcgcctcaacggggtaggtaggatcacagagcatggacgccatgcaaacccaggacgaaaccacctgccccgttgatgagatcacgcagcggacaccatgtgagctgcatattcccttcaagaacttatcaatcaaggtatgctcatagtttgatgatttttgacttgtacattccacaagttgctgcttaggttgattactaatagataacctctcatcacatgaaggtggcgtcgggaatggccatcccaacggacccttccgggacttaccactgcaggccgattccagcaggatactcgagggtcgaagttgagctggtagaagccgcgtacaaggacctcgagttggactacccaggaggagacggtgagacgcatctacgagacacaagacacgccattatactatggtgcaagcggtacatcatcctccctgggcgacaagcggcatctcatgcaccatctcctctggctccgccatctcctcctgcaccatctcctccggttcctccgccacgtcctcctgcaccatctcctccggctcctctgcctcctccgcctcctccacctccaccgtgtctgcctgcaccacccaagacaaggtctcgccaagctccaccgcctgcccgcacaagggcaacgaagaaggcgaaagttgatgccaccaaaaacaaggagccaccgtacgattgtagtcaagaggagcttgatgcttatgtggcaggagaagtgaagaggcaacttgagcctcggagtcctgaaaagaagatacctattgacccgagcgtgaagaactacttcaagggaatgtccgcaacaaacaaggaggccttatagatatcggactatgactgaacacttcagagagcctatcacaagaagtctaaaccagtccctcagcttggagaacaaccaaaccaagaggtcgagccgttggtgaccggcgaagattttggcataacggaattcatttcagacaccggtctaactgtggatcagctgattcgaggcgcaccaatcctgaaggcggaagtggcatacaagtttgaactcggtaaaccgcttgtcaagcctgagcagctgcagtccctaccgacatagatgtacaaattccatgaatggtacatggaaatgagcgccaagggtagagagatgttcggagcgaggatcagaaaccccgacttcttgcaaggagaagatattctctggatccatttcaaggatctcttcgatctgtaccatctggacgccctcgacgtctctcttctgagcgcatggattttgtgagtatctttgagttcgatttgtttcgttcaataattagctcctggcatatatataagcaataataatttcctttcatcgttgtagaatggagattcaaagggcccgacggcggagggtctacgatactgggttcatcgaccctcggaaaatcaacaccaaaatgatcgacaagtaagagaaagacacagaggacaatctcgtccatctcctaacatagcagcatttcaagacgtacatactactgccgtacaacacagagtgagtttttattgtcgttcgaacaaatttcgttcccatacatatagcatgtacattttcatatatatctcatctcatgcatattccagattccactgggtcctgtcattcttcgacttggacgcatgcaaagtcactgtgtacaactcaatgaataaagaggagaagatttttgacaaggtcttccaactgatagacaggtaatataatgccatctattccaaagtcgcggggaatctattgctattatgttgatctcgggtaataattaattaatcatagcttgcaactgcatatgtagggcttgggatcggttccgtcagttggtccgcgggacttagaaagaaaaacttggaaggaggtttcattttccagtgagtacatgcatgatccaaaattatattgaattgaatctctaattacagttaatataaagagtatattaaatctctcatcgtttctcatgtagtgtgcaaagcaggaccagggaactaacttatgcggctactacgtatgcgagtatgcgagtatgcccactgcctatcaaaccaaatatgcacaacacgagagctcgatgtacgtatacataaaccattcaaaatttcattgcgtatcgatttgttaagttgtttattaatttcatatattgatacgtcattattttttcgaatgatagcatattcacatgagggataatctcccacacaaggtttttatcatggctgttcaagaacaactgatgggattcatcaacgaagaagtccttaattccgatggtgaattctactacgacggatcgacaattcataacgtcggtccttcctcttctgacataacgccggcgtcgaagtggtagctatagctactgagcaaatgaattgtactatatatgcatgtatatatatatttatatatgtacacatttactttagtgttaatatatattttggtaacatatatgcacataaaatgttaagtgctttaaattatacatatgtgtgtaatatatgatttatacatatacacatatgcatatatatacatatatatatatatataatcaaccatgcagcaaacagggccatgcaaataaaaaaagtggtgcaccgatctttagtcccggttggtaacacaaccgggactaaagatggttcggccgaccacgtggctgaccgatctttagtcccagttggtaacacgaaccgggactaaagatcgatctttagtcccagttatttcacccgggactaaagatagctatctttagtcccggattcgtagtcccggtttgacaaccgggactacaaacggtttctccaccagtgccatcgtgagccactctgacggtctaaggccatctacaatgggtacccctaggtcgtgtccctagcaccctccatcaatttttccgtctgcgtcgttccctcgctagtccgcgcacaccctagctaggggtcgcgcctctcgcagctttttagccagggacgaagacgagcaacgcattgcagcgaccggttcctatggccaccgtgtctccagcgatagattccccttccacccctctcctctctctctttctctctctcgcccgttcccctctcttgggccctccgccgccacagcaaccgcccgagcagtggcgaggagcgggaggaggcgacggcaagagcggcggcgaggagcgggagtaggcggcggaggtcgagctcggcgtcgtcgacgggctaaggagcaacggaggaggcggaggatggcggaggtcaagctcggcgccgtcgacgggcttgaggtgcccgtgctcgcggccgagcagcacgaggacgacgtcgtggtggtggtcgtcacgctcggggatggcggcgacgagatccggccaccgcgcgccttgcccggcctcctccaccggtgccgtgctcgccaccgccgtccgccacctcgcactcgcagtccgccgcctcacgctcgccgtccgtcgcctcgagctcgcctcgcgctcgccgtccaccgcctcaatgcggcgcggccggcggcgctccatccaccggggggccagatccggccacggcagcgccggatctgccgcctccggggtcgccgccaccaccatcacgggagagagagagggagagagcggcgggagagagagtggcgacggcactctcacgtgcgtgcgatggagaaagagagagagagaaggggaagagaggggtagaataggaaagagaggaataggagagaaagaggcttttttgggttggggctacccagagtcctagacgtggcctgcattgtaaaggtgagtacgcctagagtacctcagttagtgagggtactctaggagtgtctcagattgtggatgccctaaccagtaaaatactccttgtttcttctttcttcctgccttggtgagtgccttcggccgtagagcaaagagcgagctctgttctttcttttttttccctcatatctctctccctacgtcatttttttcttaactactactcactcttctcttttcttctgcagttctactgctgctagcgagctctccttgaactcactggttggagggaagctatttccgatcgagctcgtcggttgtcgggggtgagatatgtgttctggtgaggaaaaggaggccagcttctttattttgtgcttggggtgagcgcggtcgccttctttgagcgtggagcatgtgaggatcatgtagcggtgccgtccaaaggctaagtatgcaggtgtttgcccccattcagtgttgtcagctccgacagtgtccatctccggcaagcaaacaggagccgataaactgatcgacttttgaatgtgttctcatgtctctacatgtgttctccatgccggtcagggtttcatgccctgccgctgctgcgcgaaccccgctttaccgttgtctttgctgccgtcagtgtcgccttttgttgttgaaattataagcacataatgatttaatttattccataaataaatcatgacattgcagatgtaaactagattgaacgcatcattagatctacacatgtaaactaagcagtaaaacatgaacagatcaaatatgcgcaacatgttgaacacgtaccgaggtggcggaaagacaggttgcacggcaggaactactcgcggttgcgagcgtcgacgaaggcgcgaagcacacgagcggagaggaaggcgagccgtcgcggacgaacagggagcagtcgcgcgaagcgcttccaaaaaacctcattgccgccttctcccggtgcaggacgtcgaaggcagaggttccgaaaacctgctctcccgatcgccggtgcacgccggcgagcgggatggagtagtctatgagcgacggcgcagtatagagtaggaggcaaaccctagattgattttgcgtgtgttgcgtgaaggcggcggctcggtttatatagagataggtcgcttgatcagggcgcccgcacgatctccactccgcgtaaccgaaccggataagtcgcgcgtaacttatccggactccacgccgttttcacgcaccggattttttggaatgtttccaaaacaaaacaaatctgaatttcccgcagcaaaacaaaactgcaaaagcttatccggactccactccattttcacgcaccggatttttcggaatgtttccaaaacaaaacaaatccgaatttcccgcagcaaaacaaaactgcaaaaggaggttgcatttgcgcaagggtgaggagacaattttgtggaccatttgacgcgtacgtcgtgcacgcgcgtcgcctgtcctgccaggccaggcgaggcgaggcgaggcgaggcgaggcgagcgagcgcgtgtgtttcccctcttctctccaccacacatgcttcaagtggctaggagggcatcctcccttttaaggaggtccccctctcctagaataagcaaggtggtactaaactccacatgcatgccatcccatgaggtgggcttttgtgatttttcaaagaattaatcttcgaatgggccttagcccatatattaattccaacaatcccccaccaaatctcaaaatcccactaagatttgcctttttccaatgtacagttaatataccagcggttcgatggagaccgattaaggttgaacatccacctagaactccaagctacacttactcacaacttgaacaatggaatacgtcttgaattgcaagtcttgtgcaagaaagtttcactcagagtcttatctggtactagaccgtctgtagactacccctcgggtggagcgtataagtcatactcctaggtctttagtaagctttctagaagattcacccaaaatctccatagactgcgaccaacagtcaagcttacaaatgtgagttctttcaagaatgctctacaggacagcatcttcgctaattaaagccaacagaactcattaaggcatagccaacctgccttgcagctcacgagagtacatgcatcttcatttagagagggtatagatcggtactctcctctagtttactaatggtttgttcttcccaggttctaattcataggatctccgatcacatagactgggataccaccatagtataactcacatgtgtctcaaacccatctccttcgatgcattatctatcacatttcgtgatagtcccttcgtgaagggatctgcaggtttctagctgtttggatgtaatccaacgttataactccagagtttcttaatttcctgacagacttcaatcatcttttcacatgtctagacgatttcatattatccttaaaactattcacttttacaattaccgtttgattgtcacagttcataaggatagccggcaccggtttttcaacaataggcagatccattaatagatcatgcagccattctgcctcaacagtagcagtatccagtgccgtcagttctgcttccatggttgacatcgtcaaaatggtctgtttgcaagacctccacgaaacagcaccaccacccagtgtgaagacatatccactagtggctttgatctcatccacatcagagatccagtcagaatcattataaccctccagtaccgcaggatacccagtatagtgaagccccaattccatagtacctttcagatagcgcattactcgctcaagcgcacgccagtgatcatctcctggattagaggtaaaccggctcaacttgctcacaacaaaggagataacatgcctagttgcactagccaggtacatcagcgagccaatgatttgggagtattccagttgattcctagcaatttttttgttcttacgaagcaacaagctaggatcataaggtgttggagaaggcttactatcaatatagccaaagcgattcaagatcttctccacataatgggactgcaagagtgtaatcccattctcacctctaattagcttaatgtttaagataacatcagctactcccaaatccttcatatcaaaattttgagacaagaatggtttaacctcatttatcacctcaaggtttgtcccaaatatcagtatgtcgtcaacatacaagcatagaataactccctcacccccaccatggcaatagtacacacatttatctgcctcattgactgcaaagcctgcagatgtcaatgttttgtcaaatttctcatgccattgcttaggagcttgtttcaaaccatacaaagacttcaacaatttgcacactttgccttcttgaccttcaactacaaacccatcaggttgatccatatagatctcctcatccagctctccattaagaaaagctgtcttaacgtccatttgatgaacaagaagaccatgtgaggttgctagggaaagtagcacacgaattgtggtcaatctagcaacaggtgagtaagtgtcaaagaaatcttcgcctcctttctgagtatagcccttagcaacaagccgagccttgtagttttcaatagtaccgtcaggcctaagcttcttcttgaacacccacttgcaccctacaggtttacacccatagggtcgctctgccacctcccaagtcccgttagcaataatggaatccatttcactacggacagcctccttccagtagtctccatcaggagatgcatatgcttctgaaattgacttaggagtgtcatccatgaggtacacagtgaaatcatcaccaaaggacttagccgtcctttgtctcttactccttcgaggagcttcactgacatcctcctcagagacatgttcatgtgtatgttcagtttgttctggtggtgtgattgtactgggaattatttcagagggttggctcgaaccactatgtgtatcgttcattgggaaaaagctctcaaagaaggtagcatcacgagactccataattgtaccaacatgcatgtcaggtgccccagatttaactattaaaaatctataggcaatgctgtgatgagcatatcccagaaagacacagtccatagtcttaggtctaagtttgcgcttcttcgttattcgtacattgactttcgccaagcacccccatctacgcaaataagaaagtgatggttttctcccaatccatatctcatatggtgttttgtccttatttctgttaggaactctgtttaacacatgattcgaggtcaacaatgcctccccccaccatgccttaggtagtcccgcggtgtccaacatggcattcaccaagtcagtcagtgtgcggttcttcctttcagcaatcccattagactcgggagaatagggaggcgtcctctcatgtatgatgccatgttcctcacagaataagtcaaacacgtttgagaaaaactctccaccacgatcagacctaagcctttttatctttctgtcaagttgattttcaacttctgccttataaattataaattttaaaatagtctagagcctcgtctttcgttttcaacaagtacacatagcaaaatctagtagcatcatcaatcaatgtcatgaaatatcgttttccacccttcgtcaacaccccattcatttcacaaagatctgaatgtaggagttctagtggtgccaagtttctctcctcggcagccttgtgaagcttgcaaggttgcttcgattgcacacaactatggcacttagaacctttgacaatggaaaacttaggaattaaacacatgctggaaagctgagacatcaagccaaaattaatatgacataaacgtgagtgccaaacattagcctcatcatccacactgccacaaatatggttcacagacttattgcagaaatcagaaagggaaaagcggaacaggcctccgcactcataacctttaccaataaaatatccatgtttagacatgactactttattagactcaaaaaccaacttaaatccgtctctagtcagacggaagccactaacaagattcctgtcgatagaagggacatgctgcacgttcttcagctgcatgatccttcccgaagtaaacttcagatctaccgtgccaacaccatgaacagaagcatgtgacccattccccattaggacggtggaacccggtgcgacctgataaggagaaaacaatgagatgtcagcacaaacatgtacattggccccagtatcaacccaccaattagtagactgattaactgaaaaaacagtaggtaaattaccatacccgcttccatctccagtgttgccaatggtcacattagcagacttagaagtctaccctgcaggtgccttcatccccttgcgctgtggacacttcctagccagatgaccaggttgcccacacacaaagcaagtcctctcatcctggttaggattattgttgttcttcttctgcttcttgaagttggtggtctgttgagctttgtatttccccttgctcttgttctgagccttgtgcacaacattggcactggactgcccaccatggcccttagacgtggcatctttttctcgagctttctcctcaacatcaagagacgctatcaacccctcaacggagtattcctgtctcttgtgtttgagtgcagtaccgaaacctctccaagatggaggtagtttcgcaataatgcacccggccacaaatttgtcggctaagacacacttcaggagttcgagttccttagccatggtttgtatctcacgagcctgttcgactacagaacggttgtcagccatcttgtagtcatgaaactgctctatgatatacagatcattgctagcatcagtagcaccgaatttagtattcagtgcatcccacaactccttagcgttggtcatatgcatatacacctcgaccagacgatcgccaagcacgctaagaatgcatcccacaaagagagtagtgggctcatcgaattctttctgctgatcagcattaagaacgcccataggcttgccagtacttacccagaagcatttcatagctgtcagccacagagtgaccctgatctgccatctcttgaagtgcacaacggtgaatttatctggcctcagtgcatcggcaaaaccagccatagtaaaatcaaagcgcctataataaggtttttggattgttgaaattataagcacataatgatttaatttattccataaataaatcatgacattgtagatgtaaactagattgaacgcatcattagatctaaacatgtaaactaagtagtaaaacatgaacagatcaaatatgcgcaacatgtcgaacacgtaccgaggtggcggaaagacgggttgcacggcaggaactactcgcggttgcgagcgtcgacgaaggcgcgaagcacgcgagcggagaggaaggcgagccttcgcggacgaacagggagtagtcgcgtgaagcgcttccaaaaaaccttattgccgccttctcccggtgcaggacgtcgaaggcagaggttccggagacctgctctcccgattgccggtgcacgccggcgagcgggatggagtagtctacgagggacggcgcagtacagagtaggaggcaaaccttagattgattttgcgtgtgttgcgtgaaggcggcggctcggtttatatagagataggtcgcttgatcagggcgcccgcacgatctccactccgcgtaaccgaaccggataattcgcgcgtaacttatccggactccacgccgttttcacacaccggatttttcggaatgtttccaaaacaaaacaaaacaaaactgcaaaaggaggctgcatctgcgcaagggtgaggagccaattttgcggaccattcgacgcgtacgtcgtgcacgcgcgccgcctgccctacccttccctaccaggccaggcaagcgtgtgtgtttcccctcttctctccaccactcatgcttcaagtggctaggagggcatcctcccttttaatgaggttcccctctcctagaatacgcaaggtggtactaaactccacatgcatgctatcccatgaggtgggcttttgtgattttccaaagaattaatcttcgaatgggccttagcccatatattaattccaacaattgtttccgccacccttatccccctccgtctatctatcgggagtaccggagtggttagcaaaggaaacagtggaagaggaggtatttgggggaggaggatactgcagaggccgaggcgacgatgtgtgatgtcgcatgatgaggagtcaagagggggctgttatgtaattttcaactataccattttttatgtaaaattgttaaaaaaaagtgcatatattaattcgttgttaaacttggtgatacataagaaaccctgccaaaattttagtaatattgctaacttataaaaattttgacataatcaaaatttgataaggtttatttagctacaatttgaatagtcccgaagatcgccacccttatggccgctttatcttatttctcattcctttatttcttagtagcattttatatcctttgaactcccgttgactgtttccagagtgttccattgtcttattttaaccgcatgatcggacggcgtgagcttcttccttacctccatccaacggttaattttttttaatgacgtggctcattcttgagataaatctgtcattaactattcacagataccagtcactgctcccactgtcctgcctccctgaatctgacgctcgctgcctcgctctacagcgctttcgcgcgcacgcgtcacgtgatcaccggccacgatataagcttgagactgtcccggtggggtcgctccttaccggcgaaatgagaaggtgaaacaaaaagaaacacagtaaaaaaaattagtactacctctgttccatagtaagtgtagccatgatattccgcgtcaactttgatcgagctaactttgatcatccgttttatttgaaatttttttataattagcatttttgttgtcatgaaatgataaaatatgaatagtactttacctcgtgacttatgtttttaattttttttaaaaaattttcaaataagacgaacggtcaaagttggacgcggaaaaccatggctgcacttattttgggacggagtaagtactccctccgtcccataataataagggattttgagtttttgtttgtaacgtttgaccactcgtcttattcaaatttttttgaaattattatttattttatttgtgacttactttattatctacagtactttaagcataacttttttttatatttgaaaaaaaaattaaataagaagagtggttaaacgttgtaatcaaaagctcaaaatttaagtgggactgatggagtagtatatgtaccagtacttgtctgatccaacaagcaaaaactctctgtgtactttgttcgatcgctttcctatgcaaaatgtcggtagcggagatagcgcccggctagcacgggcgcccgggctccaccctccaccacatttaacagctgcacacttaattaatgtcatacttaatctgttggttcgccggtcaaatcaggtgggcaaactagcgaagtaatccctccatcccatacctccatcctataatataggagatttttggtggacgtaacacatgctaatacaataaatttagacagacggttttaactaaatttattgtactaagatgcgtcacatccatcaaaaatctcctgtattataagacagagagagtatggtttaacatcatcacattgtgcagtctgcagcttatggaccaaagagaggcagtacacagccatattattgttccatcgcaataatttgtagcactggtccatcacaagttagcaactactcctcgctatttttcattttatattaggagtattaaatttgcccgcatctatattaaatcataactgctatgtgtaggtgtatggattaatgtcccgagttcgaaaatgccgacgatggcaatcaactaatgtctccgtccaaaataaatttatttttcacctatttcatgcatacaaatataaaataaaaaatagaatatcatactttatcaaatcgcaatgtaactactttttaatttatctactcctaatataattattctctacttttataaactccgatgcaataattactcaaaaataaacttactgtaagataaatgaaatgatctaaaaccaaacttattatgaagcatttttcacttatctcacacatatcaatacaaaataaaaaataacacagccatattttattaaatcctaatacaattatttctctttttatctattactaatatatttatcttatctcacatatatcaatacaaaataatgattactaaaattaagtttatgttggatacaagaagttattatgtaacagagggaggagtaactattaaggcttgtactctcttcatcccattttaaacgcagtcatgagttttttttccaactctaattatacgtattatttaaaattattttatggttagtattttttattgttattttataataaaacataaatagtactttgtgtcttatttatgtgttttaaatttttttaaataaaacgaacaacaaaaattagacatgaaaactcatgtgtgcgcttaaactgggactatactacctaagctcggtatcgtaaaaagctgcttagctcggctatatatatattggtgcgctgaaagcctaggttggttccggttcgcaagttaactcattacgagctttggcttattcatattacctttacgacttttagctagagttctgacattatacatttgccgatttatcatttgctagtcttaaacattattccttccatcctaaaatataaacattaaaaatcaaattcataactaaaatttactgtattttaaaatggatgtagtacactacaagacttagaacctagcctgtaggagcgaaacaagtaattaaaaacttacgagcagggttcactgtaccgtcggtaaccgcgcggttaccgtggggtacggtaatgtaaataccacggtaacctccttaaattcaaataaatttaaaaaataatttaaatttttgatgaattttgtacagtttttcacagttaccgtggtttaccgtgcggtaaccgtgcttacggccggggcgcggtaaccccagcctcagcggtttgggaaaccctgcttacgagtaaatacaaatacaatagcttacaaacaatcggagacttacgagtagtattgagtaagaagcataagcataaatagagatattggtcttgcatactaccaagcttaacacgccccactcccgtctcaaaatattacaagcaagctaaaactggacgagatacattctagtataataaatctagacagatttatttagattgtaacacataattaattaactattagctaaaaatgtttaaaaaatgaattgatatgatctttttctaaagattattttcccaaaaacatattgtttaatagttaaggatacgtgcatgcgaggaatgagagagtgcaggttgagaatcttgagttaagaagacagccaagggcaaatgaaatggtgaaactattctaaactctcgaggcgacatcccttcgttgtttacatgtcactcaaatgataagaaaaaaattgataagatagattaataacgatgtgttagatcactccacaaacatgcaaattaaattttaacttctacactttgtaaaaaagacatgtgtgactacgaataaacattaattagctgtagtttatttttctcattgcaacttataaaagttggattttaacttacatgtttctaaagtgatatagtatatgttaatacatcttctcaatttttacaatatttttataactattctacgtgtcatgcaaacaataaaaagacatcacctcgagagtttaaaatccactctcaaatgaaatgccattcaaaattgtctgatcggttgagcaacaaaataagctataaaaaaattaacaaagcaaaaaaagtaatttataggtaaataattattactagaattttaaaagtagtaggcataaaaatacaatcaccaaaattaaattataaagttctaaaaagaatcaaacccaagggatgaatattaacatacatgtgtggattcatcccaggttttgatttcttttttcacagagagagtataagccagcaaaaagacatgaaaaccgaatctctctaaagaaatctactcgacgtacgtgttgcagttcccacgctagttgcattgggaagacgaggaaaaccaagccatggcgtcggcgaggcacctccggaacgtgtccatgcgctccggcagcagagctatgcccacctcgatgccgccggcgccagaacgatcctccgccgccgacaccgcgccggtcttcgccacggacacgatctccaccttcgccggcctcccgaacccgaagtcgacgtcgtacacgcggaacctcgtcgacccggccaccgagaacggcgcgtcgtccctgcacgcctccacgatgcgctccttccacccctcccagtacgcgggctcgccgcgcaccgcctcgtcgatggcggcggccaccgccgcgcaggccgtgaagacgccgcccgccacggcggcgccggcgagctcctcctcgggcgccgagacgaagcccgggccgacgcagttgccgaggtacttgtcggggacgcggggcaccagccgcgaccggtggtcgacggagaagatgaagtgggcggcggcggcggcacggccgctgccgccgttgtcgctttcccgtctggagcggcggtagcagtgccacatgaggccgtacatcgccacgagggacgtgcaccgaggcggcggaacgccgcgacgtgcggcctcggcggcgacggcgtccttgacgccctggaggtgctctctggacagggtgaaggtggcgaggaacttgccggcgtcgggcgccttgaacagatctttggcttcgttcgtgggtgcggcgaactcgtcgtgcatctccggtacgtcgcggatgagcgtgcggtcgatgacgggcggctccgggagcttccggtcgccggcgcaggcggcggcccaggtgtggaggaagtgcgtcgagcccaccccgtcgcaggcggagtggtggacgatgacgccgagagcgaggccgcggcgcttgggcggcagcacggtcacctgcagcgcgagctccgcgccgccctcgggaagctccgggacgagcggcgcgatcttggcgagctccctcggctcgtccgtggcgagctcgtcgacgccgacgccgacgccgtcgtgctcggcgacggtgaacgccacgccgtcgccgggctggtagaggagctcgtaccggttggtctcgccgggcgtggggcggacgcggccggcgagcgggtagaaggcgtggatcgcccgtggcagcgactcctccatccgggacagcacggcgtcgacatcgtcgtcggggccgaggcggtagaagaagacgcgctcgacgggctgggcgcggagccacatcacgtccatgaagatgagaggcagggctcgcttgggcagcgcgggctggccggcgggcggcgccggcgcgacgcgcgtcgtgcggaggacgcggaggccagcggcgtgagcggccggtggcggcgccatggtctcgccgcagaacaggtgtggtttgtgttgctcgtggcttagctgcagagcgatggagctttgcttctactcctataatacaatacaatacttatatctctctcacttcacttgtccatatagtaattaatttctaaggttaattagatacatatatcattacaaatttaacggttttaaaatattttattactattcatctaattgaaacaaatatgccactaaatatctccctcacttcactagtccgtagccattaatttctaaggggtactttctttcttaaataaaacgttttgagttttaaatagatcatgtaagcttgatatatatatatatatatatatatatatatatatatatatataatttaaattatacgtatattagtgactctaaacgactgacggtggtggagaaactaaactatcatattattagaatggaggatgagagtaggttattctacctaatcatgtgggactaattgccaatttcccattggcatttgccgagatgaacagtgatgtcacggctgacgacgggtactacgaaatgcttgcaattttgaggctatgagccaacagtttttgggtgctagtttaagctgggatggagggtctgtttggcacaactccagctctaactccacctcttctgaagttggagttcagccaaacagtttcagctccacctaaaatgtgagcggagctgggtgaagctctctcacaaaatgaactagaaaggtggaggtgggtttagacagctccacaactgcactccagacctaacttttggagcaaaatttttaggagttggagctctaccaaacaggtccagagtgtatggtttggcgtcagattcgttggtgccataaaacatggaagtggattcagaggatctcgttagtgccttcacaatgtgctgagctgtcatttagcccgatctctccacgtcagaggttcaatacgaatctttaccatgttcatgagcgggcccaccaaattgaagcccgtgtgaccctttttgtcatccgttcttggcacggggagagaaggctgcaaacgcgttgggagggtgtggcttcattccgcttttcctacatgcactgttgaccttgtggctttcctaggttttggtggcgccttaggccaagcctatgcgtgacccccttaccctcccatctatagatgcaatcatgctcttagggatggcaatgatgatattagatttgctttgaggttcgtgcaagccctcaaccctaactccctctctttctttgtttcctcgtaatgccgctagttctctactctacccaatttccccgcctcctatgttgctacaacgccacccccaagccttctctcacacaatctaaatagaaccctatctgacattgatttatttttaaaccatactagaataattttgtttaagattttaccggaatcaataaaaccattactgacatgtgctattgttaataattagtacatccgtctcaaaatgaatctatcactactacaaaactcctaatatgtactagttttccaccttcaaaaaatagagaaaatataaaaccgatatctttgatcaactatatgtaccggttttaaataaaactagcacatataatattagtgcaactggcatctacacttgtattatctgtgccagctctaaataaaaaatcaacacatgaaaaaacgatctgagctaagagccgagctgaacccatccttatctactcaagtgacttgtacttatcctcgactctctctcgtgcttctctccctcttcctctccttctccagcatctcaccctctccttctccagcgtgcttctccagccattgtctactaccttcaacgacactggcgatgcagcggcagaggcggccgccctctgtccatggagagcagaggtggccagtcccgagctcgggacaaccagatccacgcgcggtagcctcttccttcctctcccctgcgtggcgcggtggcggccgcctcttcctctacctagtgcagtggcggtgaccccttcttgttctctgcacgtcacgacaacagttgcgatgattgtctcttcctctccctgccccagcacgatagacactggatccggccaacacgatggtgactgcaggttattcatggtggagagtaggaatctaattggattgccaatatttcagaatgaatttttgtgatttatgatgtttgatttgtgcggggatgttgttgttggatggatccatggtgatttgtcctatgtgatttggggatgttgtaggatggattgatggtggtatgtggatttctgatgtgtgatttgggtaatggggaggggctcgatgcatcggctcgttttgagccgatacatcgagctgtcttttcatttgtggagtttcaaaggtgtcagttcgtaaactgccacagttgattcctccatatcaatgcctcttgggctgcgtaggttgagaaatccaaacatctatgtgggcttcccaaccgacacctaacacatttatgtgtatttctcccttgccccatcatttcaactaattacaagcattctccatttaatttcttcacctacttactttttttcaattaatcaaaatttttataatcattttcacatatcctcttactataaagttagagcccactaaatccta

SEQ ID NO: 15283 - DNA, 2069 bp, Oryza sativa
agcgaggatgagaaacacatcggggctgatgtagcggaccaatatgagagccttattgtgcaacgtgtcttgagtgcacaaatgggcaaagcggagcagaaccagcggcataacctttttcagacgaagtgtgtcgtccacaagcgttcctgctgcacaatcatcgatggggccagttgtaggaatttggtgagtacggagatggtcacgaagctagctttgcagatgaaaccacatccccacccatactacattcagtggttcaacaacagtggccgcattaaggtaacacaattggtgagattaaattttgcaattggttcttactgtgattttgttgattgtgatgtcgtacctatgcatgcttgctctttgctgttgggtaggccttggcaatatgataaagacacattgcatcatggtagaaccaatcaatactcctttatgcataatggaaagaaaattgtgttgcatcctttgactcctgaagctgtttttgagaataatgttgctagagctgagaaagagaaaaatgttgagcatgctaaaagtgaaaatcagattgtagcaaaagaacaagtgcaccataatttgaaaggttctcaatctaaccgtcgcaaggatagtgtgattaaattgaatggtccttgtttgcttaccactaaatctgatattgtcaatttggacacaagtgatattgtttgctatgctttcatttgcaaggatgctttgttttcttttgaaaatattcctctctcttttcctcctgcggtcactaaccttttgcaggagtatgaggatgtgttccccaaggacgtgccaccggggctgccaccggtgcgtggaattgagcatcaaaacgacttgatcccaggagcatcgttacccaaccgtgcgccataccaaaccaaccctgaggaaaccaaggagattcagcgtcaggttcaggacttgcttgacaaagggaacgtacgtgtctcttagtccatgtgctgttccggtgattttggttccaaagaaagatggatcatggcgtatgtgtgttgattgtagagctattaataacattaccattagatatcatcatcatattcctaggttagatgatatggtagatgaattgagtggctctactgttttctctaaagttgatttgcgtagtggttaccaccagattcgtatgaagttgggcgatgaatggaaaacaacatttaaaacaaaatttgggttatatgagtggttagtgatgccttttggtttaactaatgcaccaagcactttcatgaggttgatgaatgaggttttgcgtcctttcattggaaaatttgtggtggtatactttgatgatattctgatttatatatagcaaatatttggaggaacatcttgatcatttacgtgctgtttttaatgctttacgtgatgcacgtttgtttggtaatcttgagaagtgcaatttttgcaccgatcgagtctcgtttcttggatatattgtcactcaacaggggattgaggttgatcaagctaaggttgaggcaattcagagttggccgattcctaaaacgatctcacaggtgcggagctttctaggactcgcggggttttctcgccgttttgtgcgagatttcagcaccattgctgcaccattgaatgagcttacaaagaagggagtgcttttcacttggggcacatcacaagagaacgccttccgcatgttgaaagataagttaacacatgcacctctcctccaacttctagattttaataagacttttgaacttgaatgtgatgctagtgggactggattgggtggtgttttgctacaagaaggaaaacttgttgcatattttagtgaaaaattgagtgggcctgttctgaattactctacttatgataattaattgtatgctcttgtgcgcactttagaaacatggcagcattatttgtggcctaagaaatttgtcatacattctgctcatgagtctttgaagcacattcgtagtcaagaaaaactgaaccgcagacatggtaaatgggttgaatttattgaatcttttccttatattatt

SEQ ID NO: 15284 - DNA, 17303 bp, Oryza sativa
tgcatgatgatgattttaaagattgttgctgcattgtaaggatggaaagacatggaacaaattcttcttgaatgatgggtttgtttttagagctaacaagctatgcattccagctagctccgttcgcttgttgttgttgtaggaagcacatggaggtggtttgatggggcattttggtgccaagaagatggtggacatccttgctggtcatttcttttggccaaagatgagacgagatgtagatagattcgtttctcgctgcgctacatgtaaaaagtctaagtcacgtttaaacccacattgtttgtatatgcctctccctgttcctactgttccttgggaagatatttcaatggattttgtgttaggattgcctaggaccaagagggggcgtcatatcatttttgtggttgtgggtagattttctaaaatggcacatttcataccatgtcataaaactgatgatgcttctcatatcgctgatttgttctttctagaagttgttcgcttgcatggtgtgtcaaatacaattgtttctgatcgtgacactaaatttcttagccatttttggagaactttgtgggctaaattggggactaagcttttgttttctactatttgtcatccccaaactgatggacaaactgaagtggtgaatagaaccttgtctactatggttagggctgttttgaagaaaaatatcaagatgtgggaagaatgcttgcctcatattgaatttgcttataatcgttccttgcattctactacaaagatgtgcccatttcagattgtgtatggtttgttgcctcgtgctcccattgatttgatgcctttgccatcttctgaaaaaatgaattttgatgctaagcttttgttttctactacttgtcatccccaaactgatggacaaactgaactggtgaatagaaccttgtctactatggttagggctgtttcgaagaaaaatatcaagatgtgggaagaatgcttgcctcatattgaatttgcttataatcgttccttgcattctactacaaagatgtgcccatttcagattgtgtatggtttgttgcctcgtgctcccattgatttgatgcctttgccatcttctgaaaaaatgaattttgatgctaagcaacatgctgagttgatgttaaaactgcatgagacaactaaagaaaacatcgagcgcatgaatgctaagtataagtttgctggtgacaaaggtagaagggaattgaattttgaacctggagatttggtttggttgcatttgcgaaaagaacggtttcctgacttgagaaaatcaaaattgacgcctagagctgatggtcgatttaaagtgttagccaaaattaatgagaatgcatataagcttgatttgcttgcagattatggggttagtctcacaattaacgttgcagatttgaagccatatttgggcgcagaagatgaacttgagtcgaggacgattcaaatgcaagaaagggaggatgatgaggacatcaacaccaacggtacatccacgcttccacaagtacaacttcatggtcctattacccgcgatcatgcacgtcaactcaactatcaggaacaatggagattatcaaatggggagaggaatcgcacgggatggattcggactgcagcacagcacaaacttctgacggccgccacgacctcatgcgaactccgatttgggcgtgcaagtacttcatggaaagcttgtcaagtctactttcaaatggatccagcctcatttccatatcagttctggggcggccgcaatcttcattttactaccgagtccttttctgtccacggtgttgcatcacctctttgggcccaatgggcggtgtatcaagttgggtccattagggacgcgtcctagggtgagagaacgaccccagcactcctgtggtcgtcctcttcctcttcttatagctttctccaccgccaagaataatcgggttttgtttagatcaaagtatagcgtcactactttgccgagttgatcccgtgatcgattagatcgctagattgcttgttattgaaccccacttgttacttctattgattcaatccaacatctttgatttgcaaatttatttgcttgttcatcttgttcttgctggttctcgattgcttgcaggaacaaataccctcgtgcttgggctgatcgtgcatccgtcgagattcacgactgcctctagagttcgtgtaacgattgttaaggcgcagcatccctggatagttgtagtcggatcgccaatgtcactccgtccaatcgacttatccctctcatcgaaagatcgggacatcctcgagcacatcactatgcaaaccgtgctgctgtcaatacctaggacaaatgctctacgacattcctctcaaaattcttcccgatgggcaaaaaccaatgcccttcgtggaaggattttaagtttccagcagacaagggatgagtctattccggaagcatgggaacgactgcaggagtacgtagccgcctgtcctcatcatgggatggatgactagctgataatgcagaacttttataatagactcaccccgatgtcccacgatcacctggacgcggaagctggaggagctttcttctctaaaacggttcaaggagctgttgatctaatagagaagatggtctccaatatgggttggagcgaggaacgacaccagacccgtcagcgaggcatgcacaccgtcaaggagacggagttacttgctgccaagctggacctcctcatgaagcgattggacgaccacgagaaatggccacaaggtaccatcaaggccttggactctcacgtcacatgtgaggtctgtggcggcacgggtcattctgggaatgactgcccggaaacccgtgaggaggcgatatacatgggcaacaacaacaacgggtatcgtccacaaggaggtcatgggtggaaccaaccacgcccatattatcaaggaggtaacaacaacggtaatttttctaaccagccctccttgagggatctcatttttgcacaagctaaaaccaccgatgcactaagcagaaaacttgcggccaatgacaaggtcctagaaaacataaatgtcaagttagatggctttgcttctgcttttcaaaatcagctgagctttaataaaatgatagaaacccagctagctcagttggcatccttagtccctgcaaatgaaactgggaggatcccggggcaaccctactcctccattgaaaatgtcaaggcggtcatgacgaggggaggtaagtccactcgtgatccgccatatcctaaccatgcaggaactaatgggatatcaaaagaagtgccatctaatgattcggctgacaaggaagttccgctagaaaagacagtgccgcaagagtactgcgacacacggttgctgttgttccctcaacgaagtaggaaaccgtcagtggacgagcaattcgctcgttttgttgaagtaatccagaagatccacatcaacgtgccgttgttggacgccatgcaagtgccaacatacgcccattatctcaataatatactcaacaacaagagaccgctcccaacaatggaggtggtcaagccgacggaacaatgcagcaacgtaatactccacaagctcccgggaaagtatgatccacagtcagactatccgaaaatatcagatagtctaatgttggatcagactgtctgatccactaaagagtcaccacaagtagatctatcacacaaacaagagtatagcgcaaacagtgactagatctatagcggcacaattaagcaaagctaaagagaggatatagagagatcaccaacgatgaagttcgcggagttgttccaggagttcaaatccttgaggggattctactctccgttgaggagttcactaagagccaggtctttgctaaccctttcctaaagaggttgtactaagcactcctccttccactaaggggtatctctttccttgtggaggcaagatccggccttcgcaaacttctccctgccaaccacacgtagatcggtggctcgggagtgacacctagccgtctaggagtcctcgacctcgaagagtaacaaacaccacacaactcttggtcaaaccctagtgctcaagatcgagtgaaacacacactaggtcctcaaacaccaaatccacaaccaacaagatccaccacacaaagaacgaggaggtatttgaaagagggagaaagagctcaaagatccaaagcaccttagcaccaaactcaacccaaagtgaatgagaatgaatgagttgggtaaccctagaaaaggtgggggtatttataaatcccccaaaaagtggccgttaggagagactcttttcatcccacctcggactttccgaggtgacatcggatagtctaatgttttttttgacccccaagcaagcccgagacagaggacaaaattctggagaatttcggacaatccgatcaatcggagagtccgatgtcatatcagatattccgttatttttgaagcaagaatttcatcatcttacagagactcaagttccattgaatttcggagtctctaggtcattggatagtccaattctttttagccaacacttagaccaaagacagagatcaaagttctatgaaatttcggatagtctgagcatcggatagtctgatcaaaatcggatagtccaacaggataaattcaagaacacttcaagtaaaggattttgagcactagtgttctaccaattatatgcatgtggtatccctcttaatagtacggcatcctaatactctcaagaacacaagatatacatggtttagaaagacgattaccacaaaagatgccacaatgcttttaaactcaagttccactccttttttatccttgcattcatctcaacaaaaagcattagttttcttctaattgtgttgtcatcaacaccaaaataaatgaggggtactagatgcactttcaatctctccctttttgattattgatgacaacacaattagaaataataaaagattaggattttggtggagctcccctaaagatatgcttgaaatgaataggagagctccccctcaatctatgcaatagattagaaatgacaatataacctcatgcatatgcaaatgacaagatatatcacacatttaagcatggataagatataattccacgtaacatcattcaagcctatagagttcaacaagacataaacatgcataataaagaatttaaacatgacacaaaagcccaaggttcgactagccatcacgaaaggggatagttttttttttttgataggtggttctccccctttggcatcaaggcaccaaaaaggaaaaacagagtggatcactcatcctcatcaaaatcctcgtcctcctcacttgactcctcaaaagcaaaaaaacggaaaactctctctccgcgcgcgacacatgtagccttctcgccattttgctgctgtctcgtcagggtgtcgttttcttctcaacttgtgactagctttagtaatgctgacggtgacaaactaaaaccaggtaattgtccgactcacatataattaaaattgagcaacggctgcaatacatatgaacatgttcttttttattggtctatgattatatatctctagttgtatatcttaacttcttaaaaaatcggtaattttgcattcgtcacctaaatttttcatccgttttcatccgtcggcgcttgcacgcggagtcaccttcagttatccaaaagagaacggacgggaaatttcaattcgaatcacatactggattcatggagcattaagccaccggtgggagcagcgcgggtccgtccggcccttcgctaggaagcggcatcaccgccgtcgtcgcctgttgccgtcaccgcaccataccccgccatcaaggccgacagggagaaggagagggggagggacgtccattgctgccctcgctgcaccgtacccccgccgtcgccgcaccgcgtcgtactcttgtcgtcatcgcgctgtgctggcaacacgggaggagaagagatggggagctgcgccgccgttagggagaggacaggagaggcgaagaggcgccgccggtgggaggaggcggaggggaagcagcggagagggagcagcagaggggaagaggcggcgcaacagggagaggcagccgacggtgggggaagtgggagagggaaaatgaattagggttaggttttttttgtaccggtggttttgattgatttggaaccaatctaagccatccatcaaaaacaaacggctcagatcgatcccacgtcaggccagcatcagctgggccatgcacgcttgatggaccgcgcgcgggctagcgggtctaacacaacgcttaggctagaattttgcttggggcccacacgacagtgagaggaggagttgggatgactaattagacttgtacgttgggctggacgcttgcttgcggaccgaggtggaggggaggagaagagaggaaagcatgccgctcggttgcgggctgaagaagaaaatgggcggaaaatgacccgaagagaaatgtggacttttatttagatttatttaaataaagatgatgtttgtattatcaaaattagcaattaagttctagaaattccaagaaattttcaaagactattattaatcatggttaattttctcacgcttactttgcttgtaaattaatttaattatactactacgtacttaaaaaatacccaaatattccggaaaattggtatttcaattaattacacaatgtacattatctttctcaacttttcctcaattttttctttttttttaccattgcaatacacggacacttttctagtaagttatacagctgaatcgtacgtataacagtactcctaaaatctccaaatactagtagtgatcatgggttcatagctaagctaccctttcacctccatactctcagtctcagaatattcttaatttttattcatcctaattatatcaacacaaaattaaaaaaaactaaaataccccttatttgttaaatccaaatacaattattctttactttatctagtttcaatatatttattttctgtttttataaactttgatgtaatgataattcaaaagttaattcttttttaggacaaaggataaacgatgattttattctaagacggagaagcattcaacaactcccccttgaactcgtgtggactagtatgtttttcaccgtatcatgattaagtgatcaaggacggctcggtcatgactcatcgaaagagagaaaacaaggagtgaaaggtatgtgtgaatactaatgttctttaggagatttccttcttccagaattaatacctcagttcaaaaacaaatttattttttccctattttatcaaattttattacaactatttgtttattttatcttctcacaatataattatttatattcttataaactccgatgtaatgattatttaataatgagcttattttgaaataaataaaataaaaataaacttattacgatacggaggaagtactgatgttcttttcaccgaacggtgagatttcactattcacatatcatgacgggaaaagggaccgcattaattatcgacaattctaggtgatctgacgtcatcagtcatccagaggtattcccgcacgaaaaaacaagttagagtaaatttaataaaactatatggcctctttaaatcgcagtgttgaaaaaacagaggaataggaaaaacacatgattctgacaggaattaaagtgtaaaacagagtattgcaaaacatagaaaaaacacaggaatggtcgtttgattagagcgcaggaaaaacgtaggaatcggatgagagagatagagtaaaggaaattttccaagaggttggagctcttgctaaattttctccaaaatccacatgcaatgtgtcattccataggaatttcataggatttggaaagcttcaatcctttgaatcaaagggccaaatagaaaaatttcctataggatttgaatcctataaaattgctacataaatcctttgattcaaaggggccctaagtaatttggtcagattataaaaaaatatacatatttaataagatatatcacaaaactatagatttgaagataaataaaaggaaccgtttataaagacaaataaatggagctaaaaacaaatttattacggaatattttttttcatttaactcacacatatcaatacaaaataaaaataataacattgccattctttatcaaatccatacgtaacactaatgttaccttttagaaacatgatagtccaaggacaccagccatatttttattttttcacataataatcatcatgcactttaacaataatcattatgtgtaaaaaagaggtcttctcattctaaacctgcacaataattagaaataagaattaatatgtgcatcaccaattcaaatcaagattgaaaaaataatactattcactaatacatgcgtctaaaataaacaggaagttataggttcttcagaaaaatgatcatcgtatagtctccaatgaccagccaatcatacccaattaatcacctcatgtccaaatacagacaggggcagagctagagcgagatgaggggagtgccacttgtttaatttactctgctttatatcaagtttaaactaatacaagtgtctaaatatgtattgaggggtgcatatatagtgaaaataagttaggtatagctccaaaaaaaatttttgaccgggttcctgggcacccccctcaatacactagctccgcccctgaatacagacccaccttgcattggttctttcatgttctgatcgtacactatttgaaccgtctcaaaaataaattcattgttgtcatccaacaaagactcatcatccagtagcatttggagggagttgcatcgacgactcatctctttgtcttttaacacgacgaggacatgtaaggagaggtgggacagcaacaatgggagatagaggggagggggaaaggagagctgacaggggatggtgggggagaatggcgtcggggaggcagatcagcatcgatcagggagtgcgtgggagaaaaatcgtcgtcagggcatggagcgagggagatcgatgcagcattggggcaaggaggagtgcctggaggatagcgtgatcctcttcagtatggtaatagaggaaaactagatagaagggttcacttttactttttggaattcaaagagatgaattttttcactttctattttcaatttaggaaacaaaaacaaaattttgggtgggttattcacattatgttggtgatgctcttaggaagaatgtgtagtacttgctgcctcagctggcataattttattatgtcccattaattcaaataagagtgacaccgttgcttaaattgatacgtttatacctgattttgtaatctaatatgatgggatttggtgagatgaagatgacaataatgtattatagcttttgtcctgaaatttatatacgtacccccccccttccaagatgtgtccatttttcacgtttaaaactttgtcacaagatattatatctatttataaagtattatatccaccaataaccacctttcattttaattttcatccaatcttgtcttaaccaccttatcttcaaccattctcattgaatgagaaattaattaatccatataatattttttgtccaccccctctaaaacaaagagaggtcagaagagaatgggcagtagttaatccatataaactgtgcacagcacactagacagtaactgcagatggatactatcgatctcttaaccagtacaaacacagatgatgttaatctcaacctatctgacaggggatagggtagattgtcatgctccactgatgttaacattgacctttacagttatagatactcctgtaaatatatactgtatatatatttggagacaaatcttcggccgagtttagttctaaatttttttaaaaaatttctaactttttcattacatcaaaactttcctatatacaaattttcaaattttctatcgcatcgttttagttttaaccaaacttctaattttaacctgaactaaacacacccttcctatcttttcatatgtgaacgcctgtatttgcccgcatccagagtccccctttgctgctgtctcgtcagggtgccgttttctggagtactcatctgtgactagctttttttcatctgtaaacgcctgtatttgccctcatccagtcaagtcccatttcgctgctgtctcgtcagggtgccgcatccagttaagtcccattttgctgtcatcttcgactagctttagtaatgctgacggtgacaaactaataccagagaatcgtgcaactcacaaattgatctaactgttacaatacatataaacatattatctatggttatacgaacaattcagttgttcccccctatagccaaatcaaacggggtctcatcttaacaactcatcggaaataagcgtacttaatttcatacctctctttaatcacaaattaccttgtactggctccttccatcaccttgacaaaacttattagataccctcttcatctcagaatataattatttcaagtgtttaattttttttcaaactgtaactcattctccaattactcgccatatttgattcgatcgtaactgtcttatttaatttttttcacctaattcttcatcttaaccaattacaatcatcccacgttataattttacccttcattctataaacttcatagagaaaactttcttaaattctttacaggtgctcttctcttcttttctttatatgtgcttacacataatttgtagcatgctattatactcgttctgatgaggtggaccgacctgttgatgaggaggagtggaggacagagcccagtgatgacacaagagttagccattttaattatttattttccttccggtggggagccaaccgattaccgatccaaatcaggtccccggtcatgatcatctacaactactagagcaggtgtttgcgtcttgattaatatcgctattattatatcagtttcgtccttatagcttatcatatactccctctatccaagaatataaaaagttttaagattggacacggttattagaaaatagatagaagtagtggagggttgtaattagatgagcagtggaagaatgtgggaaaagttaacggtggagggttgtgattagttgggaagagaatattggtggagaagttgttatattttgagataaatcataagtgataaaagttgttatattttgggacggagagagtatcaatatatataataagggcatcctcaatatttatggtgtagtgtaattttaaggtgggccctatgaatagtgagtcattgttatagccatatccacaatgctatggttagaatttagccacaagatggcccacatagaatggaaaaataattgtttcatctcttgttcataaagtgaatgagagagaaaaaatattttctttttgcttgtggtagaacttaagcataaggtgcactctaagctaatgctattttccacaatgtatatagctcactttacaagtgcaatcattatcttaaggttatctttttcatacataataccattataataaaagatgtgaacccgaggactctttaccctcgcttctcatgcctccgctttcgcattcattacacactagcctattaaatcaggcattcgcgtgactatgacctgttttttatttggatatatacttgtttgtttaaggacagatgacgttttgtgtttatctgaccataattgttgtctagaattttctcttttatcctttcttaatttttttttgaatggccttctggtaccaaggtccattcggcctcatttgccagcatagaccctttggaggatccaatataaaatatttatgagcaaaaatagtttctttaaacatgaaaatagaaaaaaaaaggatatagcccttataatttaatcctattttgtacttatctatatttgctcttagcgctatttatttccaaatattttaatttagcgtatagaatagtagtactatattagcttctaattaatttattattaaggatcgaataactgattcgtatgtgtttggagatcatttgaattggaattgtcttatacattcgtgtaagaagtgctctcattttgaatggttgcacgtggagaagcattaaaaggtacggagtagtagtaattgttggtttcagaaggggaaaaaaaaagaaagagcacctttgtcggttaggagtatgatctaactcaactgaaaacttccatgccatttgtcacaaatttgctaggcttaattagatcaacagagaggttgttttaaatacttttatttacaggagatataggataaagaatattcatatgtgctgaaatgcaaaagtggcatgggcatcaccttttttccacactggtggagaaaccatctttcgtcggtcggcctaattccacaatagtctcggttgcaacaaaaaccgatctttagtcccggttaaaaagggtaacgggcatatatatatatatatatatatcttcttcctcctccagcccgagcaagctttaaaatttcttcaaaaaagaggggaggtcatgccaaaatttctagtaaatttattttggtgattatatacaaatcggaggtgcctaaaaggttagcaacttcatcctccaatgttttttttgtcatattacatttggagctatgtttagcacacttttttgtctccaaaattttgttgtaagttgatgagagagaaaatttctgtggggaataaaaaatatatagaaatttagtttatttgctaaagaaggttttataaaatagttgagaaggaaaatatagcaaaagttaatcttgaataatagaaaacaaactaaaatgaaaattaaaaggagtacaacacattaatattattttaaaactttagaaatagtaaataagaattatttggtgtaatatttcataatttttgtatgaataatgatatgtcattattgtgtgactgttgaaagagtttgtaattattttataattattgtatgagtgtcattattgtacgaataattatttgtgtacgattttttttcatgtcatgtagatggatcggaaatggatgtacgctgaccggcggtccaaagagtttattgatggcgtgcattattttttgaaagtggccgaagctaacaggcaaaagggtttaatttgttgtctatgcaataagtgtaagaatcagaaaaagtattctgcatccaggactattcatttccacttgtttgagtcggggttcatgccaagctataattgttggacatcccacggagagcaaggtgttgaaatggaagaagatgaagtggaagacgacaatatttcggactttgctcagtacgctggatttgaaataaatcaaacgggcgaggaggaaagggatgctgatggtaacgacgttgcggatgatcttggtcagatgttgcaggacgtcaaggaggactgcgaaagtgaaaagggggcctataaattggacaagatgttagaggaccacagaacgtcattgtacccaggttgcgagcaggggcacaaaaagttggatatcactctggagttcttgcaatggaggacaaaaaatggtgttagcgagaaggcatttggcgatttattgaaactcgtcaagaacattcttccggagagaaacaaattgcccgagacaacgtacgaggctaagaagatagtctgccctctaggactggaagttcagaagattcacgcatgtccgaatgattgtatcctatatcgcggtgaggagtacgagaacctagaagcatgccctgtttgcaaagcactacgatacaagattagacgagatgatccaggagaagttgacgggcagctaacgaagaagagaattcctgctaaggtgatgtggtatttccctataatactacggctaaggcgtttgttcaggaacaaggggaatgctagaatgatgagatggcacgctgaagagcgttaacaggacgggatgctgagacaccccgccgatggttcgcagtggcgaaatatcgacagaaaatttaaagactttggaaaggacgcacgaaacatacggtttggtttaagtacggatggcatgaatccttttggagagatgagcagcggccatagcacttggcccgttacgatgtgtatctacaacctccccccttggctatgcatgaagaggaagtacataatgatgccgattattattcaaggccccaagcaacctggtaacgacatcgatgtgtacctaagaccactggtcaaagatcttaaactgttgtggaagaaggaaggtgtccccgtgtgggacgaggacaaacaagaggagtttaacctacgagcgctgctgttcgtaaccatcaacgattggcctgcacttagcaacctatccgggcagtccaacaagaggtacaaggcttgcactcgctgtatggatgaaacagaaagtacgtatcttaagcactataggaagattgtgtacatgggtcatcgtcgattccttgcagcaaaccacccggtacggaagaaaggcaagcactttgaacataaggcggaccaccgtacgaagcctaaacatcgcagcgggaaaacagtgtttgctatggttaaagatcttaaagtagtgtttggaaaggggcctggtaaccagcctatagagagcgaagatggtcacgcggcgatgtgcaaaaagaactctatattttgggagttaccctattgggaattcttggacgtccgccacgtaatcgacgtgatgcacctcactaagtacctttgcgtaaaccttcttggcttcctaggtgtatatggaaagtcgaaagatacactggaagcacgtaaggatctgaagcatatggaacaacgcggtgaccttcacccggaaccaaaggagaaaggaagccattacttgagtccagccagctacactcttagcaaggcagagaaggaaagtatgtttgaatgcttggagagcatcaaggtaccgtctggatactccatgaatataaagcgaataataagcacgaaggagaagaagttcacaaatctaaagtctcatgactgtcacgtgttaatgacacagctgctaccagttgtaataggggtatcctcccagacaatgtccgggcaacaataacaaagctatgtgctttcatgaacgcaatttcgcagaaggtcatcgatccgaatagattagaagccctgcagaatgatgtggtgcaatgtcttgtcagctttgagttgatatttccaccttcatttttcaatataatgacgcatctgctttgtcaccttgtcaaagagatcggtattctcagtcctgtgtacctacacaacatgtttcctttcgagaggtacatgggcgttctgaagaagtatgttcgtaaccgtgctcgtccagaggcaagcatcgccaaggggtatggaacagaggaagtcattgaattctgcgtaaaatttatcgaagacctttgcccaatcggggtacctgaatcacgccatgaagggagactacggggaaagggaactctcggaaggaaagcaataatgacggtagacaacaatttattccgtaaagcccatttcacggttctgcaacaatctgcattggtggctccctacatcgaggagcacttggctctagttcgcgccagaaacattggtaagtccgatgcatggattacacggtatcacattgatactttctccgcgtggctgcgacaacatctcatgagtaacgagacgattaaccaacaactggccttcttggcgaggggaccatctggctcgatcgcgacattccagggatatgaaatcaatgggtacacattctacacgagggcccaagacatgaagagcacgaaccagaacagtgatgttcgtatcgatgccataggtcacgatggtacaactggcacgtattacggtgccatcgaggacatatgggaacttgactatggacctctcaaggtccctctgttccggtgccaatgggttaggttgactggtggaggcgtaacgattgatgacagtgggatgacaacggttgaccttaacaaggttggatacttggacgaaccttttatccttgccaatgatgtaacgcaagttttttacgtcaaggacatgtctagcaaaggaaaaaagggcaaagggcctgacgagccgaagcgccaagtggttctcccagcaaaaagaaaaatcgtcggagtagaggacaagactgatgaggattacgatcagtttgatgggcaaccccctttcacggtgacgattgaccctagcatcctcctatcaaatgaagacaccccttactcacgtagcgatcacaaggaaggaacaatagtgaggagaaagtacgtgcggtcaaccgtcaccgccgatgtattgccgtaattgttgtgtacacgatgtaaactattttggatgtattgaatatccatacaaataaattgttgtatggaatatgctaattatgtatgattattagaatttttatcaaattgaaatcgtccatatgctagttatatatgattattagaatttttaaaagttttaaatcatgcacgtggtatttacatatgttaattagaattttcaacaatttattatcatgatatgctaattatatattattattagattttttattaattttaaatcatgcatgtggtatttacatatgttaattagaattttcaacaatttaatatcatgatatgctaattatatatgattattagaatttttattaattttaaatcatgcatgtgctatttacacatgttaattagaatttttaacaatttaatatcatgcatatgctaattatatatgattattagaatttttaacaattttaaatcattcatgtgcttattatatattatccacttattctactacatacaacaataatttttcgaaggttttgtcattaattgttcgactttaaataattttaaataattgtaatgcattatttactattttagaaatacatatgtaatgaagttcaagacacagctgctattatctttagtcccggttcttaaccctaaccgggtttaaaaagaatttggaaatagcgggaaaagatctttagtcccggttggtgagaacatccgggagtaaagatatctttactcccggttcgtacgaacaac

SEQ ID NO: 15285 - DNA, 694 bp, Oryza sativa
gacagctatgaaatgcttcttgggtgagtactggcaaacctaagggagttcttactgtgaacagcagaagcaattcgaggaagccactactctctttgtgggatgcattcttagcgttcttggcgatcgtctggtcgaggtgtatatgcatatgaccgacgctaaggagttgtgggatgcactgaatactaaattcggtgctactgatgctagcaatgatctgtatatcatggagcagtttcatgactacaaaatggctgacaaccgttctgtagtcgaacagtctcatgagatacaaaccatggctaaggaactcgaactccttaagtgtgtcttacccgacaaatttgtggccgggtgcattattgcaaaactacctccatcttggaggagtttcggtactgcactcaaacacaagagacaggaatactccgttgaggggttgattgcgtctcttgatgttgaggagaaagctcgggaaaaagatgccgcgtctaagggcgatggtgggcagtccagtgccaatgttgtgcacaaggcccagaacaagagcaaggggaaatacaaagctcagcagaccaccaacttcaagaagcagaagaagaacaacaacaatcctaatcaggatgagaggacttgctttgtgtgtggccaagttggtcatctggctaggaagtgtccacagcgcaagggg

SEQ ID NO: 15286 - DNA, 69956 bp, Oryza sativa
  unsure (1)..(69956): unsure at all n locations
gctccaataaagaccacaagaaaggccgatagctccccaccacttgtcaaatgccagaagcgtgaacgcggcaaggggaaggtcggggagttggcgccggagccaaaaaggggcaaggctgcgacgttgatgccggtgagcaaagcggggaaggtcgtgagggcgctagcccaatttgagctaggcatgccattggtggaggacaatgtgttagccgtgatgggtattgcttgccgagagctacataagcaatacatggagctaagcaatgccaagcggaaaatgagggagtcatccatagttggacatcacgaccaccagccgttcctatcgtcgcctgcctatataactataggctttgatgacctcttcgaccttttcaggatacagaagttggacactggtcttctaaaatgctactccttgtaagtgcataccttctatacttgtgatatgattggactatatctcctaattaaattagttctaatacgtaaatgttttaaggttgtgttggatcgagagtcgtcgccttggtaatcaggttgggttccttgatccatccatggtgaacgaggttaatttacgacagagcttcactgaggtggttgactatgtcaaccggtgtttatgggcccatcaagacaaggagtacatcatgtgcgcacacaaccaagagtaagaggacaatacccttcgtgtatattatttttgaagttaaggttcttagtactaacgctacataaccactgtgcaggcgacattggattctcctagtcatcgtacctaagtggagtagggttacctaccttaactccaataagtccaaagattatgatttcactgaaatcaccaaggccttaaatatggcttggggcccatatgtggaaaagggtggtaggcacaaggagggcaaggacgaactttaccatgacaccaagttcgcatgcgcacaacagatcggagaccaatgtggtttccacgtgtgccacaacatgtcaacacttctaagagaggtgaaagatttcgaccctaaggttgttgctaatggcgaataagctcatttcaataccaacattgctattcaaaacgtgctaacatcttgtttattaaacagaaaggtagagctggcctcaagatctcacccatcaacacccccgctatcagaggcgaagtgtgcgccttcattctggcagaaataatgaacaagaaaggacgttttcacgtcaaatagacttatgaacttggctagataatttattgtgatgtaaaaaagatgttttcataatttcttgtgatgtaaaaaaatatgtttttatagagtgcaatgtaatttacttttatatgtgcaatatttatggtagtttactaaagtgtcatcaaatttgatcaactactatttacgttgtactattcatctgttttctcctttttttccttattgacaggttgtggaggtcgaggacattatggctttaatccatttggtaagtatatatgcggttatatgagcaacgaccaaaattgtggctttcaaggggtgtgaatttgctgtgcaaaattgtggcatttgaactgcatatgtgaatgatgtcaatttttgatatggatctgtgttgttggggatctgtgatgtttgagatggatctgtaatgttatattgggggggtgactggaatatatctgtgatgtatctgtgtttcagagggcatggctagcaaatcctgaggctagccaatatttagcatttattttttttctggaattaactcatcagtgactggtcggaacaaaaatccgtcaaaggtaacaacacctgtgacggactagaaaaataaaggcccgtcagaggtgacctacctgtgacgggcctttacttttggggccatcacaggtagatcgcctgtgacagcttctaactacggagaccatcacctcacggcctttatttaaagggccgtcagagatgagtcacctgtgacgggtcccaactcgccctaggcaagcggagacaaacacctctgacggccttccagtaacttgcccgtcagaggtgggtgtcacctgtgacggccagccacctatcaaaggtgactggactcaccagtgaccactgatcactgaccatccgcgaagccgtcaaagatgagggtttgggcccgtcacaggagaccttggccagtgtagtggcccggcgtcccgcggtggatgaacgccatagacagcacgaagtaggcgaccccgtcgacgatggccacgctcctgcgccccgtgaagacgttctggggtgggctcggtaccttcctccatcgcgcgaagctgccgctgttgatgccattgccgccgagggtgagcaccgagcaaacctgcagtacgcggtccatgcggatgcacaacagcttgtactgatctcctcccgtcgacacggtccgcccgagcgcgaaggagcagttggtggggtggttcacccagtcggggacgaagagacggcggcggacgaaccggtcgctgctgccgacgaggagagccacgccgcggtgcgccgtggtggtggtggtggacactatagatggccataaggcccggggcccgaaggcccggcccacgacatggctttttggcccggcccgaccgctgggctgtgcctgggcctccccaccggcacactgggcacggtcgggccagcccggcacgatgggccagcaggccaggcccgacatacaaagtatagggactaaaaatggatatataaatgtcactgtcgaaagaatagggatcttaaatagacttattttagctatttatataccacagcacaaagaagagggaggtagaatagacttttttagctatatatatgtcacacctcccggcggacaccttcctgacgacctcaccggaggacacgtccacgatgcagacgtccaccagctccctcccgtaggcgcagaggcggccgtcggcgttgaagcggccgcggacggtgacggcgaggacacggcctctccatcggaggtggcgacgagaggatagtcgttgtctccgttttcgccaccttcaaatcgcggattttccatcggcggaggcggcaccatcgttgacggctttctcgatttaattatttttgtcagaaacggagcttgccttatttgaagaaggcttaaggagtaatccgagtacttgaccggcatgatttcgaaaatgcttggcgccgggcatcgatgcatcgggcgctgctggcgccggagcccaccatggagcctgctacgccgcccatgtctctcccacgcgtgccctcatactgcctcgtgttccgaccacatattccgttgcaacaaatcacccacatattttggaaatcctctattaagggaatacgtttcatattttttttcactaatgtttcacctagtgtactcacaatatttcactatgtataaatctaatgttgcagtgaattgaaacattcttttgcaacaaatcactcacatactatggaaactctaagggaattcgtttcactttttgttccacaaaaaatgcttcacctaatatacttataatgtttcattttgtatggatcaaatgttgcagtgacttgaaacattctttcgctatctgctgaaacattgtttttatataaggtaaaacaacgctcgatttaaactattgaaacatttttgatctacctagtgaaacaattctgatatacttggtggaacaacgtgtaacatttaaaaataatttaataataagctattttttcatcagaatatatccatgcgtggtcttgttttaaagatttaattgcaacgaatttaatggtgcaatcggatcatgatttgaataaataaattaagagaaaaaatagtttaaaatatttttgaacgcatgaatgcttgatgacatcatgttgacgtgggcgtccgattcctagtcgcctccagatgatttatatgcttgtatctcactggctcagttgagtagaaaaaccatccatatgcaattgatccgtgagaatcaggtcacataggttgatttttttagatggatggagtatttggttgaaaagcgacaaatcagtagactaggggcctgtttagatcccctggcaaaattttttaccatgtcacatcgaatgtttgggcacatgcatggaatattaaaaaaaataactaattacacatattacatgtaaattgcgagacgaatcttttaagcctaattacttcatgatttgacaatgtggtgctacagtgaacatttgctaatgacggattaattaggcctaataaacagtttgcaggcagaatctgtaatttgttttattattagtctgcgtttaatactttaaatgtgtatccgtatatccgatgtgacacacctaaatttttcacccctggatctaaacacaacctagctagatagaaccaacccattcattgtaccgtacgcacgcccaacagggctaaccttccagaacatccagtgtggaacttgtcagaaatggatttcacaacactctggagataagagaatggtgttgcacccatgtataggagggacgtcactgcacacagtgcgtgctctcgtaagagactaaaggcctgttcggttgcttgtctacggtggctgcggctgcaccatatgtgtgcggcactgttgctgctggctgcgtcgcagccacaacacaagcagccgaacagaccctaaaggtacgactcaatcatttttatgattagtacccggccaattaagcgtgctttttgaaagtatgcaactattactacctcagaaaagaaaataggtgtcggttgggaacctataaagatgccggattttcaaccggcacctagaaagcatggaaggaaaaatatgtgccggttccgatgtcggtttgaaccgacacctttgaggtttcaaaataacaataaaaaaaagctggctcgaggcatcggctcaattcaagaaaatgtatcgagcaactccccttcacccgatttcacccatcatttaattcatcaaattaatcggcatccaagaactcaaaaacatcccagagcatcaccagaatcaacactaatacaaacacaaaaaagatggacgacggcctctggagaggatagagctgcagacgagcagtacgtcgagcaccgccgttaccacctcccctcgccaaggatggaactgcagaagaatagcacgccgcccgccgctgtcgccttccttcctaccaccgcccaccaccgcacgtcgctgcagccgccttccctcctgctagatctggcagaggggaggacgccacccgccgctgctgcctcccctcccatcgccgcccatcgctgatgtcgcctccctcccgccaccacacatcgctgctgctgcctcccctcccaccggatctggaggaggggacggcgctacccatcgctgccgcctctcctcccgccgccgcacgccgctgcgactgagagagccgagagagagagggaccgagagagatagttgagacagagagagaggagagggtgccgcacgtctcctttgtggagtggataaggacataataaaagagagatgagaaggaggagagagccactgcttcggctcggctcgattttaggcgtgccatttttttttaaaaaaacaatacttggagagatatatatgatgacttttctttgttttattttaatatatgtgtgaagtacatatggttaattaattaatttatacagtgttgttcgttctatgtggttatttatagtaaacggtagcacgtatatatagatgtctccgctcgcacgcacatgaaacctgagcttgagtcgctcggcactactatagagcgtgtggtgtcttggatagagggagcgtgggaatgagaaagacacacgaagagtagagtggaccataacatgaaacggaaggaaaagattatgcattccaaagtaaaaacagggttggatggatataatttactcagtaaattatataattaacggtaacgattcatctaactttctctatatgcagatgtgctcggcgtggtgcacccacctatctatgtcctccattaacaacttcttagttaattttctagatcagtataagaagagttgccactttagaaatgagatcgtctatagataaatttgtatggatgactctatggctcgggcgcccgattgggttggagaaaaattgggtgctgataacgtcagcgcccgatttacgtgtaaaactactttaaattgatttttctcttaaattacttatccaaatcatgatccgattgcaccattaaattcgttgcaattaaatcttcaaaacaagaccacacatggatatattccgacaaaaaaaattttaatttattattgaattatttttaaatgttgcacgatgttccaccaggtatatcggaattgtttcactaagtagatcgaaaatgtttcactcgtttaaatcgggtgttgtttcaccttatataaaaacaatgtttcagcaaatagcgaaagaacgtttcagttcactgcaacatttgatccatacatagtgaaacattatacgtatactaggtgaaacatttttcggtagaacaaaaaataaaccgaattcccttaataggggatttccaaaatatgtgggtttttttgttgcaatggagtatttcagttcactgcaacattagatctatacatagtgaaacattgtgagtacactaggtgaaacattttttgtgaacaaaaaataaaccaaatttccttaacagagggttttcaaaatatgtgggtgatttgttgcaacgacgcgttccataatatcaaaatccactgcaatatttgatccatatatagtgaaacatcactagtacactatctgaaacatcgtaaaactattggttgaaacattaagaaaaccatatgcaacattctaaaaaaaaaatcaataaaaaagccaaaatatttttttgtcgaaatataattatgtgtggtcttattgtaaagatttaattgtaacaaatttagtggtgcaatcagattgtagattagataaatagtttacgagaaaaaatctttccaagaaatgaaagatgttagtatttgctttgattaacgtcaacgtcacagtctgatgcatggatagccgtccgatccgtgcggctcgatagcacggcgcgcgcggcgaccgatttttcagcgtacgatcgggcgcggtgctgagcattttcgaatttgtatgcagctatgagatgggctccaacaattccaacaagctgtatgacagagctaagtcaagatattaatggtgtactcctcgattcatcaaaggtgtctttgtaatgtgatagttatataactattgttttggtaggctattatattaattacaaaagataattgtactattattcttaaatagatatcggaaagtataatatttttatttaaaaatcggtaccttttgtactaggtatttcgagatacaccaaaattttttatactattttaagaagaaggtggtggtggtggcagtgaatatgatatccccatactctcattgtaaattttacaaattaccacttgaacttctttctattaaaaaaataaaaaacataaatgtataaccacataaagttacgccatgtattctacattacatttctaataatattatcataccaaattcacatagcaacggcgcgaggtctaactacagaatcaatcctccaagctaaattccgaacaatgggctgcataatgatgagttgatcatcactaaaaggtaactaaaattaagcttacttccccggcggcgcagctccaaggctatcatcaagacttgggatgaaccaaaacggaggaggccagttcatgcatcgcccgagcggcttcacctcctcgctctcctcatcctccaacttgtccttgatcctcttcatcgactcgtcgtctaaccgcgtcatcctcgtgatcctcctgcttttttgcctcctgatgttgatcctcctcacgccgaagtcctccgccatggcggcgccggcgtagccggcggcgtcctcggtgaagtacacggcgccaccggcgagcacggcgtcggcgtccctcttgccgacgcacaccgcgccggtgtagctgacgaacgtcgccaggttatggtagatggcggcgccgtccatggtggccggccactccatgccgccgtcgctggcccatgtcaggtgccagacgtggaacgtcgccgtggtgcgctgcgtccggcctccgccgccgccgtcgctgccgacctgcttgtgcttgtacacccgcttgaggaggtagagcgtgccgcgcggcgctccgacgaggtagcagcactcgccggcgcggtcgcggtggtcgtgttcgtattcccgggacatggtgatggcgttgacgttgttgtccgccttgacgacgtagtggtagggcgagtcgatgaccagcaccgactcgagaatctccggcgacctgcggacgttgcagtcgaacttccagcgcgcgaccttgccggagaggtgcaccgtgtagagcttgccgtccccgtgcctcgccatgtcgacgattccgtccagcttgttgttgacgagacgccacgagcgctggcccgtgcgtgccatggcgaactccctctccctcctgtagaggacggcgacggtggcgccgccgtcgctgatgtcgacgacgacggccttgagcaggacgaggtcgcagaggccgtcgaacgagaacgccacgcccggcccgccgcggtggtgttcgtccacgtacaggaagctaccgacgcacccgtcgtagccgtgggcggcgtcgaggtagggcagcctccagagcggcgggagcggcgcggtggcggcggtgagcgggttaacgaggcgcgcgtacccgaagtcgttcgccacgacgagccacccggacgagcacccgaggcagatctcgcggcggccgaggcgcacgtggcggccggggagctgcacagccgcgacgtcacccgcttgacggcggccgaggtaggagccatcggccttggcggcgaggagcagccacgggacgcgctccaccgcggcggcgaggcggcgcgcctcgccgcgcagcgcgcgctcccaggacgggcagacgttgcggcagttgaggaagtcgacctgcgaggtgaggcggccggtgatgtgggtgatgatgtcggcggggagctcgggctcggatgagtcgccgccgtcgtccaccggccgcttccgctttcccatctcgatcgccatggagacgagacgagaatgatggggttttgccgttggaactcgcaagtttctcggactcttgttgggatcagtatatgtcggttagccttcgaactctgagcaaataaacagattttcttctaaaaacgtgaggaatttggaaacgattttttgtcgcggaaaaatctagaaatccggtgccacacgagtacgcgcaaggcggttaaaaggcaatcgctgcgggctggggccgcgtgtccccggtgggccttgtccacatgaacgaaaaaggcaaacgctatgatagatgtgactgtctcatccaaacttatccatatcattcacttataaatgaagagatatgtcatctctagcatatctctaatatctctaagagcaggtacaataatgggcggtagatgatccacgtaggatttattgatgagctgaaggagagagaagaaggggacgactaattagtcgcccggctgcacgctccgcctgaggcgctgtgggcccactaagagagatgggcgcacccgcgcaaggcgccgttgcccgcatcaccgacgtcgtgctctaccgctatggccgacgtcacgcaccaccggattgccgctgtccccgtcctcgtccgctatggctaccatcgccatcgtgaccgctaccgctgccagcgtctgccatgaccgtcactgccgccctcatccgccatggttgtcgccgccgcactcgtccgcttgcatccgtcgtgaccgttgccgccgcccttgtccgccgtgaccgtcgtcgccgccctcgtccgcaatggttgttgccgttgccgccatcctcgtccgccgtgaccgcattcatcgtcgattgcatctgtcgtgacagttgtcgccatcgactggatctgtcgccgccactgccctcacccgccatggcttccgacgcctcgctgtcgccatcaactgcgttcgccgccgccgcatagtccattgtggcccctggaccgccgacctcatcctctgcacttgtctcctgcgtccgcctcggctacaaccttgtccaccgcggccacccgtgttcggcttggccacggcctcttccgtcgccgttgcccttggtccaccgcgatcgtcgtcgtcacgttcttttgctacatctcatccatcacgttcgtcgcgtccgtctaccgatgcaccctcatccgctgcgtccgccaccgtcgtcgccctcttccgcctcagttggcgtccttgtccgccccagccaccgcgggtgccaccgtcatccattgccgtgtgcatcgccgtagttcgaaggagcaaaggtgagaggaacagatgggaaagatggtgggctagacaaaggtaataaaatatatgtgttacaattaatctattatacacattggctatattgtttgctatatatgacatggctatctattgtagccgacagtgggctttattactgaacttgctctaatactctcacacatttcttaaagttcgtgtggaggttgcctctttatttttagggtggctcatcatctctctccttatcacttctctcctcaatccaatgttgcactcttaggggcagcatatagagtattacagtacttgcctaagacaatatgtgtgataactcacaagctcgaggctagacttttgctggctaatccttactattataataagaaaatagtatttgacaaaaaaacatgtgtatttcaaaattttacactagagttatctagtatatatatatagctatcgagtttacattagaattagaaaatatgatacctcctgatatcaggatgataaatttattattctatatggtttcacaaaaatatatttgagacacgtgtcttcgattaaataacagacgtggcttgaaaacaacatcgatgtcttccccgttagcgacatagttacaaggtaagtcaatatttactttattataataacactgattttttaaatatatttttatgtgaaatcagatgaagagacactttactttaaaattatatagctcaataagatctacaatttaattggcagtcttttcgtttgagattgtttacgtgcttaaatatatgttacaagctctaatatttattttgaaaattgaatttttgatttatctattattatatactaaaagtccatgaagcttcctacaaacattctcaagtcgccacgtggcgctctaataaaatagagaaaatcctagatattctaagaaaaaagcaaaacatctatcccttaattttcacttaaattggtgggtccaatattatagaccgttagataaaattgatcttaaaacaaactaaataccatgggtcccacctatcctcctcccatgtattggcaggtggagtatatacgtacgtatgtacgcttcctttcctcctttttttttccttttttcttcttttttcaatttatatatttaatggatatattttttaaataatcattattttacaaacaaagaatctaccatcatataatttaaacgggtatactctttactttgtacaattattttcaaataatgcattactttaaaataaattttacacaattatatcgtattttacacaattatatcgtatagttatcaaataagcaatatctatattaactaatttatatgtgcacttaagctgatggccccattatataaatcatcggatctactttttattacattggtctattattctcaagtaatgcactgtttcaaaataaggtctacaccattatattatctatccattatattaacaatttaaaatctatattaactaatttacacttacactagaacaggtggacatattattataatcattggatctattgattgctaataaataaagcgttcgaaattctctttttgcccgctgcacaatgcacgtctgcaccttggcctttcacacgcgtgacaaagcgtagtgtctgagacatctaagttgatcataactgctgtagcgctaccgctttgccacatatcaaatcatatatggagatgattaattttgttaataacatggaaagaaaattaaaggtgtgatgcagcgagagaataattaagcaccatgggttgtgtttttctcaacactaattagctatgtttaagttaaaaccgagagttgattatatagtaattataatgtatttgtgttatgtcgtatttggattttttactatttgtttgtacaagtgaaaggaatcattatgttataaatgtgagcacaatattgacgaatattaatataactcttactacgataagggtgataaagggagtttaaggccctctcttttttttcccgattccatattttggtttttgtttacacgcatttcaagtttctaaatggtgtcttctttaaacaacattctaactttttagaagtcaattcattcaattataccctcaaatagctatcacataaattatataattcatcaatttcagctattctaaaccttaagtactacatatttttttttcatgtgagtcatggtgataagtaaattggtgatcaacggatcatcgaagtcataagatgaatatgtaagagttactctgaacaattataaataggtgtcaaaattagttgctattaattagacatctaatggcttgctagccacaatattaatttctctctacatgtatataaacatggatgaagttggaacaaatattaccatatgtcccacacatatatattgcacaattaatattctaattagtcatttaaaattccttaaaatgctcgcaagctgccacgtggtgctgtaataaattagggcaaatattagaaattctaagaaaaaaaatcaaagtatctattacttgattttcagttaaatcgtaggtccaatattataaaccgttagattaaaatgatcttagaacaaactaaatagtacgaggtcccacctcggcataggtacgcacctacgtgcatggtacgtatgcctcccctccctttttttcatttttctctttcttctttttttcccatgcatatgcttccctccctttattaccatatcatgcgtcttcatgagacgatttaatcaaaagaattttgagtatcttgcactcggatttttcatttgcggccatactatacgtatgtatatagatggactgtatgataattaactagcaatagtttcttatttactcgagaaaaaaaacattattcaaaagttgtaagtatttaatccatctcctactcaaaagtttgtgaatggttttctaagatatcttaagaaaaatagataccttaaattattataaaataacattatccaaactttagtttgccctaaatctattagaaaaaatttctgaacaaacaataatcttaccttttaataatataagtgcccacgcatacgcgcagaccaccttcctagttgttttaaatgatcttggatggacacatgctctacaccgaagctatataattcaatgggatgtgcaactttgtaggtgacaacgttttctttggaaaacaattacatgtccgaatatgtttataagttctcattaaaaacagattttcaaattttccaaatgacacagacgagatctacagctttgtagttgatattttttcattttaaacgatttaaagtgtgaaatacgaattgcaagttttagagagaagttaagtaaaaaggaatatcatcatttttctctaaagaagctatcataccatgtttggatatgtgcatagtacttaaacactcgtgagtgttctcaatggttatattaccttgatttaataatcatgttagttgaataaaaattccttttatctttaagaaaacatcaaactgtttcacatgacctcgtggactcttaggtcttgtttgattaatgggctttagggaaatgatttcccacccaccaaaaggcatctttgaatgctaactattcattctctctcctccatttaatcctaacacttcttttatttcttaattccaatcccactccttattttccattatctaacatacccttaaaatttacaaacacttcaatcttgaaccggagccaatactacattgtaatatataaacattcttcgaattacatgtttattcaaataatataccactggcactatttaccattttatatatttttttgtgttaaaaaatacatatgttcctttgtacaaataatttttttgaccaagcctttgtacaaataattcatcagttgcttattttatttcaggatattcattgggccaaattgacagctgttatttatagcatactttgtgtgctgtagcaccaattctgaagaatccaagtcattttaggtctgcagaatttagttatataattctcttactactttgaaaatgtcatttgcttacatcgttcatacttctactcaaatttctctatgctttgtttttgtgaaactcttatcagatacagttactccttttcaacagcattgacatcaaagtccatgctcagaatcgtaacaagcttgaaatgtctgaatatacgatcaggttaggatgttatcaaaattccagcatgttcagacaagagacagctgaaacaacaaaacagtaggatattagcaactgcaaatctgcaatataactacataagtaagtcgacttcagtgcacatagttttgtagtagaaccatcaagttcatataacagcgaaaacaggactaaaaccatcagaaaagaacataacttgaataaagtttggacagaacacttcagttgagtgatcccactgaaatcttatacatcaaagatttccaagagttcatcaacagaagtttgccagttacaattcggctacaaatttacagcagatattgagataacatgaagagacaggagtactaattatctgaagacttgatatgctacaacgagcagttcacagcgaacaaatgtacttaactagattgtcaatggcgagagtcgcagcgacgcattgattcgcctggattttcaggcgacgcgctgtctccctcatcgcggcgccttcttccccaaccatcagcttcctcaccgccacggcgacgcggtcccggtcgaacacctcgccgagctccagcccgacgccccactggtgcgtcacgtacctcgcgttcaccgtctggtcggcgaagcacggccgcgcgagcatgggcaccccctcacagacgctctccagcgtcgagttccacccgcagtgcgtccagaacccgccgatggccgggtgcgccaggacgtccctctgcggcgcccatggcacgatcttgcccctgctcacgtcgaccccgtagggtagcgctggcatacagccgcggacggagccgggccggttgacccagaggaacggcacgccgctggcggcgagaccccacgccatttcgtcgaacatgtcgtggtcgatgcaggcgacgctccccaggctcacgtacagcacggagcgcggcgggtgcgcgtccagccacgcgaggcaggcgcggtccggaccgtacaggcgcacgaaatggcggtactgctccgccgccgtcctcgccgtggtgagcttgtgcagcggcccgacggcgaaggttggcttggacagctcggcctcgatcttgcccagttccgacgcctcgatggcgtcgaacgtgttgacgacgaccccagacgccgaatcccgcatcgcgtcggcgacgcgggcgatgaagccgcacagcgcctccgtctcgcagccgtcgacgcggatcaggtctcgcacccggagcggctccagctccggcaccgcctcatccagccgctcgcctgcagggataatccacaaagattcagcgagaacgaagtggcactcatctgagttctcccccaagattcaagctcgaattcatccgttcttgccttggattgggatgaatccggcgtcgcgcagccgcgggaaggcgagcatgctgcggaacgtggcggcgctgtccgtccggagcgcgagcgcggggacgccgagccgggccgccgcgcccagcgccgcgtaccactgcccgtccaccacggcgcacgccacgccggggagcagcgacgccagggcgtcccggaacggggcctcgcaggcggcgttgagcgcgaggagctgcgcgacgatgtcggcgccaggggaggtggcctcctcggggagcgccgcctcgtggatggggaggaaggcgaggtccggcccgtggcggtggcgcgccgggtcgggcgcgttggagcgcgtgtggaggacggtgacggcgagcccccgcgcgcggaggagatcggcgagctggagcatggggctcaggtggccctggaacggcagcgggaacagcgcgacgcggcggccggcgtggggttgccgttcgggttcccgttcttgcgtggccatcgctgccgtcctcggcgaggtcctggggcttgcgacttgcgaggtacaagcagcgagcgctagagagtactgacacggatttctttttcaggtcggtggagaattgtttcaacaaatgcggctatatgatattatgatgcgatggcatttgctaaggtagtacttccattcttatcacttgctcccttcgtttcaaaataaactaaaattaagtgaccagtatacatatgatgtgaccacttaccaagatgaaaccttctaattagaaaagtaattgagatgttttgttgtgcattaaatctcaatgctagtatagaactagagaaaggattgtgtttaactctctcttccatgatccaactataaaatttctgggtgtgttcgattcaaagaatggaagtactccatttgtcccttaaaaaaacttaaatattaggaataaagacacgatttgagtatttttagatagaatgagtagatttttagtggcatacgaaacgagataagacattagcacataattaattgagtattaattattacaagcttgcaaaatggacttattttttaaaaaaactttcatgtgcaaactttttaggcctttcacagtgctccacctagagcgttacttcatgcgtccacataagctgcgtgatggcgtggaagaaagagagtgtgggccttcgtcccttcactgaggtcttcgtttctcaacaaggatgcgactaaaacaattgtactctcaacaagggtgtttgtttcaaccgcatgtgtttgtttatgtactctcaacaagggtgtgggtcctcgtcccttcactgaggtcttcgtttctcaacaagggtgtgttcgattcaaagaatggaagtactccactgctttactcatgttttcttctcaaccaatcgtaatgttccttgatgattttcattttattttttaaatactcgtgttaaaccccgataatacttatattttgagaaagaggaagtagtcactttggttttattgtttgacacatttaacttataaatgtacatttatcattctttaatttatgtagtagttgttaaaaaatataagttatggttaaaatatcttttatgtaaaataaatggtaattacctaatattttaacaagacgaatgatgaaatatatatatatatatatattcaaaagttaatggcataaaacactgcaaaacaagaggaataactataacacgagaggtgttttcatgtttattaaaataagatgtcacggatacatcagcagtaatacagagaatcatggttagtcacacataaggacttgctatcttctcatcctatgaaatatcttttttttaaaaaaaatagcgtttcagattttacaaaaggctattgctgcaccgtgttcttcctctagctttgtttgaataaaccctttaattaatagagtagatacgtttgtcagttatactttgataggtactcctatattaaaactccgagttctgatgtacatagtacattgtcttttactaggcccttgtttacttctcagctttttttcttcaaactttcaatttttcatcacattaaaacttttctacacatataaacttttattttttttcttcaaacttttaattttagtcaaacttttaattttattgtggaattaaacacaccctagatttcttgtgatggtctgtggtgggtgcgggccgtggcgccactgacatgtggcatgataaattgtttattggtgagttaggcaaacatgtagtaggcctgttcggctgaaaaaaaaaaagcagcagccggctgctcgtgctcacctgcctgccgaacaggctcgtagaagaaagaaaatacatttcagcccatttaatcacaggattgaagaaatatagaaatatgaaaaagtcaggaatagtataggaaatcatatggaaaacagaggatatgttagaggattgaaaaacatagaaaaattataggaatgatcatttgattggtacaaagaaaaaacacagcaatgttgagtattaagttaatagcaatcaaaatttgaatggttttactagggtaaaccttatctttcaatagtgttttgcctacgcataggaaaataaaaatgagctcaaggtggatgttagtttttctatggaattcccttaaaatcatgtcataggaaattttctcatgctttttctatgttcaattcctacaaatcaaagggatgaacagtaccaaatcctataagattcttgttcctatgtttttcctctactttttcatatgaatcaaaagaggccttcatagttttattattctcaatgaggttgatcgtttgtgctgctttgtagttagctgcgggtgcggctgtgctgtgtgtacagtgcaagcagtaacaattatattaggtttggtgttgttgatgcggctgctcagccgcagcaatgtctcccgatcagccctaataaatagaattccaacactctcatagtggagatttgcttatcaattatatatattagtatataatgtagatttcatccaatgccatttattagcatacattagagattcgaagagtatattaaaaggaaaaatctaaagagataacatatggtccaccaacttatcaatagcttgctgagtagaacctccattcttcaagcatatcaatattttcttcttaagttcatctgccctctgcttaacctcagccccctcctcaccttccatcaacctcctaatggcctcctcaattttccatctctctagcttaccctccacccgaaaacctatctgccacgtctcctgcacgtacctcgcagtaaccagttgatctccaaagataggccttgacaacatcgggaccccttcgtaaatactctctaacgtcgagttccaaccattgtgcgtccaaaacccacccaccgcatggtgagctagcacctccgtctgcggtgcccaatcgaccactttgcacctaccctccaccgcttccacaaacccttccggtagctccggtttccccgagacaccgataacgagaccaggacgaaccacccataggaaaggccttccactgtttgccaaaccccaggctacctcgttgaactcatcctggctcaccatgaccacactcccaaaactcacatatagcacggatccgggctccttcgtgtccagccactcgatgcagctccggtcctggtccagcaggctgctcctgtcgccattgctggtgagcttgtggagagggccaatggcgaagaccggatggggcgccgagctcgtcacgaactgagcgcagttcaggggtttcaagagcttcgaatgtgttcaccactgtgccggaggagttcgttgtggtttcggtagagagagccaggattttgttggccatttcctcgttgaagtacttgcttgggtcgaacaggtctgatacacgcagtggtggcatctcctccactggcctgttcagctcagactctgaaacgaaacagaacaaaatttgttcaaatggaactaattaaggcatccgggtaactggtttggaatgggtatatagtcatctgaattaattaattgattgattaattactagtgcaattgtgtggttagatacgttgacatggttgtatttgaaatttaaaaacagagcttttttaacagatgaaacagagttgcattacatatgcaaaacaaactattgaccatctgttaatgaatttgaaaatccatttgaaatgtgtactggtcaaatgaaattattaaaccatctaattaatagctggagcaattaatttgtatttagaaacaagagtatccttaaagctaaaacagttgtatacaaaataaataattgaccacctgtaataaacttgaaatttcatttgaaagaattttagccgtatttttagaataaaatgattttcagctcacctttcgctggcaagtatcccttctcgcggagcatggcgtacgacctgaacaggcggaacgccgccgcgctgccggtggcagcacgatcgtcggaaggccgagctccgccgcggccttctgcgcccggggagcgcggcgtcgatgaccaggcacgccggccgctccggcccggacatcagcgacgcgagcgcgtcgcgggcgcacccggacgcctcgatggcggcgttgagcgccatgatcttggcgatgccgtcccggggcgccgcggcgagcgcgcgcgcgatggcgtcggccgacggcacggcgacgaacgcgagctccgggtgcgccgcctcgtcgggcgcgttgtaggccgtgtggagcacggtggcggcgagcccgcgcgcgtggagcgccccggcgagctgcagcatcgggctcaggtggccctggaacggcagcgggaacagcaccacgtggccgcgtggggctcgcccgtctcctctatctctggctccggccatcgtcgccgtcgtctcgccggcggttggctggccaggaagctttccttctattgtggaattggacagcccgttgctgttgcaggtttcggactagttgggggatcgatatatatatatatatatatatatatatatatatatatatatatatccagatttggtcaacaagtgaagaagcaaaaaacagtataattattagggattagtattcattaattaatttgcgtagtggccaacaaaagattttctagtgctgatgcctggatggttgaccgttgattcttcatgcttctaggaaagttcagtcagggtctgttttagtctgcgaaaagaaaatttttttgtatcacatcggatatttgaccagatgtcggaaggggtttttggacatgaatgaaaaaactaattttataactcgcctggaaactgcgagacaaatcttttgagcctaattaatccatcattagcatatgtgagttactgtagcacttatggctaatcatggactaattaggctcaaaagattcgtctcgcgaatttccccttaactatgtaattagtctttttaatctatattttaatgttctatgcatatgtccaaagattcgatgtgtgatgtttttggaaaaaaatttgggatctaaaccaggcctaacaatagtgatatgtagggttgtgagcagtagatgttgcctcttgtttctctttgtgattggtaaagtagcaatcaccatcctccaactaacctaggatatcacacttgaaggttgatgttgacctatcttaacctactactttctctgttcctcaaatttcaaaccgtagcttcttcaagataaagtttaagggcccattcgttttgaaggagaaataaaggaaaaacgtacaaggcccattcgttttgtagtatttgagcaaaggaaaagcataggaaaatttcctttggttatgattcctaagaaattccatatggaaattagcatccagttagagctcatttttctattcctacgcataggatgaaggcaaatcacttagggcctctttgatttggaggaaaatcataggaattttcgaggatttcaatcctattggaaaaaaaatcctatgaatacctttgaaacaagggattgaatcctatcctatccttcaaaaatcctatggaatggacaatcctatagagattttggagaaaattttgctagagcgtcaacctcttggaaaatttcctttgagtctctctctatcttattcttgtgtttttcctgcgatccaatcaaacggtcattcttgtattttccatgtgttttgtaatcgtctgttttgcactttaattcctgtcagaatcttttgtttttcttattccaacatctttttcattcctacgattcaaagggcccctcattgttctgtgtatttagccttaagttgtacagattaaagtattccaaccttgatcatgttaacttaatactaagcattcctgtatttttcctaccaatcatccaaaggatcaatgctatatttttcctatcatttgttttgcacacgcgttcctatacgattcctatgttttttttatattcctatgatttggaaatcttgtaaaccgaataagccctaagaaaaaagacaaaagaccaaaatggccctaattaataggaaagttgtattgatggataggttggtgaggggtattaaatggataattttttttgatttgccaatggatggtaagtaagaaggtagaagttggtttaattcgggacaaaattcaaacatagaaattgatttaatttgggacggaggaaatagtacaattcaccttcttgtggaatgaactatgtaacactactagccctaattatttggacaaaagagattctttgtccaaagaacacaaaaaaaaatccaaggattacaagagtttgctttgttctcataaatatcaatgtgaaatacttacaccaattaacttagccacttatgattcacaaagataagatataactaactagcctatcaatagcaatttgagaggacccaccgtcttccaagcagcgtgccactttgttcttaagctcatttgctctttccctcatctcagctccctcatttttccccattaatttcataatcgctttctcaattttgcaccactctaactttccctcgagctcaaaccctacaccccacaccgcttccacgtaccttgtatttatcatctgatctgcgaattgaggcctacatatcataagaactccctcacatatactctccaatatcgagttccatccaccgtgtgtccaaaaccagcccactgcacagtgtgccagcacctcctgctgtggggcccacttaatcaccttacccctaccttccaccgcactctcaaacccatccggcaagcatgctctctccacccccctcacaaggtttggacgaaccacccatagaaaaggatggccgctcttctccaacccaaatgcgacctccatgaactcgtcggagtccatggatgccaagctcccaaagctcacgtacaacacggaccctgtcgcctgcgtgtccagctactcgatgcagctctggtcttggcgtaggttgaaggtgttgctcccagtgttcatggaggagagcctgtggagtgggccagtggcgagcacggtggctacgctgtcgtcaccaagctcgccgtggaccctctcgagctccatgggttccagctcttcgaatgtgctgatcaccacgccattggagttcctcaccgtttcggcgatccgagcaagcacttcgaaaaccagttcatcacggtgctgaaaaggtcccttactcgcagtggtggtagctccttcactggttcgtataattgtgattctggttcataatacatttaccaaccaaaatataattaatggcggatataaaacttagcaaactttaacattttttacatgatctctatggatacaacacaaggattcaaagccaaataaaacctactccctctatttctaaagtttatttagcaaagattaagattaaggggaaagattctccttcagttatctctttagtcccgatgcttagattgcgtgcattcaaatatgtatccttaaaaatacttacattgtatatcgaatttgaatcccgtaaattcttatattagattcgttccaaaatctttatagtttgagacgggggtgtatgaaaatatgcgattgtttagtcctaacctttgggaggcagatagccttttgaagaagcatgtcgtaggcgaggtagcagcgaaggcaggcggcgctgccggtgcggagcacgagcgtggggatccccagcccggcggcggccttctgcacggcgaggagatgggagtctatgacgaggcacgcgacgctgggctgcccctcgccggcggcgaccaccgaggcgagcacctcgcggatgttggacggcgacgcggcgccgctctcgtcctccgtggcctccatggcggcgttcatggcgaggatgatctcggcgacgcgaccgcgcgcggcgacgtcgggcgggatgccgtcggcgacctcgacgaacgcgagctccgggtggcgcgacgggtcgagcgcgttgaagcgggtgtggagcacggtgacgcacaggccgccgcggccgtggagcgcgccggccagctgcagcatcgggttggtgtggccctggaacggcagcgggaacaccagcacccggcgccgccgctcgccgccgtggcgcgctcctcctccgacgacgctggcgctggccatcgcggtcagtaggatgtcgctcgctctgcgtgtaatcagctcgcgctaaaggcccagctgtcgccgttatttttctcggttttccaggtgggtcccacgtgaaaaggtgacgtgactgcagtactgcagaactggtaggggcgaaacaaacaaatcgcgttcggtgacaaggtgtaaagcaccgcatttggtattgttgacgttgcgctattttgcattttcttctggatgccagttgccacggagcagcagctatatagccagctaggcgtcaccagtcggagggtttttttttatactgctgtgataaatctttattttatatatacttaaaagattcatagtgtttttatcgtcccaactgatataggagaagagttgggttgtcggacgccgtttgcaccttccagcgctagtgaggctagggggtcacatggagccacggtggcatgggatgaattgaggcgtcgagtggcaaagtgggcatgaaaaatgaggagaggataaggtggggtcattgtcatgcacaaatcttaatgtgttctaggccgtttaaaaagtatgaaagtggttttctataaatatatgatatagaccgtcccttataatattgttgtaatgcttctcttgttctagtttgttttcacacatagaatcaaaattaagaatgagggaacatgaaaagagataaaagagataaagtttattaactcgtactatatggccgagcttaattaaacgcgaaaagaatataatatgtaagaaaacaaagggatatttggctcgtactcaacaatcaaacctaaggatgagagggagatattgtgacaagaaagataactccaagatttacagtactacttagtggtgcataaggatgaaggaaagataatatttctcacattgataggactttgtcccatctcttcttctcctatgcattggctattggcacttcagtcaaataaatgttgtgtggtgcatcaagagagagccacatacatggtgaaaattgtaaaggctatatgcaggggcggaatcaggcatagggcagctagggcttgggccccatgcctagctccataatccctattataatcttgaaaaatactatgtaatttatgaaaatatttaagttcccattagatcagtcctagacgtggaaactttctagctccgccactggccacatgacgtgaatatcatgcatagggcctacgagagatctgtgcgttgatggcaaagacgatgatgaaatgcttattgattcttgatgcctcacaacggaacagaaacagtgacaaactaaatgtggttgttcttagaggagtgaaattttacccctaggccagtgcgaagaaggacattgggagaatgaggacatctatatcacttgctttgatacatataaataagaaaattaaaggaaaccttcaacttcttcacaattcgtcgatggtagtattcacacgataagtacataattaaactcaagtgttagagagatattatataattcactaacctgttgatggcaatttgagaagatccactactttccaagcattggtccattttcttcttaagctcttttgctcgttccctgatctcagctccctccttttctaccatcaacctcttaatcgctttcttgatttcacccctttctagcttgccaacaagctcaaagcctacagcccacaccgcttctaagtaccttgtattcaacatttggtctgcaaattgaggtttacatatcattgggactccctcactaacactctctagcgtcgagttccacccattgtgcgtccaaaaccctcccactgcgtggtgtgctagcacctcttgctgtggggcccacttaatcaccttacccctaccctccaccgcacgctcgaacccatccggcaaacttggtttatccaaacccttcacaaggtctggtcgaaccacccatagaaaaggctggccactgctctccaatccccatgccacctccaagaactcgttggagtccaatgacgctaagctcccaaagctcacgtacaacacggatcccgtcgcctgcgtgtccagccactcgatgcagctccggtccgggcacaggtgcaggctgcccccggcgttcatgggggagagcttgtggagcgggccgacggcgagcacgatggcgacgccgtcgccgtcaagctcgcgccggatcctctcgagctcggccggctccagctcgtcgaacgtgttgatcaccacaccgttagagtttctcgccgtttcggcgatccaaccaagaactttacggaccagttcttggttggcgttgctcgtgtagtacaggtcccttactcgcagtggcggtagctcctccactggttcatagagttgcgactctgaaacaaatgacaataatattgtttctcttaattagacagtggatttaaataaaagccggcctctatatctcaagggatgtacaaagccacaatataaaacccggcctccactccacaatgatgtagttagaacttagagcatgaatgcaaaacgaaaggattgtttggattcaaaatgaaatggaaaactgtgatgtgaaaagatgatgatttggtagtgacctttgggaggcaaatagcccttttggaggagcgcggggtaggcgaggtagcagccgaggcaggcggcgctgccggtgcggagcacgagcgtggggaggccgagctcgcggcggtcttctgcgcggccatgaggttaccgtcgatgatgaggcacgacgcgcggggcttccgcccctcgtcgtcggcggcgaccaccgacgcgagcacgtcgcggaaggacggcgacgactcaccgccgtccatggcgacgttcagggctacgatgatgtcgacgatgttaccattcgcggcgacgtcgggcgggatgccgtcgggcacctcggcgaacgcgagctccgggtagcgcgacgggtcgatcgcgttgaagcgggtgtggagcacggtgacggacagctcgccgccgccgccgccacggcggccgtggagcgcgccggcgagctgcagcatcgggttgatgtggccctggaacggaagcgggaacaccagcacccggcgccgcctgatgcttccatcgccgccgccgcggcgcgtcgctccgtcgacgctggccatcgtgttgctcgccgtgtctcagctcgggcgcgcgaggcaaagcagacgggacggtgtgtgtaccggtttatcagctgcgggtggggtgggccccacgtgtcggtgacgtgacgtcctgacgactgacgtgcaggtgggtagtcaggtacgtagcggacgaagacgtcgacgctgctaggactaggaatagtaggaccaggcgtacgtgccgggctcgtgccggccggcgtttcgcgtcactggtgacgtcacaggcagggggcgggggacggataaaaaatccttgtcatgttacgaacaatgatagattatagcttgaaaatcgggtcttgttcctctatttcttgattcgtttcttagggcgaatttggattgctgccgtcctaattttaccaaagtgctaaaacttatataagtttaggagataactacacagtagtggtagctggttgngtctaaaccanctaccactccatctatgagagactctatacacctatacttcaaataaaattttctcttaaactactcatccgatttacgatccgattacaccgttgtgttcgtaataattaaatctttataacaagatctcacatgattatattttgatgaaaaatcataaattacttttatgatatgtctaaattacttttagatttcactaagttacttcttagacatataaaagtaaattcagcaaagccaaaaggtaatttacatatattatagaagtatcttagaacaaaagaaagtaactttaatgcatgcatttttcattggacatgactacacagctagtcgtagctggtttatactccatctagtgtctcctttcaagttgaaaaatacaatagtatgtatcttatgtgtgtcagggttacgggtcaggcataccctctacccttcgatatacgttacatatcgacatggcatacccacgcgcacgcggatgttttctacatatcctaaggaaacctttcacgaaatctacagatgggaagagtccttctcggacagaactgggtcgtcggcgtatcgtattgggtctgatatctccgagttctacttggagacctccagatctgtgatataaaagggaccccccgggggagggcatagatcatcgaatcatacaaccaacatagcctaagaagcaggaatctgcgaggagccaagtcattgagagctagttcttgacagaaaacacgaggcctgggagatctgcttaactccagtgcaggtccaaaactcaccttcggatgtatgagcgtgccagttgatttgatcttgtaattaacaagaaatagaacaaagaaaccgcaatcaatcctataaatgatagccgatcggctaggtgccgatgacatattatttatttcaagccgatgtcatgcgtacatcgatcgacaaatatcaataaacaaatcaggactaaatctactcgatcggctgtagatattaatgatatataatccttatatcgatatatacttaaatcaagtgattgggatagatcggtcaccttgccgagacaatataaatcacttagatcgaaatatatattaatagtgggattatatacttttatagcatagccgatcaaatggatctggcatgtatcggctaataccccgataccactctgtattaagatgttaaagcaagtagaatataccaaacataagtctaatatacttagatgcgataagatcttaacataaagggcagatttaacatatagattaagcatatggaataaaagtagttaaatcagataagatcggctgaaactctgatactaccctaaccggcaaccagaaagcaggctagagatggtagttctaagcacgacttagtagatcaaacttaactgatgcagcactaagtatgaaaagaaacacaatatctagacaatcaagccgctggaagtttcgtagagtggtagatatatcacataatctaagttaacgtcattgtctaacctaatcggctgccttccattaacagatgttagtcgattatgggttagataaatatattatcgaagattatgtgagatatatgataactcgacgaatcatatagacaagattagagtatcataaagatggaagcactaatcctaagaacataagtcgtcatgacaagttttacctcttgttgaagatcgaagccgatgcagctcaacccgagagcacgaacttgtcgaaataaaagtaaagcaaaaagggtggcgatgcgccgagattgtattggatgtgttctcctttttttacatagggctcgggtctatttatacccgagaattacaagatacgcccataacggacacgactattatctctaacaaactctaagataccataagtctttacggcagacttttgcccaaacatatctctaagaaaatcacatagaatatcctaattaataaatacaattgccttcctaggactctatccatgcgtggcaatcatcttgaagcacatcaacttgaacccgatgacatacaccgagtcatattgtcggaatcggctgtatcggctagccccgtccgactcgaactctgccgacctgaccttagccgatttggactgcagccgattcttactctgtttccgcaacgatcttcatcttggattccacttcgatctgatcttcatctccgatgcctatagtgatagaatttaccaaatttggtcgttaacacatgccccccatgtccggaatattggataatgtttcggatttgccatataccgactctgagagaaactcgcacttgctgtttttccgactgttatcgctctgctttaaatactaaccgttgccccaaaaaatctttacgccgtgatttccgtcttcaccgcttaaacagatcccgtcctctctctctccggcgacctcctcgacgcacagggcgatttccaggcgattccactcccggccagatctccacccgcgacgatgtcgacctccaccaatccgaccgccgcatcatcaaccgaatatgctgaggtaagccccatcggctagatccccttttccgttcatcagactagttttcgctcaccttatcttgttttcttcttctctattcttgtaacatctttccaatcttgttgcagttcccagtctgttgcatgaccaacaatactttctcggtccaatcggcaatctagaccccactgagtttatcatagccgaaaccaatagaaccccttttaggtcggccaatccaaccacaagccattggaaaaacaacttcaaatcctgaccttctttggagaaaagctggcctatatggtataagcggatatcggctagcaaacaagcccattgggatgagatctgaatcagccaagccctagccctcacaatagcaaattcggccaaagatgaacccctgatggctgctgcaacttatttctggtccaacactctcaatgcttttcttttcaaccaagggccaatgaccccaacgctgctggatattatcatgctcactggcctagatgtaacctcatcagctaaccccatgaacctgaacaccaagaatacttttgagttcagaactaagagcattgggggttggtcaggatatatcacagcatatatgggcaaagggccagtcactcctagagaacatgtagcttttttgctgatgtggttggaaaaattccttttctgcggatcaagctgcggtcctacaaccaactggcaattcttagccgaggccctagtaatgaagaaacaatttcccttaggcaaaatccttctcggctatctataccagatattaaacaacgcatcggccaagataattgtcggctcagtggttggaacaggtggaccatggtggctcttgcaatcctggctgaacctggtagtcatgaaagttgtcaatcggccatctgtgacagaagctgaatttccaaggttggagccgattgtggaagatgatggagaaaaacgcaccaatcacagatgtatgtcatatggagaatatgcatctacaccagccaacgcaggagcaaagttatcagctgaacttctgaaggactggttcttcagcttttatgacgggttccaaaaagatgcccgaatttggttcttctacgccgactcaatggatttcgaactgccagccgatttcaggtttgaagacattaatcatgaaaagtttcagcaatctagagaaatcttcactactgccatcagcccatgtatcctcccaattggcatccatcaagggagaaatattcagctctcttacgagttttatcatccaatgtcatcggccagacagctcggaatgggaaaactgctaatcggcctgtacttcaccgacaagatccagtgtagaggcaatatctcttcaaccttgatgatggatcggctactgaacatccctggacccccattaggcagcattgaaaacataaagttagcaagactcaggagtagggcatttgatagatggtggggcgagtggaagctacatctgttccatcaatcggcttccatgtacatgacagacttattccctgatgctatccctcaggttaatcttcatttcttcaatcttgcttgaatagtcattcagccgatttgaaccttgactaacttttcttctgttttgcagacaacagaatcttctcctcctcgccagagtaatagcggtaaggtcattaagtatgctccaggtctaatttcaaatggaggtgggccatctctttctaccatcggcttcaatgcccccaagacttcagcacttcttcaacggctcatcagagaaccagccgatgccgacaagaagcggagaaccagatcatcggctacagatacttcagccctggctccaaagaagaaggctaagacaaagaaagctaagccagctgacgatctacccgccctagatccatccatcgaacaagctctggatgaagaagaaatcggggaagacattgaccaagctgcagccgaaataaacgatactgaaagaacaacatcggcttcacctaagcaggctcctccattcccttctgctccagctcaattagcaagggtaagcaactttctctgcccacttttgcaatcatttactttatagccgattcctcacaattttaataaatatagagaaagaaaattgctgtgaggaagaaatcggttactctagcccctaaaccagctccaccagtaagatacttctatcatctcattaactgacttgggctgattatatctaacatttatccctttggcagccttctcctccttcttcccctcttgtgcaggtagaatcaggcggccgcactccatcggctgcaggcagtcatcatgttgaagaggaggaacaattagctgcacctactattccagtaagttttatcaacataaatttgagatcggccaatcatatcttgatccttaatcatccatgatattatctcttgcaggtcttagccgatctgttctcctttgacatcaaagattacctcgatgaaacagaagaagacaccaccagtaaagcaacagttctcccgtctgatgatgtgaagaaaacactcgaagacatctcccatcggctaggagcatcactagataacctggtgaccaactgtggctcgatccgggcaagatttgcagatatccaagcctttcttccggacgaattagccgatgctcttactctagctgtctacctcgagcagcatcaattcaaactggagaaagccaggcagaggttagccgatcgccgggagcgcaatgacatcgaggctacaatccaaaccaatcggcagcttgttcatgaagaaaaaaccaagcttgatcagttatttgaaggcccgatcaaatctaatattgatcggcttgaagctcgcaagattgaactcttggcacaacttcaagaatgcaatgctgaactggatctagagcacaagaagttagccgatctcccgtaagctgtcgaagaacagaaggcaaggctaaaatcagctatcaagaaagttgctgagatgactaaatccttgaaagtcattcctggaaccgatgctcaagacgcccaagctatcgaagaaatagatcaaattaggcaaagggctatatcagctatccagcgatacttgtctcagtgatttccatgtaatagtctagaaaactgttgtaattggctaagacaccctaattactttgctgtttatacaatccctgtaccatccttgtgccggcgtgttcaaaaatttgcaattttctttgcaattctctatgtatgtgcccccctaattttacaacgttgaaaacattgacaaaattatagaaacgactaagggcgatataacaatatcggccatgtgcacatcggcaaaccacaaccgattacaatagtaaaaagcaactaagggcgatataacaatatcggccatctcaaggcgatgcaaacacatcggctatgatgtatcggcaacactacccgatcatgcattaacacaaacactgggataatatttcttcaagtatttgtcatttagagctcggccataaacttttccatcgagtccttgcaacatgtatgctcccttagacactaccttatgaatttggaacggtccttcccaattcggcgaccacttgccaaatttgctatcctgagtcccaatcggtagaatcaacttccatacaagttcaccttccgaaaagtccttgggtactaccttcttattataatgccgggcaactcgctccttatccctagtaacctttgcaagggctcgtagccgtgattgaaccagatcctccctgtcatcggccataaggttataatactcatcggctgttaaagtatcttgcaactctgttctcctcgagccgatttgaacttccatggtaaaacagcctcatgtccataaacaagtttataaggaggaacctatatcgatccatgacaagccatccgataagcccacaatgcttcagccagccgagtatgccactgccgaggataatcagaaatcttcctcttaatcaacttgaccaaactcttattagatgcctcggcctgcccattagcttgtgcataatatggtgaagaagtcaacaatttaattcccatgctatcggcaaattgaacaaactcatcagatacgaaaattgaaccttgatcaatcgtaatagtttgaggaataccaaatcgatagattatatgctcttgaacaaactgtatagcatccccagaatcaactttctttaaaggaatcgcctctacccacttggtaaaataatcggttgccaccaatataaacttatgtcctttactcgagggaggattaatcataccgatcatatcaattccccaacctctaaaaggccacggtttaataataggattcatagccgatgccggcgccctttggattgctccaaatttctgacaatcttgacaacctttataatatctgaaacaatcctccagcattgtcggccaaaaatatccagcacgtcggagcaaccacttcattttatgagccgactgatgtgtaccacatatcccttcatgaacttcgccgattgcaacttttgcctgatcggcactcaaacatttaagcaacactccatcaatcgtccgataatagaggtcatcatccaataaagtatatttctgtaatttccgcgaagccgattgagatggattctgtaaatactgaaacacatcatatctccaatcatcggctgtaattgtggcaatctctatctcgatatcttttgtcattggcttatatcccgatgctccttgagccaaatcattagcctctatattctgttctcgagatatgtgcctcagagtcaccagccgaaattcacttatcaacgttcggcacttttcgtaataaaccatcaatgtatcatccttgcattcatactctcctgccaattgactaatcaccagcaacgaatcacccatgatttcaatagcatcggctgcaactttctgaagcaactgtaacccttttaaaaccgcctcatactcagcctgattattagtcacatggtgtttaatagcataggcaaattcaaaactttccccccaaggcgcaattataaccaagccgataccataaccatgacttcatacagatccatcaaagaataatacccaaggcataacgtcaaccaagccgattgaaccatcacgatgacccacgataaaatcggctacagcctgtcccttaatcgcctttggtgattcgtgccgaagatcaaactccgttaaagaaaatatccacttgccaactctcccttttaaaatcggagccgataacatgtacttaatcacatcggctttacacaccatagtgcattcattggacaacaagtaatgcctcaacttagtgcaagagaaatataaacacaaacacaatttctccacaggagaataccttgtttctgcatccaagagccgacggcttaaataaaacacaacccgctcttttccttcaagctcctgaatcaagaccgagctgattgacttatcaccggccgacaaatataaccggaaaggaatccctttttgtggaggaatcaatactggaggagaacttaaatattctttaatattatccaaagctttctgttgttctgcccccaagtgaattgctgatcggctctcaatcttaacaatggtgtaaaaggttccagttttccagacaaattagaaataaaccttcgaacaaaattaattttgccgatcatcccctgcaactctgtcttgtttcccggaggcttaatctttttgatcgcaaggatactcctctgaggtatttcaatccccctctcatgaacaagaaatcccaagaactggccagccgatacaccaaaagcacattttgtcagattcatcttcagaccatacttcctagttctctcgaaaacttttctcaagtcggctatgtggtcctttatttctctggatttaacaaccacatcatcaatatagacctcaaccaaccatccgatcagatcatgatatatataattcatagccctctggtacgtagctccagcactctttaagccgaaagtcattacaacccattcgaacaagccgattgcaccaggacatctgaaagccgtcttatggatatcttcttcggccataaagatttgattataccccgcgttcccatccataaaacttagtatcttatgtccagaagcagcatcaaccaactgatcggccactggcatcagatattcatccttcggggtagctttattcaaatccctgaaatcaatgcagaccctcaccttaccatttttcttgataacaggaactatactagaaacccattcagcatatcggcaaggataaataaaaccagcatcatacaaacgtttgattttagctttgacaggttcaagcatatcagccttgcatctcctcggaggctgttggtgtggtctaatcccaggttttaaagataatcgatgctcgacgatcgatcggctgagtcctggcatctcataatattcccaagcaaagcaatctctaaactctttcaaaagctccatcagcttggttctaaattctgaagacaaattcttactaatgaatgtcggccttggtcgatcacccggacctatatccacttcttctaaatcatcggccgacataaaaccctgaccttgcttgtcatcgagatcatctaccgtgtccttggcgtagacgcttgaaccctccacgacgccctcaaaatattagcttgggttcttcatcttcaatcggctgtatatcagaatcggacacttttagaaaatctccaacccaaatcttcccggataaacaatcaaggccatccatctcccaaagagctagatcggcactggcaacattaactgacctgtcggctggcacaatctcaaccttgtcgccttgccattgaatcaagcattggtgcatggtcgaaggaatacaacaattggcatgaatccaatcccttccgagcaacaagctgtaagaacctttcccatcgatgacaaaaaatatggtaggtatagttttactgccgactgtcaattctacattcaaaacgccctttgtttccgatgggttgccaccaaagtctttaagcaccatgttcgtcttgatgagatcctcagtagttctacctaactttctgaacgtagtataaggtatcaaatttaccgcagccccaccatcaaccatcatcttagacatcggctttccattgacatagccatttatatacaatggtttaagatgccgattttctgtcccctcaggcttttcaaagattgctcgttttggtgatagaaccaacttagccgatccctcttttaattcgtcaacatcggcctggccaatcccaaatttggctggcaaagtaaagaccatgttaattggtgccgtcacaacacttttcccatttgccaacctctttgcttcgtcggctgcaatatcatcggctccaagaacttgattcttaacacgccactccttccttggctttgcttttctcagccgatgaccaatttcttgctcgacctcctggaagtgctccctgctcctcaacctttgaacccttcttttctgattctttgtaaaaataccagaaggacaccactgggtctttgtgttcttgtcttcctccaagtaatcgtcttgatttactgggcccaacctttgatgagcgggaattctcgcctgcttcagccgattgcctttattgtacgatcggcctgaactctctgtaatatcactgcacccaggacagtcttcaatagatgtagcctcataccttcgttccagcagaaccgaaagaactcacaactccaatgaggattgaaaccatcattatcttctccataacgcctctcttgttgtttgtcgtatttcctcttatacttatttataattttagccgaattcacgtaaaaacctcttgctcgtcccacatcggctgtccgaccaacggtatgcaccatgttaacagggaaaggattaccatcgaccttcatcggctttttggaatcatcaaacttaatcttccctccttcaatggccacttgaatctgctgtctaaaaaccttgcaatcattagtagaatgagatccagaattatgccatttgcaatacctccttttgccagttcctcagccgatggaatcacatgaccagcggggagttgaatttgcttctcccggagcagcagatcaaaaatcttgtcagctttggtaatatcaaaatcatatttctcctctttcccagaattctttacccactgacaaggtacaacctttttactccttacccattcggctgcagctatttcggagtcatcgtcatcatcatccgatccatacatgtaagggcagacgtgattaaccctcttagagcttctcctggcctctgcaaacctctgttcatgcaatgttaccttctgcacgagatgcgataagctatcaaaatcttcagatgagaatttctccttaatcggaggaatcatgccttgaaaagccaaatcggctaactgggcgtcagtcaaacttaagctaaagcacttgttcctcatctccctgaacctctaaatatactcatgaacaggttcatcatgcctttgcttaattgccgtcaagtcggataacttcatctcatgaactccattatagaaatagctatgaaactgcttctccaaatcggcccaactattgattgatccatacggcaaagaagaaaaccatgtaaaagccgatccagacaaggacaaccggaataatctgactctaagagcgtctacagccgatgcttcgccgcattgagctaaaaatcggctaatgtgttcataagttgacacaccatcttgtcccgaaaatttggagaagtctagaactttaaatcggttgggaagagggactttctcaaaccactcagggtaaggttgccgatacaattttccagtatctctcggcttaagcccaaattgttctctcattacatcggcaattacatcggcccatggtcgttgttgagctgctccttgcgactgttgctgtattggttcaaactgattatattgagaagcaaactgaggttgggttagccctccttgctgatactgaacttgaggggaaggatgctgatactgacaatttatattgccccttggtaattctggtaatttggctgaatactttgcaccaagtgctctggcacactctgaggcatcgtcgtaccatctggctgtatatggtgaaccaaatgttctggaataacctgattcacggcgtgtccagtcgattgcccagccgattgattcatcaaggcttgctgtggaatcggttgtatagtttgttgtttcggaggtgttggctgaacggactgcacaacctgctgccttgatgaagtctgttgaatcggctgcacaacttgttgccttggtggcgtctgctgaatcgaattgatagtagattggaggggtaaaaacatagcagccacctgatcctgtgttggccgatttaccgtctgcccgctatgctgtggctgttccctcatcaatagccaaggattaatcagctggcttggtgtcaacgctgatgaagtaggcaaagaagtcaatagcggtgccatcggctgaaccgatggtgcactcggaagaactgcttgagcaggtggctgagcatcagtgatcaaaggtcgatatttcggaaaaacacctccctgcaagtagaccgggcctgcagcttgatgctcagctattgatccatcggctatcgtcttcatcatgttagacaatgtgttgactaatactccagattgattgatcaaagcatggtgtacggcgtagtccactcgatcttggaaattgttgaagaaatcttgtgctgtctcactattctgattaagatttccttcttgtggctcgtgagcaccatcacattgaactgcatgtacctcctgagagccgtcaccctgattctcttgagccgagtcatctaaaactctttttccttcttcctccttagaggtactggtctcaggctcatcgggaaccacctttaccttgtacttttgaataaatgttcccttgcgagtctgtgtgaatgacctaaagaactattctcgtgcttgttgcatcattgcttcaaaatccttcttctggtcaggtgtgagcttttccggatcaacagccacaatattctcttcattaactttgctcaaacctagtctttggattttctctttaacagtacctgngctagccgaggatggcgacggtggcagcttctcggccatgaggaagattgatttctgacttctaacctgtcccaccaggcgtgccaaaagcgtgttgacagaaaacacgaggcctgngagatctgcttaactttccccaggttgcaaggtttcccaaaaaaaccctttttcgcttcagatgtatgagcgtgccagttgatttgatcttgtaattaacaagaaatagaacaaagaaaccgcaatcaatcctataaatgatagccgatcggctaggtgccgatgacatattatttatttcaagccgatgtcatgcgtacatcgatcggcaaatatcaataaacaaatcaggactaaatctactcgatcggctgtagatattaatgatatataatccttatatcgatatatacttaaatcaagtgattgggatagatcggtcaccttgtcgagacagtataaatcacttagatcgaaatatatattaatagtgggattatatacatttatagcatagccgatcaaatggatctggcatgtatcggctaatactccgataccactctgtattaagatgttaaagcaagtagaatataccaaacataagtctaatatacttagatgcgataagatcttaacataaagggcagatttaacatatagattaagcatatggaataaaagtagttaaattagataagatcggctgaaactccgatactaccctaaccggcaaccagaaagcaggctagagattgtagttctaagcacgacttagtagatcaaacttaactaatgcagcactaagtatgaaaagaaacacaacatctagacaatcaagccgctggaagtttcgtagagtggtagatatatcacataatctaagttaacatcattgtctaacctaatcggctgccttccattaacagatgctagtcgattataggttagataaagatattatcgaagattatgtgagatatatgataactcgacgaatcatatagacaagattagagtatcataaagatggaagcactaatcctgagaacataagtcgtcatgacaagttttacctcttgttgaagatcgaagtcgatgcagctcaacccgagaggacgaacttgtcgaaataaaagtaaagcaaaaagggtggcgatgcgccgagattgtattggatgtgttctcctttttttacatagggctcgggtctatttatacccgagaattacaagatacgcccataacggacacgactattatctctaacaaactctaagataccataagtctttacggcagacttttgcccaaacatatctctaaggaaatcacatagaatatcctaattaataaatacaattgccttcccaggactctatccatgcgtgccaatcatcttgaagcacatcaacttgaacccgatgacatacaccgagtcatattgtcggaatcggctgtatcggctagccccgtccgactcgaactctgccgacctgaccttagccgatttggactgcagccgattcttactctatttccgcaacgatcttcatcttggataccacttcgatctgatcttcatctccgatgccaatagtgatagaatttaccaaatttggtcgttaacactagtcaaatcaactcgactacgatctcgtcggatccgacaagttccatcgtcctctttgtaacttgtgttttccaccatataatcccatatcaactggattagggctattacctatcaagaggcctgaaccagtataattcttgtcttttgattatttgatgtcgtacttcgtagatccttgtaccaacgtaccccaataccctctatatccggtctacgggtatcacccgtcgacagtggcgcgccaggtagggggacttggtactcatggttctactactatgtcatccaacttcgtcgacaacaacgtcaacactagcctcagccaagcgctccctgcttcaacaatgctggtatggtctcaagtcggcgaaatcgtcttcccggtttacaccacaacgccgatgtcaaccggtcctccaatgatcggaaacgagaatgcagtggctacaaatcaaggcgactccatgtcgaaaaatccacccgtcgaaacggagaacggatcatcgatgacatccaagctcgggaaggattctgatacggccaaaccttgtccttccgacatgaaccacgagccggcaaagatgacttccgaagccacaaggtcttggtgtcctatccacaaaaccaagaaacacaccctgcaagattgctgggttttcctcaacgtccgtgctgaaatccatgcctgcaaagaacgtggaattcagcgtacttctccaactcgggatgtctattgtcctattcacaagacaaagaatcacgacctgttgagttgcaaagtcttcctcggcgccatgaaaactccgtctcctaagtcatacgtccctgtcagggataacggcaaggaacaaggagcgactccagcctcagatcgattcgttgggataatcgatatcgatcctcacgaaccatcggtcttacatcttctcaaagactatgggtcatcgacaacgagcgtgccgcgagaggtattggctatcgatgacgttggcacgtcagcgcaagccaacatagaagcggcgaatcatactactccagcccaacacatcaaggctgttcaagctatactgagggaaactccttacgatcctgttctgaatgatgacctcgagcgttggacagaacgactacgggaatcagtgaccaacctcagcaacgcgtttgaagaagccactaccgcagcgcaccaagatcagccgccaactagcgacgccaatggtgaagatccggaacggagggaatcacctcaacgagccactcctccacctcacggcgctggcgatctctgagatcaaatcaacggccgccgagaagcacgacgcacacgagacaatgtaaatcgctctcggcgtcatgtctcttcacggcgtcatgataatggaaatcgaggagaccgctcaaacgaggaccgggatcacgacaaccaccacgatcgcattgatcgcgaacgacggaggccagacaatactggtcatggccgccgccgtaacgacgacgataatggagatcggcgccgagacaacagcgagagacaacgacaggattcccgagatccaggccgtcatcctcgtaatcgtacgccggaaccaagcgacccatcgtcatcatcatcatctgcgtcctcctgactgtcagacagacatccatgaaggacacacgaccgccgacaacccaccgcccccaacgctgggtgcagggctttcggtcgttccctacgtgatgttcgatggcctgagagatttcgacccggagcaattgaaaagtatgatgggagcaccgacccagaagaattccttcaagtctactccacagtactctatgctgccggagcagacgacaacgcgctagtgaactagagattcctccaagtatgtcgacgtttgatgtcgtcattctggtatttgcatagtatggggatcatcggtgctaggatatatgcgaaactgaggtaaaagagatggagacagggatttttatacaggttcgggcccctgagtggtcaggtaataaccctatatcctgttggccggagccggagttgcttttattcaccataattgtcgcgaccgagaaaaatacattttcccgaatgctagtgtattaatccccgtcccaggaaaagccggggtacaccacacaaacacgatataaaagacacatctttattatatcgataatatttacattatgacaaaggcacttaaggcctgacaatcaaaaataaacagcagcggactagcgggcctacggctccatcttcacaggcgctcaactggggtataagccaggactccacctaagacttcttctccaaatcttctcttactgaagggggggggggaaagattgagcaagaatgagtacaaccacagtactcagcaagccacaccgacagatgcatgattaatgcaagggggtacaaggggtaataatataggggttaagttttgcagtaaacagcttttaaaagtcacttagttgcccaaagccattttataaagacgatcctagagctacacagtgttattaatcaaggccgtgaaccctcacgaacctgccttaacctaaggcctaagatgattcagaccgaactggcaacccgaccctgagtcccagctcgtcccaagccaactcaggccaaccattccacattttagttgttaagcaggttttaagaattaaaacactaacttgggtacattgctaggcttgcccataaccgagggcgcggctattcgaataggttatactctgatcagaggtgtacatctttacccacaagacacatcttcctcacgtgtaaccacgtgccacataccaccacggtatacggacggaagacgtgacatagttcccaacccatcctagccataaacaagagtaccgacccaaccccacctacggccggaacctccgggacaggcaggcaggattgagcccctagcagcaggacaccagccctgtgccatgacatctcgactaccgggccgcagctcgtgtagccttcatttgccctagagatgtccatcgacccccgacttcgtccatctccatccgtgtacttttgtttataaccagactgagccacaaactaagccttacccactagacatgtggaagtacggtagtgctttgcaacagaggcccgagcttaatccttatagtacccgaggtacgacaaacaaaacccaaccacgcacctcgagcccagcctaaaaccattttgggggttttgaatagagggggaggtgtgtccaattccaacataagccaaccattccatagtgtccaaatgatatgagaattcccaaagtctaaagttataaaaccacctaatgttgcctaattaatcagcgaagcatctacctaaattcataccagtggaaccatgaatagagtacccactagttggggttttattttcctagggtgaacaaggtaataataacaatagcaataataataaggtcataacaaaggtaaataggcatggctaaataaaacaatgataacgcgggaatttaaataaagcgataatacgttaatttaaatcaaaataattttataaactgggattcaatatgctcaaggatgatgtgacttgccttgctcagagacaacggccttccgaaccttcggcgacgaccacgaaccacgcttcgggaacctccggaacgacagaagctacgcgaagcacacaagcaaagctacaagcctataaagaagcaataacaatacataaaaagaaaacacatggttctttaggttataaaaaacattaggagacttgaacggatcgattcggagctcgtatgaccaagacatggtcatccgaagtttaatgctgttatatggagatttgcggattattataattaggttttgcaactataaaacatgtgtaagcgtcagcctggaaaagacaggaaggctgcgctgttgacatgcggaccccacatgtcaacctaaaggaccacagtagacagagtacacagagacggtccacgggtcgacggaaccggaccccgtgtgtcaaacgaggcaagtggccgacaaacggactccactagacaccacgagggctgcacatgtggaaaccacgcggctaccgagcgcgcacacaaacacggtcaccacatgcacacacgaacgactaccgacaccggtacacgggtaccggtgtcgacaaccgcacaacaggcacgggcgacaccgaaaggatgaggacggggcagtgagggagagggatccttaccaccacgcgacaaggcgtgggaacggagacggctcggggacgacggaagcaaacggcgagggaacaacttcggcggcgatccttgaacgaaggcgagacacggccggcacgaggcttgatgacgcagagccgaggacgaagatgacgacggggctgcagtggctcgcatgacgaactacgggcggcgaacgcgatcggcttgacggagggacgaaggccacgacgaccgggaacgacgggaggacgacgacgacgacgaccggggccgtcgaggaggcgacgtgggcagcctacagcggctgcacgaagacgaggatggcgtggaacacgccgctacgatgccgacgacggaggcggcgccacgagacgacgagtcggcgaggatgagcggtgaagacgacgacggacaccggcggtgtttgggtggaggggaggcgaggccgagggcgaccttgccgctgcgatgccggaggtggtggtgacgcagcgagccgacaagccggggaggacgaaggggcggccgaagggacgtcggcgacgacgaggatggagaggccggcgcgggcgacggcggtctccggacgaaaccgagggcaggccggggtggaggtcgacgcggtgatgccgagggaggagacggcgtggccggcctgcacctgagcggcgcggcaggggcggctggaggcggtgggtggcgacagtgccaccggttgccggcggggacgtgcctccgggggtctcacgcgaaacggagggcaggccgggggagaggaggctgctgtgatgtcggggaaggcgacggcacggccagcccgcgctcgggcgaggagggagaggcggctggaggcggccggcgcaggggaaagagaaaggtgacggcggggaggggtgatacgaccacggggaggctcgggatgaggctaaaacgatagaacggaggatggggattccattttataggcgcggggagggagccggccacgggaggagcggggaacggcggcggaaagccggccggcggccatggaaggtggccggggttggcgcgggcgttcccgacgattgggggcacgaaccaagggggaaattatgaggaattgaagaggaatcaatggggattaaaaccccccaattaattttggaaaccccggtttgaatcacgtggattttggggaggaagcgagctagggttcacgggagagagaaaggaggccgggcgggaggaggacgacaacccgggggtgggacccacgtggccaggcacgcgtcagcgcacgcacgtgcgcggcacgggcgggaatggcgccgctcggcttgggcaggggcgcggcttgggccgagcgaccggcccaggaggagaggagggggaggcggcctgggggagagagggaggaggagggagtgggccgaggggaaggagaggaggcccaagagaaggagggagaggaggagagggagaggaagagagggaggaagagaggactttggccgcgggccgagagagagagggaggctttgggccagacttggcccaaagggaggagggggattatttttaggttttctttttaataaactttgttaattgttgttgttgtttaataaatatttccggtgctctgaaaattcaagtaaaatttgagggctccttttagagcaaggagaatttaacaaaaattctccggaccacattcgaatttttcttgtacgtattttagtgtttgccaatttcttttcgaattttaattaattctatttttcctttttgaaaatgacttttattttgggatgaatttatcaggacgtgacaataatcacaccagtacaatatgtgggcagcctatctaactgttgtcgacatgttggtccgaaggtctgactcgtagtcgacaacagggtagtcttccttctcggatccgtgcccggcgagatcacagatagcgctttcatatctcctgacggtatccggagacaccgtaggggaatagctatgcctatccctgaagtcgatatccggcggcaagtcttggcgtatgttggcttgtatgttgattgtgttgggtgttgataaggtggtcgtcccgatcgtggtgatcgtgttgatcgtctcatggtgagtgtctgtcccctgtcttcctaggagggcttgtatttatacccatgggtgtccccttgtccaagtagaactaaggaaaccaatatggatacaatccgagtagtccttgtcgtttccatgtagaactctggttgtctttccttatccggaactccctccatatctgaagtcagttttcgtataggacatggtatgtggtgagtcctgccgagatttagtcaactactattaggtatgtggtacccataaccatgacagtagcccccgacttcaatgcaaatgaacgaattcatattctcaatcgcgcgcagacttcgaagtaactgccatcgagctcatgtgaccattctcggtgagtttagagataatgttagacttcctttgtcagcctcgtgcgggcacctaaagggtttgtctgagtcaatctccgatgtcaaccaaggaagtacatagcgtacgactaagtctcccgtcttgccgtaatcgagaatttggattgaagtcaagaaattctatctcggagggtacaccatcttttcattccgtattccttgtcaagatccagcaaccgttctcgagtgatcgagaaggcgtagagtctgcgacgaagcttttagtcgatcttggtgtagaaccatagagacatggagtcttcgtaaatgtcgaatagaattttcctgaaatcaatactcagaaaagaatatcaaatagaaatagccctcgagcgaatgcccaaagggtgacatgttataatatgtatggtaaattgaaaatgaattaaatttaccgaccaatgttttgtgtaagagtgttttctcagttcacaactttggtcagtcgtttgagttgtacactctccctagcccccaacgttatcatcggagaatcgttctcggaggagaaggctcttggacccttgacctgccttggttgaataagcactgatcctagcccccagccgtgaagttggaaaagtcaatttccgattatacggcttggttaatacgcatggcgagaactcttacacgaccagatcttacatggtctttcgtctttgaaggatccgacaaggccttatcggctctgggcgtcccaagccaaagatcccttaggttcctcggaggccttgtcaagacggcgtaaagggacagcaggataggtttcaatgctaggtgtcgtcgtggtaagggatctctaggtaaaacacttggcgatattgtgtacctgctaccaactttgttgaagtagaggtagtgggagaaatcgctacaccgctggtcgaggaccaggcagtagccgtaactcgaccacttaaagtggaagtagttggaggaacactacatcgctggtcaaggaccaggcagtagccgtaactcgaccactgaaagtggaagtagtcggagatattgctgcgtactggtgcgagaaccagtgagcgagcagaattatctctcgaacaccgatggaagctgcggtgtgagagattgctgcgtactggtgcgagaaccagtgagcgagcagaattatctctcaaacaccgatggaagttgcggtgtgagagattgctgcgtactggtgcggtgaaccagtagtccaccgatggaagtgctagagttggtttattgcaagtgtatttcatgtggccagcatgactcacgtacccaacttatagcatatccggatgtctgttcgcaatcatgtcgggtgatcaagccgacgacgttgaagtagaggtagtgggagaaatcgctacaccgctggtcgaggagcaggcagtagtcgtaactcgaccacttaaagtggaaatagtgggagaaacgctacatcgctggtcgaggactaggcagtagccgtaactcgaccactgaaagtggaagtagtcggaggaatgccacatcgctggtcgaggaccaagcagtagccgtaacttgaccactgaaagtagaagtagtcggaggaacgccacatcgctgatcgaggacgaggcagtagctgtaactggaccactgaaagtagaagtagtcggaggaacgccacatcgctggttgaggaccaggcagtagccgtaactcgaccactgaaagtagaagtagtcggaggaatgccacatcgctggtcgaggaccaggcagtagccataactcgaccacttgaagcaaatgtacgagagatcactacgatcaactggttgaggactagtgcgagatattgctgcgtactggtgcgagaaccagtgagcgagcagaattatctctcgaacaccgatggaagctgcggtgtgagagattgcttgaccactgaaagtagaagtagtcggaggaacgccacatcgcttgtcgaggaccaggcagttgccgtaactcgaccactgaaagtagaagtagtcggaggaacgccacatcgctggtcgaggactaggcagtagccgtaactcgaccacttgaagcaaatgtacgagagatcgctacgatcaactggttgaggactagtgtgagagatcgctgcgtactggtgcgagaaccagtgagcgagcagaattatctatcgaacaccgatggaagctgcggtgtgagagattgctgcgtactggtgcgagaaccagtgagcgagcggaattatctctcgaacaccgatggaagttgcggtgtgagagattgctacgtactggtgcgagaaccagtgggcgagcagaattatctctccaacaccgatggaagttgcggtgtgagagattgctgcgtactggtgcggtgaaccagtagtccaccgatggaagtgctagagtttgtttattgcaagtgtatttcatgtggccagcatgactcacgtacccaacttatagcatatccggatgtccgttcgcaatcatgtcgggtgatcaagccgacgacgttgaagtagaggtagtgggacaaatcgctacaccgctggtcgaggaccaggcagtagtcgtaactcgaccacttaaagtggaaatagtaggagaaatgctacatcgctggtcgaggaccaggcagtagccgtaactcgaccactgaaagtggaagtagtcggaggaacgctacatcgctggtgaatgaagtagtcggagaaacgctacatcgctggtcgaggaccaggcagtagccgtaactcgaccactgaaagtgaaagtagtcggaggaacgccacatcgctggtcgaggaccaggcagtagccataacttgaccactgaaagtggaagtagtcggaggaacgccacatcgctggtcgaggaccaggcagtagccgtaactcgaccactgaaagtggaagtagccggagtaacgccacatcgttggtcgaggaccaggcagtagccgtaactcgaccacttgaagcaaatgtacgagagatcactacgatcaactggttgaggactggtgagtaggtgtccctcgatcacttggagtcgtggtacgaggaccgctacgctgtcgtagtcgtaccgagagattgctacgtactggtgcgagaaccagtgagcgagcagaattatctctcgaacaccaatggaagttgcggtgtgtgagattgctgcgtactggtgcgagaaccagtgagcgagcggaattatctctcgaacaccaatggacgctgcggtgtgagagattgctgcgtactggtgcgagaaccagtgagcgagcggaattatctctcgaacaccgatggaagttgcggtgtgagagattgctacgtactggtgcgagaaccagtgggcgagcagaattatctctcgaacaccgatggaagttgcggtgtgagagattgctgcgtactggtgcgagaaccagtagtccaccgatggaagtgctagagtttgtttattgcaagtgtatttcatgtggccagcatgactcacgtacccaacttatagcatatccggatgtccgttcgcaatcatgtcgggtgatcaagccgacgacgttgaagtagaggtagtgggagaaatcgctacaccgctggtcggggagcaggcagtagtcgtaactcgaccacttaaaaaggaaatagtaggagaaatgctacatcgctagtcgaggaccaggcagtagccgtaactcgaccactgaaagtggaatttgtcggagtaacgctaaatcgctggtcgaggaccaggcagtagccgtaactcgaccactgaaagtagaagtagtcggaggaacgccacatcgctggtcgaggaccaggcagtagccgtaactcgaccacttgaagcaaatgtacgagagatcactacgatcaactggttgaggactagtgtgagagattgctgtgtactggtgcgagaaccagtgagtgagcagaattatctctccaacaccgatggaagttgcggtgtgagagattgctgcgtactggtgcgagaaccagtgagcgagcagaattatctctcgaacaccgatggaagctacggtgtgagagattgctgcatactggtgcgagaaccagtgagcgagtagaattatctctcaaacaccgatggaagttgcggtgtgagagattgctgcgtactgatgcggtgaaccaatagtccactgatggaagtgctagagttggtttattgcaagtgtatttcatgtggccagcatgactcatgtactcaacttatagcatatccggatgtctgttcgcaatcatgtcggttgatcaagccgacgacgttcgcgaggaattatccgttaacaaccttttctcgagtagtccagcatggccggtgttatgagataggtcgtcggtctttgttggtaggttgggtgcgatagctccgcatatgtcgagaatgttctcgataatggagtgtactctaccataacctactcgagtgctgttcctgaaaaatattttctagaaggcaagatatatagcagaaaatatcgagtatgtactcaaaaaactgcatggagcttctagtattatcaggagataacgagtagatgtaaatatcaggcattatgtaaatcgtaaagaagcatgatttatacagaagaaaacagagcgagcccccagcgttagaccgtagttggcctatcgtcggaagtactcgcacaacggatattgtataagaaacatgctctaggtaaacataataaattatagatctgataatgctgtataatctggataggtacgataaattgcatagaaaatattgcgtacctttgtagatacatgccggatgtatctacaaaattagtagatcaattaagttaattaacctactaattaccttgatttgcatgcccgatatactatctacagaagatatatatatatatatatatatatatatatatgcgcatgcagtagactttgatgtatcttattggtttggtcgtagagcagtgtaacctgtcacatgcatacacgtgtctaggcatgtgtacgtgacatggttaggcaagcgtgctcggttgaccaactccgggtagaacacgacacgtcagtgacacagcggcacttgttctcggatgaatcatgtgcagcctgcgtcgagcgattttggttgtgggaatcgatgccgtgttggatctgggctgaagtcgcgcgggcggcaataccgatttgccatcctccatggtggccacgtcttgatgaagattgatcgatctcgccagatcgaaaatttgacaatgatggttccgatcttgtcggaagacatgctctgaccgggttagatctccacagccgaagtcgtcgagtagcttgttgtcggagaatccgtcttttgaaccaatctcgtcgaaatcctagagcaccaaaatccccctacctggcgcgccactgtcgacgtttgatgtcgtcattctgctatttgcatagtatggggatcgtcggtgctaggatatatgcgagactgaggtaaaagagatggagacagggatttttatacaggtttgggcccccgagtggtcaggtaataaccctacatcctgttggccggagccggagttgcttttattcactataatcacaccagtacaatatgtgggcagcctatctaactgttgtcgacatgttggtctaaaggtataactcgtagtcgacaacagggtagtcttcctcctcagatctgtgcccggcgagatcagagttagcgctttcgtatctcctgacggtatccggagacaccgtaggggaatattcatgcctatccctgaagtcgatatccggcagcatgtcttggcgtatattggcttgtatgttgatcgtgttaggtgttgatgaggtggtcgtcccgatcgtggtgatcgtgttgatcgtctcttggtgagtgtctgtcccctgtcttcctaggggggcttgtatttatacccataggtgtccccttgtccaagtagaactagggaaaccaatatggatacaatccgagtagtacttgtcgtttccatgtagaactctggttgtctttccttatccggaactccctcaatatctgaagtcagtttccgtataggacatggtatgtggtggatcctgccgagatttagtcaactactattaggtatgtggtatccataaccatgacaaccgacccagaagaattccttcaagtctactccacagtactctatgctgccggagcagacgacaacgcgctagcgaactatttaccaaccgcgttgaagggttctgcacgttcatggctgatgcatcttcctcccttttcaatctcttcgtgggcagacctgtggcaacaattcgtcgccaattttcaaggaacgtacaagcgccacgcgatcgaagacgacctagaactcaggtgagacgacctagaactcaggtgaatcattgagggaatatgttcgacgcttcaacgaatgcagaaacacaatccctgatatcgctaacgcttctgtaatccgtgccttcaaatccggtgtcagagatcgttacactacccaggaattggtgacaagacccatcacaaccactcggaggctattcgagatcgttgagcgatgcgcccatgtggacgatgcgctaagacgcaagaacgacaagccgaagaccgggggagaaaagaaatcagccacagacgcatatgagtcaagcaagaagaaaaatcacaaaaacgggaaaaggaaagctcaagcggaagtcctcgcagcagaatacgcgaacccccccaagtgcccagacccacaaggcagcgacacaaagaaatcttggtgccccatacacaagacggacagacattctctggaagattgccttgttttcaaaaagtcgctcgagaagcacatggcgtttgaaaaaggcaaacgagtacgcgttgtcgagaagaatgaagagacggctcctcacgaatcggattctgcgtatccagactctgacctccacgtctcacacattttcggcggctccacaacgtactcctccaagcgagaatataagaaagtggaacgtgaagtggtagggggctgcacccaagatgaagtggtctgaggagaaaatagagttctcggaagaagaccaccccaagaccgccgttatcccaggacgatatccgatcgtggtcgaacccactattcggaacatcaaggtagcgcgagttctcatcgacggtggcagctcgatcaatcttcttttcgccagcactctggacgcaatgggaattccgcaaaatgagttaacaccaaccgatcaacccttccatggaattactccccaatcatcgtccagacctttgggcaagattacgttacctgtgactttcggccaagccaacaacttccgaacagagcagatcacctttgatatcgctgaattcgatacagcttacaacgccatcatcgggagaactgcacttgcgaagttcatggccgcatctcactacgcgtatcaagtgctcaagatgccgggaccgaagggaacaatcactattcaggggaacgcaaagctggcggtgcagtgcgacaagcggagcctcgacatggtcgagcaaatgaccagcccacccgccacgactgagccacccaagaaagtgagcaatacaaataagacgccgaagccggatggcgccatcaagatcgttccactctctagtgccaaccccgacaagactgtcaagatcggggcgacactaaacgagaaataggaactcgcgctcgtcaccttcctccgcgataatgccgatgtgttcgcttggcagccgtctgacatgccgggggtccccagggaggtgattgagcacaaactaatggtgcgacccgatgccaagccagtaaagcaaagactgcggagatttgcaccagaccggaaacaagccatacgagaagagctcgacaaacttctcaaagctggcttcatcagagaagtacttcatccagagtggctagccaatccagtcatggtgcggaaggccaacggaaaatggagaatgtgtgtcgacttcaccgacctcaacaaggcgtgtcccaaggatcactttcctctccctcgaatagatcaattggtggattcaacagccggttacgagctattgagcttcctcgacgcttactctggctaccaccaaatcagcatggcaaaagaggacgaagagaagattgcattcatcacgccgttcggggtattttgctatgttaagatgccgttcggactgataaccgccgggaatactttccagcgcatggtccagggcgcacttagcaaccagcttggcaacaatgtcgaggcttacgttgacgacatcattgtcaaaacaaagacaagcgactcattgattgatgatctgcgggaaacgttcgacaacctccgacgatatcgcctcatgctcaatcctgagaagtgcacgttcggagtaccgtcgggcaagctactcggattccttgtctctggcagaggaatagaggcaaatcccgagaagattaaagcaatcgagaacatgaagtcgcccacgagactcaaggaggtacaaaagctaggatggcagcactaaacagattcgtcgctaggatgggagaacgagcacaacctttcttcgctctattgaagaaacaagacaaatttatagggacacaggaagccgaagaggcatttattgcactcaagcactacctatcaaacccccctgtactagttgctccctaacctaatgaagaattatttctttatattgccgccacgccgtattccgttagcaccgtcattgttgtcgagagagagaaaatacaacgaccagtctactacgtcagcgaagctctccatgacgcaaagacaagatatccgcagattcaaaagatgctctatgcagtaatcatgacatcaagaaagctacgccactactttcaagtccacagagttacagttgtctcctccttccccctcggtgaagtcgtgagaaacaaagacgttgtcggccgcattgcaaaatgggtagtcgagctaagccagtttgatgtccactttgtgccacgaacagccattaagtcccaggtactcgccgacttcgtagccgattggactatgcccgaccacaagttagacaaccaaatcgacaacgaaacgtggacaatggcgttcgatggtgcactcaacagccaaggagcaggggcaggatttatcttgacatctccctccggagatcaattcaagcacgcaatccacctcaacttcggggcaaccaataatactgcagaatatgaaggactactcgccgggatacgagctgcagccgcacttggggccaagcgactaatcgtcaaaggggactccgagctagtcgcgaaccaggtgcacaaagactataaatgctctaaccttgagttatccaagtatctcacagaagtcaggaaactagaaaagaggtttgatgggatcgaggtccgacacgtctatcgcaaggacaacgtcgagccagacgacctagcacgacgcgcgtccagatgagaaccgctcaagcccggcacctttctcgatatcctgacgaagccatcggtgaaagaagttagcggcgaagttggcccgaacaccaccgacatcagctcggggtacttctcaaatgcgtttcgtccgacgacggcagacacctcctccttgatatacatgaaggcatctgtgggtcacacgccaccggtcagacgttggtcgggaaagcttttcgacaaggattcttctggctaaccgccctcagatgcatgcgacatggtccagcggtgcgaagcctatcaatttcacaacaagcacacaaagctacccgcgcaagcgctccaaactatccctctcacttgaccgttctcatgctgggggctagatgtactcgggcctttcccatgaggacagggcggctacaggttcctattcgtggcaatcgacaaattcacaaaatggatagaagcagtgcccacgggggaaatcagggccgacaacgccatcaaattcatgaaatggataatctgcagatacggactaccgcaccgcatcataaccgacaacggctcccaattcatcagcgccgacttccaagattactgcatcgggttgggagtcaaaatatgtttcgcctcggtctctcaccctcaatgcaacggacaagtcgaaagggcaaacggcatagtactacaagagataaaaacccgcatctacgacaggctcatgtcacaagacaaaaagtgggttgaagaactcccatcaatactatgggccgtacgctccacaccgataacgtccaataaggaaacacccttcttcctcgtgtacggctccgaggccatgctccactgcgagctacaacatcagagtacacgagtacagaagtactccgacgagaaccaggaggaacagtgagacatcgatgtaaatcttctcgaggagcatcgtgagcgagttgtcgtccgagcagccagctaacaacagtccctccgccgttatcacgagaagcgcatccgagcacgcatactttcgatcggcaactatgtcctccgacgagttcaagcccaagcaggttgaaacaaactctcaccaaaatgggaaggaccttacacgatcacacaagtcttgcggccaggcgcatacaaaatcgcagacggcaacggtcgcgaactagcaaattcttggaacattgaccaactacgaaaattctatgtatgagtcaataccactgtacctgtaagtacccttacagtatcaataaagcctatttctaggccccatatcacaatcaaagtgttttcacccgatgatcccttaccctgatgacacctagcgttgaaacctgtccttatgtccctttacgccgtctcgataaggcctccgaggaacctaagggatcttcgactggggacgcccagagccgataaggccttgtcagatcctgtagagacgaaagaccatgtaagatctggtcgtgtaagagttctcgccgtgcgtattaaccaagtcgtgaaatcggaaatcaattttccaacttcacggctgggggttaggataagagcttattcaaccaaggcaggtcaagagtccaagagccttatcctccaagaaaattcctccgacgacaaggctgggggctagggagagtgtacgactcaaacggctgactaaagtcgttaactgagaacacactcttacacacgacatctagagtaagaaacatttgttaaagatagatttctttattcacaaagtacttcttacaatttttacataaatctctcgctgctttacacctttcccttagatattgtcgcagggtacgagtactaccaagaaggctaacgccagtccatagactggaagatattctcggccaacggcgacatcgacctcgctagatggtctatcaccgccggatttctccgagaacgagcaaaaccttcgcggtgaaattcaaggtccaggcgcgggcggtgactcgtaggcaagccaacacgtgtcctccggcgtatcggctcgctcgacgacactcctgtttcaaggcctcgtcgatacgcttgccgatgccatcgagttgggcacaggctccgttcagccacgagatgtacccggccgccgattcctcgggatcaccgcggactactcgaagttccctgcatactctcgccatggaggcacagcaactcttcaagtacgagttaaaccacacctcgcgacctcggagcgtttccacagcctgctctttcttcacggccagcatggttctctcgagttccgccacttcaaacttcgtcttccagtattggatacgacgatcttggcttgcaagggcatcctcgagatctgctaaacgtgacagccatcaagacacgctggatacctctttcggaacatggacgacctaatcaggagggcattaagagatgaaggggctactcacttgaggcagtcatcgtctccgcatcaagggtttgttccacattgtcaggtgagatgtgtggtccaagctcgagtaccggaattatcgccagtgacccgggttgcccacgctactggacatcctcgtcatcagcatctctacaatggacaaaagtttccaagatcaacatacaaaactaaacaaggatggcaattgcacgcacgagggcggtcagagttcaatttttacacattatctaacaaatacaagaagtcctactcctcaaaaagggggagaacagactcccccagatcaccgacttcttccatcacctccttacgcatgtcacttgccaccccctgatccaagatctcgcgcagatcgagttcaggacgcgacaaccttacacacgcgaggacatgacacaccccggtgtagatcccgttcgacgtctcctccgcgatcctggctgcatgcttggaggggatctcccccatcgccgttgccagttccgcgagagaggaggacaatgagaactcatcaggattcaccgggattgtggacttgatgccgcactccctggcgagttggtggagtccagtgtaggtgatccgcaacaagccctggatctcggacaggttgttctcgagttccgacatgcggtcctcgagcccattccgttgtcgctcgttgccagccaccagctccctcatttttgtgaggtcttcacgggctttagccaactcgcgcaccagtcgatcagcacgcacgttctccgtcaccgcctccgacctcgcctccgcaatctcgcggccgatgccgcgagcaccagcttcgaggaggcgcccaatctcgatttggagctcctcccaggtgaggacggcagctggcagaccacgacctcccgcaggatcgctgacggggccgctaggcatcgcctcccggctccgggttgcgggcacgacatctgtcgacgctgtggcaggtgacgcgctggaagctcccccagacttagctcgggcagccttcgcccgcgcttcctacggacaaccttgggttagacactgctcgaatgagaagcacggagattcaagaatctatctacttacttctcgccgatcgtcacaatacgttgtcgtcgtgggggtggaggagacgcgtccgaggcctgaaagacaatcaatacagagtaaggaaaaaccctccttgccgcatgatctaatgacgagataaagttaccgagggggtcgctgccttgcgacgatgtccgagtacagacgagaatttcctcggcttggtcgagacattgccaccgctagtggtggccgcatcagatgcctccttgacaaccttctcctttagagatgtcgccacctgatggtccgcgagtggcccgatgatgtcaatcaaaggaagggcctacgcttaatcaggtcataaggtgatttcgaaaggagaatacgggatgcttatcaaatatacttacgttgatggcttcatcgcgttccgccgcccccttttcacaaagaggcacgggcatgtcgctagccgtcgttggaccgctgatcatcacttgaccgacgcgccgctctatagcttcgctgctcagacctgttaaacgagaactggcttttgataagtcaagaggaacacaagtacaagcacgccaagatgaatacgagaaagataccccgaggagaaacccaggttgcgtcatccggcccgaaatagttataggctggatgggcccgagcctggagcggctggatccgcctaccgacgaagtctgcagcgacttcatatcccgacaagccccgttctcggagatcatcgatgatgtcgataaacgactgaagagagggggtcaaagggggcttggcggtccaggccggaatcttgtccggttgatcctcgggaacaacgaagacagggtttgagtccttcatctcaagatagaaccacttattccgccacttactgcgggaagaaggacactggaaggggatataacgcgatttcatgccatcacgaagttggaacccgacgcaaccagacaccctattggattccatccaacgcagttcatagtagaaacagaagagatcgagaaaaggctcggcctcacagagatgaacaaatatactaagaaaggggatggaattaggattcaaatggagaagagaaagaccatagaaattcaacatcaggagaagaaactcggaagatggaggaagaaaaccgcagaaaacgtaatcttcgatcgcaaccatgcgacccaagaggggctgaggatcagtacctcctacttctctctccatgtcttcacggccgggaagggcaccgtcctcctgaaggttcttcaacgtcgcgccggtggaagacgacttgccgagatccattgctgtgccaagatcgccggaaaacaagcctgggttggcgaactagggtttctggtggcggtggagaaggcaaggagcgctggcaggcggtgtgtgttcaacaaggttggcagacttcaaaatgagctcccaaagttcctttaaataagcgcactaccgacggtgcgaattccaaggaacggagagagatccccgccggaaatcactgggcccgttacgcgcggcagttttatggacttcagttcaaaattcactcgtgaccgttgggcttcaaacggcatgctcgattacgttctatctccgcggtcctcgcaccaggaatgataacgttctcgacacccgaagtcgtaaatggttgcacgagttcattttaagcaaaagtcggggctactgtcagggttacaggtcaggcataccctctacccttcgatatacgttacatatcaacatggcatacccacgggcacgcggatgttttctacttatcctaaggaaacctttcacgaaatctacagatgggaagagtccttctcgtacagaactgggtcgttggcgtatcgtattggatctgatatctccgagttctacttggagacctctagatctgtgatataaaagggacccccctggggagggcatagatcatcgaatcttacaaccaacacagcctacgaagccggaatctacgaggagccaagtcattgagagctagtcgaatcaactcgactacgatcttgtcggatccgacaagttccatcgttctctttataacctgtgttttccaccatataatcccatatcaactggattagggctattacctatcaaggggcctaaaccagtataattcttgtcttttgattgtttgatgtcgtactacgtagatccttgtaccaacgtaccccaataccctctatatccggtctacgggtatcacccgtcgacaatgtgtgttgaagttaacattgaacttacttttgaaatttgttaaacttatgtgtgttgatctgtactgattaaataaagttttctatataaattcatattatatccctacaataaatttacttctaatgtcgtgacaatgttactcccattttgttttaagttacttttataatatatataaattacttttagactttattaaatttactattatatgtctaagaagtaatttagtcaaatctaaaagtaacttatatatataataaaagtaacttacgtatataataaaagtaatttacaaatataaatattttttcatcgtaatataatcatgtaagatcttgttgtgaagatttaattgtaacgaacacaatagcataattggattgtagatcggataagtaatttgagagaaaactttatttgaagagaaaaaaggcatacatgtctatctcagtccttcctgctacatgggtgtgtcaccctgtctgcagtcaagtactagtggagaaagcgataacgtaagctgaaaatgaatagataacgagatcggacggtcggaggtgcgtcgcgcaattagactaaaacgagaacgcgcactgtttagattttacgataagtttaaattttgccactatcaatttttttagggcaagattctatttggtttgctaccaatataaagccaacatatgaattctagtaaagattgttatagattgatgtcaaatctaacgtagacattactaataaattggtttcaatcaaactaagcacaagtactatttaaactaccaacgttgatagggctaagttttggtagcaattaaaaaggtccttaattcttttttttcatcgagagaagctcttgactgctgctgcctccactccacacgtgagcatgctgtgggcgtggtggctcgtgctgctggctgctgtcgactttcgtcccagtcgtcaggatgcaggcgcactctctcggcgtcagctgccgtcgcgccatcgctcgacacgaaactttacactaatacacggcacaagcggaccagcgatgggcgctgtggaccaacggcagtgcgcagggaggggtactcgcgatcgcggccggcgcgagccatggcgcacgaacgctccgccgcagacgtcgtgccagttacttactctatccatttataataagtaacttttttaacgaacatgacataaaaaaatttagtattagaatacatcccacccgttgaaaacttactatatattttagattagagattagttgaaaacttactatattttggattagaggcagtacacatcagggtatgtactctcctaagagatgtatttcttccgtaaaaaaagttaatttcacaaactatagatactttgattaacttatatttaaaaatatatatcataaaattatagatttaaaatattatatcagaaaactacaaatataacattatttttatcataaaattataacttttctaacctcaatagtgttatggatataaactctaaaatgtgtagatacttaaaaacttcatcgctaaatctgtagattcgtgatatgatcctctaaatcattagtttttggcaaaatttgctacaggaaactcaaaaaaaatgtgtaattaaccgcaaggcaccgtaaaaacgtgaattggctataggacaccgtaaaaaagtggtaattagctactagacaccgtaatacaagaagggacgagtgataaatactcaaaggtccaaaaatagacatgtttgataggaatccgagtaaaaatctcataaaatgatccaccaaacttgataaaaaatcatggtaattaatgagtctaatagcctaggctgtgacccttaccataaccaaaataagcatataacatgctaaaagaatgactattaataaaccagtcatctcaaatcaacccaaacagcttttgcagcctaataaagcttacaaaaacggtataacacctttctgtcgggcacctttttatgtgcgtcataataattccaaagaattattgaatcgcgttaaaaaggattttaacagcattgggccacaccattgtgaacacaaattgccaaagcaaaaagtgcctaagtccctaaggatcacaacgagccacgctggaaataagattgggctgaagtactgtgcaggcccaggcttgttagcactcccgataccctaattgtaccgaagtaaaataaaacgtctcttcgtcatccccgccgagactctcgccattttccccatttcctgctacagtgcaaaactgcgccggccaaactagggttcatcaatccgctccaatccattgtcacgatcggaaataacccaacaggcgttccttacgtgcgtgcattattccttgtcccaggaggcaaggtacaccaaaagttgatacaattcagagtttaacaagcggaagcgtaattaattaatttattacatgggcggcgaagacccagcacacaagaagacaaacgaaaaacagcggaagactagggcgacgaccacaggcgcttgacggcaggcacgagctagacaccaaagccttcatcatccaggggctcctcttctgggcttgggaaaaattgagcaagactgagtacaaccaccgtactcaacaagacacacccataagtgcagaataaatgcaagggagtacaaggggggttataatataaagggttagggtttgcagtaaacagcattaaaagacacttagttgctcaaagctattttgtaaacacgattctagagctatataatattattaatcaaggccgtgaacccacacgaacctgccttaacccaaggcctacgatgattcagaccgaactggcaacctgaccctgggtcccagctcgtcccaagccaacccaggccaaccattccacattttagttgttaagcaggttttaagaattaaaacactaacttgggtacattgctcagcatgcccataaccgagggtgcggctattcgaataggttatactctgatcagaggtgtacatctttacccacaagacacatcttcctcacgtgtaaccacgtgtcacataccaccatggtatacggacggaagacatgacatagtttccaacccatcctagccataaacaagagtaccgacccaaccccacctacggccggaacccccgggacaggtaggcaggactgagtccctagcagcaggacaccggccctgtgccatgacatctcgactaccgggccgcagctcgtgtagccttcatttgccctagagatgtccatcgacccccgacttcgtccatctccatccgtgtacttttgtttataaccagactgagccacaaactaagccttacccactagacatgtggaagtacggtagtgctttgtaacagaggcccgaagaccggtccttatatggccgaggtgctactatcaaaaccatgcaccccgagcccagcctaaaaccattttgagggttttgaatagaggggaggtgtgaatccaattccacaataatccaacaattccatagtgtcgaggtgataagagtattcccaaagtctagagttgtaaaaccacctaatgttgcctaattaaccagcgaagcatctacctaaaatcatactagtggtaccatgagtagagtgtccactagttggggttttgtttattctagggtgaacaaggaaataataacaataacaataataaggtcataacaaaggtaaataggcatggctagataaaacagtgataacgcgggaatttaaataaagcgataatgcaataatttaaatcaaaataattttataaacttggattcaatatgttcaaggatgatgtgacttgccttgctcgctttcccaaacgtcggcttcaacctccacgaagagtggatcttccgaagctgcagcgtctacacgaccaacggaaaagaaaagacttttactctaaaaaactccatataacaagcaggaacaaagtacaaaaatgggttattgacttcttaaggaaaaattagagacttgaacagtccaattccgagttcaaatggccaagttatggccatttgaagtttatatgctctttaaatgaatatttgcgaatttcttcatttaaaatttaatttaaaaaggctttattgcgtcagccgaggggagggggcgcgcgggccgggtccacgggagtggggcccacgcggcagcctcacggtccacggtggaccgggtgcacccgggctcacaccggccggcgccgtcggtcccacgcgtcagccgcacccaagggcgcgggcggctgatggcctggccccacgcggcagctacacggcgcgcccgagggcggccatgccggcacggtcagcgggagacggtgcgcccgtgccccgatggtcgccgccggcgaccaccggcgcggcggagcggccgccgagagagggaagggaagggggaaaggaggcgacggtccacggctcaccccggggcgacggcggcgacggaggaggcggccggagcggagggaggcggcggcgcggctcgggtcgacggggtcgacggcattccggcggtcggcgaccgaaacggagaggtggacgaggttggcgaggatgcggcgaacccgaaggaggcggcgccgaggtgggaggcggtccggggcgacgacggcggcggaccggagctcggcggcgacggcggagagagagagcgacgtcgcgagctcgaatccggcgaggaggaagggcggcgagaggcggaaacggacggaggaggggcggggagggtttaaatagggttggaagggggagagagcggtcggaggggaaggaaaccggcgcgggaggtccggccgccatcaatggcgccggcgagatttgcgggggcaaatccgcccgtttgaacgcgagagagagaggaaaaaa

SEQ ID NO: 15287 - DNA, 12543 bp, Oryza sativa
cggcgggaggcggcgggattcgcagcggcggcggcgctagggcgcgggggaggcggcgggaggaaggggatgacgggtgggccccacctgtcagcgagggtggcgggcgggcctgcccgtcagcggcgcgcgcgcggggagaggccgagtgggccgcggggagaggagagagagggggagggagatgggccgaattcggcccattagagagaaggagggattttagggtttttgtttttataaaatcattttaactttgtttatttcttaataattattatttgtgctctgaaaattccactaaaatttatttacacattttaggcttttaggaaatatacaaaaatcctctaagccttatttgacttttaactttgcacattttaattgttggaggctttcacacggattttaattattctaggcataatttagaggatgtattttagagtcgttttgggatgtgacatccatcctaaaaaacttcacgaaatttctccctgcatccaccgctccgattccccatccctttccagccgtatctcgaaccaaatcaaaccatccagttcacattcatggcggaagaaagagagagcttcgagagtcagtgggcgccctccgatgtgacggaagacaatctgaaggagatggtggcgcacggcgttcttccggcgaaagagatcatcaggtggcgaccgccattcggcgaggcattcccgacccccgatacactcgaaatcgtggtatttgctcatttcttctatggcggattttctcttccaacctcaagattcttccggggaattctaaatttctacgggattagcttgcatcatctgaatccaaactccataatgcatatcgccaattttattcatgcctgcgaagcttttctgggcattaggcctcatttcgccttgttctgccgcatcttcttcctcaagccccagccaaacaagaacaaaccatgcgtcgttgggggtgctggtttccaactcaggggaaccctaagccaaaaatacttctctatgcccttcaaaacctcaaacaaaggctggcatgcaaattggttttatgttcaaaaccctgagcctgctctcccgagtactcctgtcttcctcctgtttatcaggatacttggaactcactgccaatgggggatgaagctgcgcaagcagtagaactgatggagcgcatgataaagctgaaggaacaaggtttgcaaggagaacagatcaccaggcactttatcaagtgtcggttagccccaatcaaagagagatcccgcacagcttttgagttcgacggtaagcatgatccaaatcgtgaaaatccagactctcttgactttaaggtcatgaaggaaaggatgtacaagatcttctcaaatgccatcgtcgtcggctattcgcacttgctgccagtcgtgccattcaatgccttcaatcctcctccaccggtacgtattcatacacttcaacctttctcaaaatatgatcttgttttcttgttgaatcagttaacaatgaaggatattacacccaggaatttgctttgatgaagtcggatcccccaatcgctcaacaccgatctccccgccaccaaactgggcaagggagcggtggaccaagaattcggtctgaaactcaaccaagtgctcctgatccagtcggccagccaaattctcgcaagaggaagctggttctaagtgacgacgaaggcgacactgctagaaagcttggagaccgagaggcaaccaagaaactgccgaagcaggctactccaaggaagaaaacatacagtcgtcctgtgcgaaagatcaggaagtctactaggtgcaactcatataacgatcttccttgcattgatgcgcacccattgcggtaataatactgataatcaaatttgcaggaaaccatctgatatagatccgtctgggaaagactctgacccgactaacatggacacaagttcttccaaagaaaccgggccaactgttgaggatcatccaagtgacaatcaaccggcaaccgataatgtagaatccggtgatcaacccccgactggaaaccagtcggccgaagccgaagccggagttaatcaggagcctccgactggaaaccagtcggacgcagggccaagccaagagattccagaagtcgaaacccaagcaaacaacccttgcggacaagacaccagcaatgaccggagatctgaatctcctttaaaggcatccgaatccacttatcctcgtccagaaatcattaagggtaaacactttgtctgaaaccatgttgacccaaataactctgatcaattgtctaacctttgtcagtggatacactagggccaatgatcagtgatgaagaagaaattccccgtatacaagcagccgaagattcgtgccctcccattctgttcaagtggtgggatgacaacttgcaacctcaaggaattgtaataaaccggcaaaaagaagacgaagaggtatgcctactgaaaaaggcactcaaccaagcgacccgcattgtaaatctaagttccttgacgcctggccttagccatcttgtttgccatctggctcgagcgctgattaaactgctctgtagaggattcatcttaggaacgaggtgaaaactggaaccctagagaaactagttcctcatcttggaaccctcgaagccaccaggagtcaactgcacgaggccagagaacttgccaagaagaatgaacacgatctgagggatcggattgctgagctccaggaatccaatttttaactgaatggctcatcaaaaggtacgcgcaaactctgcccaactgatttgtgctgttatctctgtaatcttgactaaccgaagttaatgtagtgcaagctgccaagatatctcaactagaggagcagatccaaactctggaaaatgacaaggcagagctagcaagacagaggaattcggctttaaaggaggttgaaggtaccaataatcaatacctcaaaagccattatcttctatatgctgattcattaatgtgaatctgttgatgcagaccgcaagatcaagtctcaagcacagtttgatgtcttagttgacaagatcaacaagcttgaaggagccagggataaagtcgctaatgccgctactccactcatccaggccatgtttttcaataacgccggttcgagtacacttgatgctgccgaaatcttcgacaagctgagagtcgctccagatacttacttcaagaacatcaaagaagctggaagtatgggagcaagtctggcgttggcgatgaccaaatcgctttatccaagagttgatatggatgccattgatggctttgcaaacgggacgagcgaagaagctgctcttgacctcattaatgatgcgcagaaagccgctgacaaaatcgctgctgacgtggttgagagattccaagatgtcgaccttcggccgactgggtctgataattcagatgatgaaaaaactgatactgattgatgtacccatgattttgatgattaatgataatggaggctcaatttgtacaatactgatgaatttatgctatgcttggtgttccatacttagcttctgatttcttaaaggcctttgtcaagccttattgagcctaaaacccgcaaaagctattaaaaaaccttcagtcctcattgactaagtcgaaagaccaaacagggcaatgataaatcaagtaagcaaattgaattgataaaaatcacactccattattatcatagtagccccccgactgaaaacttcaaggaaaagcttgaagttagcagtcaaagaggaaagatacaaacgaaatgcctaagcataaaatcgacgaagatgttcaatattccaagaattgttgatgagagtactgtcttcacgctttagtcgataagaacctggccgagtgactttagcaattatgaacggtccttcccataagggagataatttatgccgatcctgtgtggtttgaattttcctcagaaccaggtcaccgactaaaaaggctcgcgatcgaacattccgattatgataatggtgcaacccttgcaaatatcgagtcaactgaattaaagctgcttctcgggcttcttctagtcgattgatgtcgtctactcggccctcttcatagccctcctcgttgaagttccgaaatcgtagtgattcaaattccacttcactcggcaacattgcttctacaccataaaccaaaaaaaacggcgactggccggtagcccgactgggagtagtgcgtaaagaccaaagtacggacggcagctgatctacccacttgccagcatagggacgtagtcggtcaaaaacgcgtgctttgatcccttgaagtatcatgacgttagcgcgctcgacttgtccgttactcatggggtgtgccacagaggcgtaacaaattttaatgccaaagtcttcacaaaagtctctaaatgctcagccagtgaattgagtgccattatcagtgatgatccgattaggtaccccaaaccgatgcacaatgttgatgaaaaaatctctagctttatctgctatgatcgtgatgaccggtttagcctcaatccacttggagaatttgtcgatagccacaaagagatgcgtgtaaccgccgactgcccttttaaacgggccgaccatgtcaagcccccagaacgcaaacggctaggacaacgggatggtttgcaactcttgggctggcagatgaatttgtctggcaaaaaattgacaaccttcgcatgtccgcacaatcttgtcagcatcagacacagctgtcggccagaaaaaaccttgccggtaagctttgccgacaatagtccgtgcagcagcatgattaccacaaataccagaatgtatatccttcaacaattgtctcccttcctccaaagatacgcagcgctgcagtattcctgatggactttttttgtacaactcagtcttatgaataatgtaaagtctgctgcgcctggaaatccgctcggcttcatttttgtcttgagggagttcttgtttggtcaaaaattttatgagaggttctctctagtcggtttcaatcatgcttacgccttgagtatccatggcttcaagtgtttcttttctgggcacggttggttcataaagatgttcgacgaacacatctgaaggagctgcttcccgttttgaatcaaaattggccagcctatcggctgcctcattgctatgtcggaggacatgggtgagctcgagtccatcgaatttatcttccaacttgcgtatctcttgtcgataagcagtcatattatcatctagacaagaccactctttcatgacttgattaacaaccaactgagagtctccacggacgattagtcggcgaatgcctacagagattgcaatccttaatccatggagtagcgccatgtattccgccacgttatgggacacagaaaaatgtatccacaatacgtagctcaatctttctccagtcggggaaatcaagacgaccccagctccagtgcctgtaagcctctttaacccatcaaaatgcatagtccaatgtttcatcttttcctctggcatgtcttcttggcactcggtccactcggcaaggaaatcagctaacgcttgtgacttgatcgaagttcgtggcttgaacgatatgtccaaagacatcaactctaaggctcacttcgcaatccgtccatttgcttcgcgattatgaagtatatctccgagtggaaacgatgtgaccaccgtgaccgagtgactttgaaaatagtgagataatttcctgacggtaattaagacaccatataataacttttgaactagaggatatcttgtcttggagtcggctaaaacctcgctaacaaaataaattggacgttggactttttgaatatggccttcctcttcatgctcgacgaccaggaccgtactcaccacctgggaggttgacgacacatataacagtagcagctcttgtggatgtggcgaggccaaaactggtggagtggtgagaagtttcttgaagtcttcaaaggctttttgtgcttcgggtccccactggaaattgtcagtcttcttcagcagcttgaagaagggcatcccccgctcgccgagtcgtgagacgaaccggctgagcgccgccatgcaaccagtcagcttttggacgtctttttgggagcttggcggtttcatgttgaggatggtgttgattttctccgggttggcctgtatgcctctttgagataccataaatccgagcaacttccctgacggtactccgaagatgcacttttccgggtttagtttcatcttgaaagcacgaatgcttgtaaaagtttcttctaaatccgcaatcaggtcatccttctgcttggtcttgacgactacatcatcaacataagcttcaacattgcgaccgatctaagttgaaaaacatctttgaatcatgcgttgataggttgctcctgcgttctttaatccaaagggcatggtgatgtagcagtaggccccaaagggtgtaatgaacgaggtcttcaagcagttagattcttttagtcggatctgatgatatcccgagtaacagtccaagaagctgagtaactcgcagccggccgttgagtcaaccacctagtcaatgcgaggtaacccaaaagggtctttgggacaagatttgttgaggtcggtataatcgacacacatgcgccattgccccgtctttttccaaaccaggactgggttagccagccagtcgagatgaaggacttccttaatgaagcctgctgctaacagcttggttaattcctccttgatcgcatccttcctgtcctgtgcaaaacggcggagtcattgcttgatgggtttggcgtcttgcttaacatgtaaagagtgctcaatcacctctctgggaataccaggcatatcggatggtttccacgcaaagatatctttattattttgaagaaaggtgatgagcgcgctttcctatttacaatctaactcagcgcctattacagcagtcttatcaggatcggagggatctaagggaatctttttttgtcttggaatcaccttcttcggtcttcgtcagcttggttgcaggcacttctccctcgcttgccgtggtcgcagccagtcggatctcttcgcgggcgagagtagtctcgtgggtttgggccatctcgcaactttctttgtcacatgtgacggcctgcttgatgtcgctccgtagtgatatgactcctcgaggaccaggcatcttcatcatcatgtaggtgtagtgtgggacggccatgaatttagctaaagccggtcgtccgagtatagcatgatatgctgtctcgaaatcagcaacttcgaagcaaacattttctgtgcgaaaattctcccgagtgccgaaggtaactggaagagtgatctggccgagtggtgtagctgacaatcctgggataacaccatggaagggtgcattactcggcttcaattttgtgcgaggaatctgcatatcatccagggtcttagcgaaaaggatgttaagtgcactgccaccatcgatgagagtccgtcggagcttgacattgcgaaccactgggtctagtaccagagggtaccgccccgggtggaccactcggtcgggatgatccgagtggtcgaacttaattgctatctctaaccaccgaaggtattggggcgtgttaggctgaaccgcattgatctcccgttctgttagcttctgctttctcttagattcataagccaggggtccgccgaagatgtgattgaattctttgtagtgatcttgaaaaccagtcggggcatcgtcttcatcatctttcttctttgatgtgccttgatctccgtctgacgtcttacgcgcgttcttgacatattgctccgcaaactgtttgtagacgaagcaatctttggccacgtggttggagttgggatgatgcggacattgggagttcattattttgtcgaaggtgttgacgcgggaacgttgtcaggaagacggagaggtggtcgccacaagttcttcgggcttacgcttgcgatccttgtggttgttacttccactccctcctgcggtcggcgtatccttctttggcttccaagtggtgcccgactgcttggacgccgtgatagcatcttcggctttggcatactcattggctttttcaaacatctgcttgaccgtcttgggaggtttgcgtccgaacttgccgactaggtcctcgtggcgaatgcctttagtaaaggcggcaatgatgacgtcgtcggtgatgtcggagatcttgttgcgttgcttcagagaagcgtcgaatgtaatctcgaagagactctccagacttctgaatgatgttgtagagatcgaagtgtgtgccaggccgttcaaaagtgccttggaagttggcgatgaagtggtcgcgtagctctgcccatgatccgatcgtgccgcggggtagcccgtggagccatgaccaggcagaatccgctagggccacaggtagataatttgccatggctttactgtctcctcctgctacgcggattgcgagaccatagacggtgagccaagactcagggttggtggtgctgtcatatttttcgattccagtcggcttaaagccggctggccaatccactcgacgcagatcgcttgtgaaggcagccactccgtccacgttgtcgtcgtagcgatctggtgaatgatggcctcttgctgcgcggcgctggttgatggtgtcgcgaagatcgatggggcgccttcgatgtggggggtgtggtcgttcaactcggcgctccctgtatcgttcgggaggcgaatgaacagaccgttcatcgtgtcccctgctcctgcgactagatccggcgccggcaatgctgaggcttggctggtgatagtcttgagatcgaagatgagggactcggctaccagtcggggtgcgggtgcttgcagagttggctggaaccgaggcagcgatcatggtcttcgtctggttcaagatgttgacaacatgatcggcttggttgagtgcgtcttccttgaggagggtgtcgaggagagtgattgctgcaaccgcgttctgctggagggtgcgaaagaccgctgtcccatcgacgtcttgttgcccaatgagctctctcgctcgccgcccagattccaaggcgcgttgtcgtcgatcttcagcctcctttgcaatccgttcgcgatcttgttgctcacgctgtagtcgttctcgctcctgtcgctgtcgctcttcctccagtcggcgacgttcagcttcttgtcatgcgcgatcttggtccgcttctcgggattggcgctgttcctccgtttcgttgtcagccatgaatacgccgaagaagaggggcgtgtagttatcctcatagctgtcgtcgaagttgtcgaggtcaccgtggtcgtagtggtagccaaagtcgtcgtagtcgaggatctcggttgatcgagaactgacgcctggggagctaaggtagccatccaactcttccgtcgagactgtcccaagaggttggagtataacgccaacctccctggatctagatcggatcggggccaaagccggagctcgcctagatcttcgagtgggagatgtcttgactgtgaagacagcggccaaatcatcaggaagtttcatcaagattgagggataggacccatcgtcttgatctggtcgcggaaaagtagattagatctcgtccgagtggtttgaagccgactcgggagagatgatcttggagtaggcctcggccgagttcggaataccgaacggcacagggacctggtctcttcccgactggtttgaatccgagtcaaggagagagatcttgccgaagtcgttggtgatgaagttgaggctgccgaaccggaacgtctgcccgggagggaaggcgaagtcgtcgatgccagaaacggaacccatcgcacttagtcggcaaaaacttgacgctacccctacctggcgcgccaactgtcgaaacaagatttcgacaataataaaagggggtggctatcaagctaggaaagtggatgggtttggagacgaagaattttatacagattcaggccttcttattcaagaagtaataccctactcctgtccgaggataattccgccgagtgtgttattgattgtataaactagaaaaagaatcgcgccccgagaggcacatggaccctccttatataggggaaggagtccgctttacaaagtaccgtccatatcctaacggaatatgggattatagataaaatacaatcgtaaccgactaggatcccgggtattttcttgacatacaagtttagaacctaacccgagtcctcatatagatattctatctatatttggtaccatatatccgactaaattataactgtcacgtagatatggggtatccataatctacacactcagggtattcctcctcccatttcacttgtagttccacttgcactagcaaatgaataaatcagcaataataaaataaacaaaatctttaagaattagttaaaaacaaggataaatgcgagtagcaatgaatgactcacactgatgtgggtgcaacaattgggccattgatcccctctcctgtttcaatttgacttgctgagagagttccctggcaatgcttggttgtatggtatagctcatgacaataactgtatttttttccttttactagtgccatctttataaaaaaaaacccttatcctagccacttttgatcttcccggtttctttctcaatctaggcttcttgattttatagcctagatcaacgtgtgtccacccatacttagattccattgaaaaattgaaccttcaagcatatgccttttttaacatctcaacaaagaagcacttatccacaaaatcatccatctgtatctctcgcaatgaaagccaaagcataattgcagtggctttctcattggaggctgtggatgccctatttctcactgaaagatgacagctcggttttatgagtgcaatttgcaaaataaccatcaaaatcaattatttgtgcatcaatgcatacaacccccttacgtaggttcagttgaaaccaatatagcatttgttcatctgatttaatcttaccagagtcactattcaaagaacgccacaaagtcatgtactgcttataacatcatatgaagtgctcaactatgaaattaattaattctagcaaaccatagttatgcatgtcaacatattggtttggcaacgttttattagggacataggtctttggccctccatttggaaagctaaaaaatgataggacgctaacaactaatttcgactcactgtgaattggcctacaaatcacagaaaaaaaaacacatttagctaattgttgcctagaaacaatttctcctaatttattgtacgaaccaaactgagagacaactacactcacaataatacaataatagcacaaaggtgttacttgctagcctcttccaagaaaatctcccccatttacattattgcacaaaatacaaatcctccctgcagctcctcgcttgctgccggccgccgcctttgcgctgctgcctagcctgcaccacagcctcttgcacgctcgtcgccgccacctggccgacgcacgctcgcccatgccttccaatgcaaactcaccgacatcgccgcctagccggatgggatttctttcgggagaggaagcccatgtgcgagcttgagggctatccctacttggatatttcacagtggtaaaaggtcaatcaataattcaaaatatttgtatttcattttttttctttatttctttactgcaataagttcggtctgactcgcttccatctaaaccatgagtaaacgcctcgttcagataaaaaaggtgggggtaaaaactaaaaccctaaaatgtataggtaaaatcagtattggacatcaaaacaggaggagtataaatgaaattatccaataaaataaatacatattgtttttcttttattatctaaaaataaattttgttataaacaatgtgtcgcacaacaaactcataactataatagtcttatgcgataaacttttacattttcaaaaatataattcataaatttctataatcatccatgtgtgagggtaaaatgatcatttatatataaattagacgatcaattgacaggaggggtatggaagggattgaaagcaaattttaagggtatgcaagtataactatataaaaaagtaaggtgaggtatagaagggattagatataattttagaggcatagaagggattttctctagaaaataacaggagctaatttataaaattgcaagagtggtggtgaggtgattgtgtgtaagtgacagattcactgccatcatcgctaatttttctaaagagtaaattacaccgccggtacatcaacttggcatgtaggtgtaatatggtgcaagaacttgagaaatgagcaatctaatgcaacaacttggtaggtaggtgcaatttagtataagaactttataagtgatcacataa

SEQ ID NO: 15288 - DNA, 51761 bp, Oryza sativa
taattggatgtaaattgtatgtgcagtataatttttaaagattaaatttaatattataaggtaatatctataggattactatgatggtgtattgatatcgtgaaaaaaatcacctagcatatgcttagctaaattgatgcatcaaaatactaaattgttaagttcttatactacaagatatcacttatcaagttatcgcacccacttgctaagttggtgtaccatgtgtgtaatttactcttttctaaaggagtatagatgttaacgtcatttgttctgacgtgacggaacgggacaggatacgtgtgacgcccgagaataattggagaagaaaaagaaaaaaaaatgaagagagcaagcaacggcagtggttgctggttggttttgggccttggcccatgcatttgcttgcggcagtggcagtggcacactggccctagctagcagtgcatgcagcggcagcccatgggatttgaccaaagcaacgagaagcaagcagcatgcagtagctagcagggcagcaaatagcgagcataagcggtgcaagaggcagcaaccagtgcatctccttaaacagagtggtcctcccactcttcaagttaaaaactggcaactatagactaaaaacgagctctaacagtcttgctaaacggatggccaaaccatctggctagccaaactggctcgctcaatggccaaatttggcccgtccaaattggcttgccaattgtgggccccacatgagatgctttctccctcctctttctctcccctcccacactctcttccggtgactgattgaggtgatcaccgtcacctcacgcgcgcggggatctgccgccgccgtcgcctcccgcctcgtgcacgcatactcaaggatggaattatggattgatgggccgatgcagtacaagataaagaggaggaagaaggcaacgaaggctgacatgtgggtccctttgttagagactgttggagtgaacacctagtttgactatccaaatcagttgaaaagttggctatataagtatttggagagtctaatttggagatgctgtaagagtttagtctcacatcggctagctaggttgttgagcactactttgtaaggttaagaacccgttggctaatgatcccgaatttgaacttttgcgtgaagtgagtgtaaaaatttaatactccctccatttcaaaatgtatgatactgtttattttttcataacgtttgaccgtttattttgttaaaaaaatttgtattaatataatttattttgttgtgtggcttgttttatcattaattaaaatataatcttaacttatacttttatatatctatactaaagtttttaataagatgaattgtcaaacgttgtaccaaaaattaaagacgtcatatgttttgaaaaggaggtagtatgttgcgtaagggtgtgttcggtgttatgggttcctgatgagcacccggcggcgaatgccctaatttatccctctctttcacggtaccaataataatcaaataattaaaattctgaattttcctagacaacagcaaatttaatgcacacgatagcaaatcaagcagagcgaccaaattaatccagcttaataatagcaaaatataaaaaggactggtcttggcttacagtagcaaaaaccaaaccctggacagtagtactccacccgtgtaccgtgtacctgagagacgatcagagtaagtggactcctagatgaaatccagatcacgtccccaggagatggatctcctgatcacgtcactctccaaacatcagccggtggcagcgattcttcagtacatagcagatgggagcgccataagctatttccaagagaacaaatatatctcgacgaaacaaaaacaaaacctaatcttctacttacatggccaacggcctatttatattcacgcaggcatagtaaacataatgggcccttctctaaaccagactcggcgacatactggtccagatccaaaataccaaagaaaaaaataaaactaataagttgctaacccaaactagtcaaagaacacacgtccaggaatatatattaaatattccggcaccattgctaattacctttgctaatcaagataattaaatatacacctgctttatgctgacatgaaaccttgctttgatacattgctcttcatggtctccagatcaatactccctccgttttctgttatttcttcctgcacagtaacatgcattgtaccaactagaaatactcggggcttggacatatcagttccgaacacccttccctcgttttccgcgcgcacgcttttcaaactactaaatggtgtgttttttttacaaaaagtttatatatgaaagttacttaaaaaattaaattaattcattttttaaaaaaatagctaatacttaattaatcacacgctaatgtattgctccgttttccatacagggagatgggttcccaaccccaaacttacgaacataccctaagtatggttcaacaaattgcactaccatccactgtaggacacccaagtattgaaggatcgtctggcactagggggtgaaaacagtcagaaatgatattactttttttattttagtgtcaacttcaacgtgaaacttacagaaattagaaaaactaaatttctgaaacagtaaccatcggtaaagatattattattataatagcttgcggaaacgacattggtctgaaatttctgtatggttttcacccctatcacattggccgctccacatttaagaattggaaacccaaacgaaattcacggctcatctttgtacccagcaccagctatgtcagccacttgtcttcatcgtatgacgacgttgtcaaagcaaagccatcgtgtctaacatccccctattccattgagcgagattggcatataggcactatgtgacatgggccaagccatttaccaccaggcccctctacagtctagtcatggctcaacggttaaccctccgtcgttgcaaaacccttctccatccccttccacaacaacccctcttttttcttttgtggatctgcatgtactaggcctgattgataccatataggtaccaagctagtagctaggtatcaggattgatgcccgcacatatcgccctggtagcgatggatatcaggggtactaggtctgataccgaccgatatcaaatctagtactggtccaacatcgagtactgtttggagagattagggcgggatcccgtcctcctgtcctatagggtgggtatcaagcttgtgttctataggatggtaccaagtctgttaccgatcggtattaaacctagtaccaatctggtatcgagtcctttcactgatgctggcataagctccgtcctatagtagttctctttggtaaggtgctcctgttttaattgtagagataagtctagaatatatttgtcatacattatattttttatcatattgttacaagaaacagaaacataagatctgtcacagcaggactacacatcttgaaatgcacaagagatatgagccgatgagcgcgccaaaagccgatcaacttcagcacgtgcaaaatcaaatgaacaaatattggccaacatcatcaatcttattatagataagcaaacaccgtatacgttgaagcactggatcctaaagtcggtgcagccgatttgattattaacaacctaaaataaacaaaataactacattagtacttgtaatttccatttctttgtatctaggagtatgtgtccttcaagttatttgctttgtagagatattcatcctcaaggatcaacacatatatcacatatcgtccaacacattctaccaattctggctcgtttatacgtacttcctccgttttatattataagtcgtttggcttttttcctagttaactttgttaggtttgaccaaatttatagaaaaaattagcaacatataaaatatcaaattagttttattaaatctaatattgagtatattttgataacatgtcttttttgttaaaaatactattatattttgctataaatttggttaaacttaaagaagtttgactagacaaaaaggtcgattgacttataatatgaaatagatagagtacgtagatctattatattgaccaggcagagcatgtgagagagcctatgagaccgtgattctaaaacaacgctcccaaaggagggaagctaacaaatttcaatctcctcttcagatctaattaatagcatcctgatcaaggtttcttgctgaagttccgtgtgtttgagaactaaaattataaatcgatggtatagaagtgtactgaaagttccaatgttataaagctaagcatatataaaatgttataaactttttggtttgtatagaaccaattttccgagcaaattaacaaatgcaacaaatcattattctagctcctccaatgcccgcatcaaagccactactacataaatcctaaattatgccgattgggaaaccccttaggtgccagttttcccaaccggcacccggaaggcgacactaattagccatggtcaaaggtgccggttccataaccggcatctttgatgcgcacaggagccaaaaaaaaccaggtcgatgcatcagctcgggatcgagcagctccctatcccacatacaacaaatcatgattcatcatcacagaaatttatcaacatcaattcatcaatatcaatattaacatctcaccatcatagaaattcaacatcagcattaattcatcaacatcaccatcgattcatcaaccacagcatccccacacaaagcacagcatcccacaaaaatcacagaaattgaatccccacacaaatcacagaaattgaagactcacttgtcaaattgccactgatgccgcctgcagaaggccggatccagcagcccccaatgtctaggcagccggatccggcgcggtacggcgaggaggatggaggggcacggccaccgccgctgctgaggtgcgccgcctcccctccagccggatctatcggtgaggagggcgtggccccctccgcagggccgtcatcgccacccggccgccgctattgccactccgccgggcgagagagggcgagagagatcaagaggataaggccgctctatcggcttggtataggtgcccttttttaaaaaaccgacaccggtttgttttaaaaaaaacgacatctatagtatagctgccggtttttctttaaaaccggtacctttatcaattacaggtgctgggtttttgcgatctcaacccgcggaagtaggaaaatgcctataggtaccggctttagtacttccggcacttatagcgccgacacctatttaatattctatagtagtgagcaaatctcatcactatcactattgttagaacatcacatatatagtgcaggcaaatctaattaatctgctcagtgctcactaattaatatcacagataaaaacaccagtattagtggtgttattaattattacagtaacaatggttattagttagatggataaaatgtgattaaccagcttgtcaatgatgaggcaagaagagccagccttggtgatgcactccgccgctctgctcttcagctcgccggctctccgccgcattccggcggcgtcgtcctcttccatgagcctcctgatggcggcttccaccttgcccctctccatctcgccgccgccgccgtcgagcgcgaggccggctcgccacacgcgctccgcgtacctcgcgttgcccggctggtcgccgaagcatggccggagcagcatcggcacgccggcgcagacgctctccagcgtcgagttccagccgcagtgcgtccagaacgcggcggtcgccgggtgcgccaggacctcctcctgcggcgcccagctgaccaccgcgccgcggccgcgcgtcgcggcgtcgaagccgtcggggagggcggcggcggcggcggcgccgcggacgaggcccgggcggagcacccagaggaacgggtgtccgctgttggcgatgccccacgccgcctcgacgagctcgccggcgctcacgctggcgatgctgccgaagctgacgtagagcacagacgccggcgcctgggagtctagccactcgaggcagccgcggtcctggcgcagcaggctgctcggcggcgccgtcggcgagagcttgtggagcgggccgacgtcgaacaccgggacgtcgaggtctcgccgcagcgcggcgagctcgtcgtgctcgagcgcgtcgaaggtgttgaggattagccccgacgacgtcctcaccgcctcgacggcccgggataccagctcgtagatctggtcctgcgcgtggccaccgaagccggcggtcagcatcacgtcccggacgcggtacggcgccggcggcagcaccgtcaccggcgcgtccagctccgactctgcgcgcagatcacaaagctcatgtccgtgtagatcgagccatggaggagcattatggcgcgaacacgtatacgtacctcgagcggggaggtagcccatgtcgcggagcatacgatgcgcggcgaagacgcggaaggaggcggcgctgccggtgcgcagcgccagcgtcggcacgacgagccgccgcgcgacgtccatcagcgtcaggaggtgcgcgtcggcgacgaggcacgcgacgtcgccgccgccggcaggagcagcctcctcgagcagcgccgcgagtcgctccctgaacggcgcctcgcaccggcggttcacgtcgaggatgcccgccagggtggcctccaggtagtcgccgccggcgccgtcgccgtcgccgtcggcggggacggggacgaagtcgaacgccgggtggagggacgcgtcgggcgcgttgacgccggccggttggaggtggaagacggtgaccgcgaagccccgcgcgtggaggacgctggcgaggtggaacatggggttgatgtggccctggagcggcagcgggaggagcaggacgcggcgacgacggtggccggcgccggcggcgacagcggcgtgcactgcttccgtgcccatggatcggaatgaccaatagcagatggctagctagctcttttttcacaagaatccgttgctacttgtaattcatatttggcttcgattctctctaaaatgaagtagaagacgatggattttcaaatttaattttcatgtgcgcatgccggcatatgtgctgtgcacggaccacctcggagtctcggagcacgcggggcggcgaactgacaatgcaagttgccattgtaaaagggaaaatactccttccaatcacaaataatcagcgtatatagtttgtgcagcgacaccgttacactctcacatgtcacttaaatcggcatcgatcaacatgcaacattatttcgtgtgtcctacgcattaattacatccatggcagtttatgccaatgatatcgcttgcatacatgcacgcaccgtaattgcagttaattgaacgatagatagaacaatgcatgcaaaatgatcatttaaaatttagcaccacacagaaaaatgaaaagtcacatggaagattatcaaatatgttgatcgtttctgaataacattgaaaaaaattatgtgatgatcatctgcgaatggatggagaatcatgtactacggggtgaagcaatgaaacggagtgggtaatacggctaatacggctataggctaatacgactgtatgagtttaaattgagtgggatgtatatacgatgaaaatagataaactatagttttaaaaacttgtacaataaccttgcgattaacattactagaaaaatcattttttcagccggccaaaaatcatttttctatgcgggggaacggtccgcctgtatacaaacgcctattttcgcaagcagcccagtcacccgcctatgaaaatcctctggccggatctgggaggggaggggaggggagcagcgccgtgtgccgccaccgccgccccgcgcgttgtcgtcgccgaccccgcgtgtcgccgtggccgtccctgcgcctcgccatccccgcacgcgcgtcgccgtcgccgtggccatccccgccgaacgcccacggccgctaagggggagggagaggagagctgggggctgtgagggagaagagaggagataagacttagaaaaaaaaattgtgcgatttggcgcctatttatatgctacatcaattttggcaggcggaccctgcagatataaagggttcttttacagacgcactgcttaggtggtccgcttgcgaaaatagattttcgcaggtggacaaccatctcaccccacggttgttattttcgtaagcggtcatttagttccgagaggtctacccgccttcaaaaataaaatgccatcgtcgggaaaattggtcctagtagcgtaattttccctcactggatcagagtaagtgcaccagaggctcacaacttgcattcaagagggccacttgtcaatttctttcccagttttactgtgggacagcggtaaccacgtgatacgtttccacgagtgcaaactgcaaactcaattttgccaattcatggaggttcaatatttttcttcgtcggttctctaaaactctcaccactggtcttaacaagttgaataataaattttacaaatattttggcccaaagtttcacgatgaattaggattaactaatgttttcatctgttacactagtttgtattgtactaggatttgaggatacctgcaggagaatatgttatatgtaacgtgagaactcgtaagggttacacagagatgcacataaaaaaggcaaaacccctagtatgggcttgtttggtaacttgagggaaggggattgggagtttacacgagggaattgattatgagattaagatggtaatttgatttttaatcccaatatcttgtttggtagaggtgatggaaattgatagggagtttagttggagattagatcattaataaaaacggatggctgagattttcttagacaaagtacaggaggaattccctcccaattacctgcccctacctaagtattgaaaaggagggagttccttcctcaattcctcatccccatcccacaaaattgccatgtctcccaaccaaacaaaacacttaatagtctcatccctctaaactcccaatcccttctaataactccctccaactaaatagtccgtataagtttttttcgttagttttagcgtgagtagtatctaatcaactagctccatttatcttttttttccgccctttgtacagataatttgcaccttttttaaaacatgttcacatcaacatattgtgtgatccgctaaaaaatgtttttgtgatttgggaaaaaaccatttgatgggattatctaaaggtacttatcttaaggaaaaaaattacgaatatacttattttttcaataatttatgtttataaacataaagggaaggatttacaaaaatatacccgttccgcggggtgaaaacgcgggaccacaacggtcccgcagctctgaaacgcgggaccgatggtcctgccgcacgacggtcccgcagctataaaacacaagaccgtgaccgttctgcacgaccaaaacgcggcaccacgatagtagccattttatcaatgtgatgacactgtcactacagtgattggtactattgagacactgtttggcactgttcatagggcggttccacgcaatagaaccgtgggaatgtctcgtgaatagtggtaaacagtgtcaaacagtgccgaatgcataataaaattgctactgccgcagtgcctcattttggtcgcgcgggaccgtgactgtcccgtgtcttgtagcggcgggaccgttgtggtgccacgcaaccatctcgcgagactaacggtcctgcgttttggtgctgcgggaccattgtgggacggatatattttttcaattcttttttatgcaagtatataaacgtaaattattaaaaaagtaagtatatttgcaattttttttcttaccatgacacactaaaaaacgaattcaaaaggcaaaacaaagcgtatgtgtaagccgcggacgtactccttggatgttctcctctttggactcggcctatttaaaaacaggaataagtccacattgactccctcaaatatatgtccaatctaatttatatccctcaattgtaataccagatttcttaaatcctcaactattgagagtggttttcgctgacgtggcttgttgacctaattcaattgctgagtcatcatttgagggcccacatgtcatcctcactctatatctcttcttcctcctccctctcactcccccttatctcttactctccccttccgttccccttatgcacagcatgcttctggttcactctccacctcctctccttttcgtccatgctgctaatttcctcagtccgtcatgcgcacgccacgctcgccagccatgacgagcacgagctcaattttgaggagactcgtcgaattccaccgctgcttcctcccttcccacgaacgagcaagtgcgctcgagctcgacggggttcgtcaaccactgcctccaccgaagggagctcaaggctcaccactgctgaaggggaagagagatgagagatgtgggggagagagagcaaaggaggaaggatggagaatgagcatgacacgttggtctcacaaaaaaaaattccacctttcttactgactcagcgttcttgaccgtgccacatcatccaaaaccacccttaaactgtcttaggagtcaatctataccggttttatcaatttagggagtcgttttatccggttttgtcattgagggatatgaatcagatccagtctatatttaagagagtcaaagtggacctattcctttaaaaaaggaaaaggagataggctaagctcgaatggaaattactgtatgcccaaaaatggaaatttggctgatcgcgtaagcgagtggcacgctaccgctcgcgcaatggtcttctcggtagacaacagccaatagcttggcagggattttgtgttagattcctctgcttggatatgcgaacttctgggccgaatttacctacatatttgggtcaaacattcaatcaattttgggccacatttacgagtaactttgggccaaaattacatgcacatatgggcaggatgacagctgcaaaacgtatggatgaattccatgcatcaaactattgactatgagaggcaacaagtccctctcaaaaagagagagagagagaggaaacaagtaatttactttaatttattttgtttagatagataatagatattttattaagaaaaaaaattaaatccgagcaaaagggtatgaatgaaaagtatcccagattagggaccaacaccggaggagtcgccggtgaaagcctccatggctgagttcctttgtgactaaaacatctagaacatgcggttttcttgaaagaacaagaaaacaaaaaggaaaacaacgatgagtgactcgactatgatagtctcgtttctcctcgccggcctccgttgaggcgcttgaggcagtgaagaagggcgaaactgtaggatcgaaatacaaaaaccaagcttattaaaggagggtgaatggtaggaacaccaaaaaccaaaacttttggaggaattaaaagttatatcaaatccaacgaagttcagtctgatcacaatgtgtctgaccgccttattgcccggtctgaccggtgttgtcatgccagtctgaccgctctgcttgtcactatagcctcctaaagtcattggtccaatcgccttgaggccgctggtctgactgaaccaaaacctctagcctgaccgcctgtgccttgccgttctaaccaccgagataggaaaaaacacaaatcaaagaacactctgaaagtagatcaacttgattgtttctaactgtatttacaaagcacaacagtagcatttaattctctctcaactttcgactaaactcgtaatccaggctaatcagtaacttttctctcaactttccttacacacaatcgatactgagagaacttgaccactcttctatttataccagagttggctgcccaaaagccatgaatatgtcataatccactaggaaatcttctatcgaactcatcaaactccaaacataccatatcctttcaaattcaattccgcatcccatacacatacaatctccttttgtatgttgtatgaaatcttcaccaccacgtgcattgttctttaattagcctaagtatcccacttgatctcctgttcgtccggacatcatattctcccaagttgactcccgattcagcaccgacaatgctctcccggggcatcaagatacacctacacattaataaacaacaaacgtatcatatccgagcacaagttcttctacctcttaactctaaatcagcacaaaccagtattacatacacatagtaatcatctagctagtagtcataaacatgaggtaatcacgagtaaataaataactagaaatcgaaaccgacacaaattcaaccggttagaccgttgggttggctagtctaaccgccaccacaactccgatcagaccggcgcactatgtctgctttgatcagctccatcaagccgaaacctgttcatcgtcagaaatactattcatcgtaaccacccggtttgaccagtgcacaccccccggtcagaccggccttagaacaaaaccactttatcaaatattagcaaataaaaaccaattatttcataagataattatttatcacaaaataataatcaaaacatattttgatttcacagaaattgggggagagaagagacttggtggactcactggaagggcagagagagaacgacagagaaagagaaggtccaaaatagtctctagcatgtggacttgataacaaactgaatgacccaagtcagtagtatcaggtgggtgtgggttccccagattaattttggggctatcgtcgagtaaagactgatcgatttcaaggcaactgcaggcaatagcgacactttacatcatattcagtgaggaaagacttcctgtacatccaatatctctaattgaacattttccattcgtgattaatggagaacatttagatgaaagtgacgaaaatgtgatgaagaaaactcggttaattcgcaggcatcagcatttggctccgttatatttctccctagctacatgcaacggacaaagctcacaactaaggatatgacagcgcccagtccggcttcaagaactcatgaatgactttcctgatcacttaatagagtttacctcaaggatatgcattaaaaaagtttgattgaaaactgtttataactaaaattatcacagatcgttctatttgtacaaccaaagtcatactttcgcttatgcaatattccacgtttgctagcaccaggaaatgctacctatgttccatcaggaaataaagtaccattctaattgaagagcaagaatgaagctcagtcatgagaagttccctgtgccattgtaaatttcacccaatatattaatagtaacttcagaagatgtttatgttttctatggattttatgaaacagtttattgatataagataatgttcaaaatgacattatgagattcaccaacatatcaattgcagtatttgaagagcctcctttctcaatacaggtcgtcgctttgttcttcagatcctttgccctgtgcctcatctccttgccttcttcactgcacagtaaccttcttacagccctctcaatcattctcctctccagttttccctctagctcgaaccctatcttccatacctcttggacatacctagcattaatcatttggtccgcaaactgaggcctacagatcatcggaacaccatcacatatactttctagggttgagttccacccattgtgcgtccagaaaccaccaaccgctcggtgcttcagcacatcttgttgtggggcccaggaaaccaccatacccctgccacgtgtcgcctcctcaaagccatctggaaggcatgtttgctctgatccctggaccgagttaggcctgatcacccaaagaaacggaatttcgctatcgaccaatccccacgctgtctccaaaagctcttgagagtccatagatgccaagctcccaaagctcacataaagaacagactctgcctcctgcttgtctaaccattccaaacagctttgatcttgagttagcaagctgctctcttggcctatggagatcttgtgaagtggaccgatcgcgtaaaccggaacacttaggccattggcgatctttcggaggtcagaattctcaaggtcatcgaaggtattgagaatgacacctgaagaacaccgtgccgagtccaatagacgttctaagcaggtagccattgtaccatgtgtggtggttgctgagaacatcatatctcgcagacgaagtggtggaagctcatccaatggcatgtccagttgcagctgatctggaatttttatggaaatgaattgagatcagtcattggatgcaattatatgcgaatgcatggatgatggatcagctgagtgcatatatattttttgtagctatagaggacagaagtaactaaagatgcatgtatttagaaattttgtttcctttattttttgacaacaaaattaaataagcctctcaggatgcttccaaattgtaaaccatcatgaggtaactagttatatactttgcattttgccgtgggatatgtggataaatacatattatacattataaaaacgatatatgtatatgtttaaataatattaaaatgatgtggagataatgatttgatattaagttctaaaaatacaacaaaattgtaaaagatatgtcatgtttgtataatatttaaaatactcttaaataataattgctacttggtgatgatgtggcacgcttgtacgtgattttaaatactttagataatactaattgctagtgggtgataatgtggcatacttaaatgttgagattaagtagactgagtatcaactatatatatatagtatagattcgataagcctagctacttatgcctcgctagggtttgatttacacgttgattttcagaaggaaaaaggttaaccgtatgtctcagacttgaaaatagtggccaaatttcgggctcaactttactttaatttatgtacaacccgtatataattatatatactatccctatcaatgtcatatctattttccatggctcttcttacttggtcttagttttaaaggagggagttggcggtgatggtacatttataggtgatgaattggtctcctacatagcgtaaatataaatattataatttgtacataaataattatttgttgcatttgatatttatagatttagtacatttagatgggagccattgcaacgtgcggatatgattccagtcatttaaaattatgcaatttgacatattcaattttggaatttgaaaatattacgaattaacttcctatacatttgcttctgaggacagtgagaaaagacaaacaaaataaacaaccctagcttgcatatctcttatctatacttatagcccactaactctaaagcttaacatgcaaccataccacatcatcacccactaaccataattacatattcaacctcatgcaagcatgcaagagcatctacaatctatttaattctacaaattaacatgtgtcggtgatatgggaccgggagtatcgtgaccagaggcttgaggcagacacaatcgtccacgtggcctggcaccttcggggacgtcgggcccgagggtgaggtgtccgccctcctcctgatttccccgagggggggtcgggtgactcctgccccggccccgagggccgaggcgccccgaccccttgtggagttagcgccacatgaatgggttgggtgaacacggtaagcctcacctaaccaccatttattgcggtctggtcgaacgtgtcacgctgcatgcagcgtagtgcagcgcgttcctttatccggtctgtgaccagtcacagaccggtcagatcacgggttaggtggcgactggcggtctgacgcacgccttgccccatcccgtcaagacgaaagcctctaggcactcgtctcaagccggagctagcgtgtaatctcttagagatggcacgttagccctggttagatttataccaggcttcatcccaaccattacaggcaagatgctatatgaagaagggcaaaaatgcacgttgctaagctgacacgtggtggacaaggatgactgatctgtgaccggtctgacactggtcgcgtcatcaacagacagccataatcccacgtcgcacctgtttccggcggaagtgggggtagatatgggccgtcccgtcagaagggcacccggacagcaaccgtaccgatctccgtccatttatgaagagaagaatagtccagtttggagagggagaggggcatgtggtatccccttgagatataaaaggaggaccttgcccacttagatagagagaggatttttggacacaaggccttctccagatccgatcccagggcgattgggggctggttgacactttgttacttgttcatacacaaatccactagaacacaggagtagggtattacgcttcccagcggcccgaacctgtatacatcacccgtgtctcgcgtttcttcctagctggcgatctttccacataccgaacaaatccaccaaaacacaggagtagggtattacgcttcccagcggcccgaacctgtatacatcacccgtgtctcgcgtttcttcctagctggcgatcttttcacataccgagagagcttgagatttcaccctaagcccccggccgaaccggcaaaggggggcctgtgcggtctcccggtgaggagccacgagctccgtcatctggcgcgctaggtagggggctcagcgtgtgttttctgagctctcgtactcctccgtgtgcgccaagtttttcttgttcagcctaatggccgagcaagcaaaggtgcacgacctctctccgagtgtgagcggcgacgacggggagccaaacccacgccgtcgagctcgtactcccccacctcctccacaccaaaatcctaagcagggggaggcactcgagagggtcgaaaaatccgcagcatcgccagtcgcgggtgatgcaggagaacggcgagatggggagcgtcgcctcctcgtctacggcgacggcaacacgcctcagggcgcgcttcaggctgttggcgcgctcctacgtaacccgcccgtcgtccctgacccggagtctccagcccagcgatggctggacgacgtggccaacttggtcatgacggcacagcagcgcctgggtgctggtggatggtccgccaccaccaagacctccggcgccgccactaccggctccgtgtcgtcaaggcggagggcgcggcgagcggcggctgttgcacgccattcggctgccactccctcgtcggcacctccgactcgggaggatcagcatggagagccggatgcccgcctcgacatcgagcgccggcgtaatagccggcgtactccccgcgcaacggagggcgcctcttcgtccagagtgtcacctcgacatggacgtgaggaccagccctccgtgcccccggctggtggtgtcggctgtagagcctttgtggcgagtcttcggaatgtccgttggctcccaaggttccggcccaccatcaccgagaagtatgatgggagtgtcaaccccaccgagtttctccaggtctatacgaccgggattgaggccgctgggggtgacgacagggtcatggcgaatttctttcccatggccctgaagggacaggcgcggggttggctaatgaacctgccacctgcgtcggtccactcttgggaggatttatgccaacagttcactatgaactttcaaggcacttatccgcgcccaggtgaagaagcggacttgcacgcggtacagcgaggggatgatgagtcactcgctcgtacattcagcggttttgccaagtccgcaataccataccatgcatccctgcacacgcggtgatctacgcgttcagggggggtgtgcggcacaaccgcatgctcgaaaagatcgcttccaaagagccccagactaccgcggagctttttcagctcgcagaccgagtggctcgtaaggaggaagcatggacctggaacccctccggttccggagtggcagcttcggccgcccccggatccgccgctcagacagggcggcgtgacaggaggaggaagaagaggtcggtccattccggcgacgagggtcatgtcctcgccgtcgagggcgctccgcgggccacccgaaaggggaggcctgcgagcgacaaaaagaaagaggctggtactcccaccagggagcgcccagccggcaagtggtgctccgtccacaacacctccctccacgatctcgcggactgtcgcgcagtcaaaaacttggctgagcgaacgaggaagtgggaggaggacaggaggaaggaacgccgtgagggcaagtcgccggcaactccctccggtaaacggcgaagtgaggccaaacagaaggcccccgctgttgacatcgatgacggtgatgatgacctaggtttccaagaacctggggccaccattgccactgtcgatgggggagcgtgtgctcacgtctctcgccggagcctcaaggccatgaagcgagagcttctggccgcggcccctactcatgaggcgacgcgccgggcgcggtggtcggaggttgccctcactttcgaccagaccgaccacccaccgtgcgtcgcccggggagggcagattgcgatggtggtttcccccaccatctgcaacgtgaagttggggcgtgtcctcatagatgggggagcggccctcaacatcatttcccccgcggtttttgatgccatcaaggccccggggatggtgctccagccgtcccaaccgattatcggtgtgacgccggggcacacatggccgttgggtcacatcgacctaccggtcacctttggtggatcagccaacttccgcacggagcgggtgaacttcgatgtggcggacctcagtctgccctacaacgcggtcctggggaggcccgcgttggtgaagttcatggcggcggtccactacgcctacctccagatgaagatgccgggccccggtggccccatctctgtccatggcgacctgaaagtcgcgctcgcttgcatggagcagcgcgcggaccacctcgctgctgcgtccaagcccgagggtggtgacgagaggcttggcacctccgcccccaccgccccgaggcagcggattgtcacatgcgccgaggtcccggtcaagggggttgccctgggcgacggcccatccaagaccacacggatcggtggtcttctggatggcaaataggaagacgtgctcgtctccttcctgcgggcaaacgctgacgtctttgcatgaagaccggcggatatgcccggggtccccagggaggtgattgagcaccgtctcgccgtgcggccgggcgcaaggccggtccggcagaaagtgcggcggcaggccccggaacgtcaagccttcatccgcgaggaggtggcgagacttctggaggccggattcatccgtgaagtcatccatccggagtggctggcgaacccggtggtcgttccaaaggcgaatggcaagcttcggatgtgcatcgactacaccgaccttaacaaggcatgtcctaaggacccttaccccctgcctcgcatagatcagattgttgactccaccgcggggtgcgaccttttgtgttttctagatgcatactctggttaccatcagattcgcatggctagggaggatgaggaaaaaactgcattcattacccccgtaggaacctattgttatacatcaatgcccttcgggttaaagaatgcaggtcctacttttcaacgtactactcgaatttctttgggtagccaaatagggcgtaatgttgaggcttatgtcgatgacttggttgtaaagacgcgcaaccaagagactttactctcagatctagcggaaacttttgaaaatctccgctccgcccgcataaaactgaaccccgataagtgcgtgtttggtgtacctgcgggcaagcttctcgggttcttggtctctgcccgaggcatcgaggccaaccccgagaagatacgagctatagagcggatgcgccccccccagcaaacttagggatgtgcaatgcgtcaccggttgcattgccgccctaagtcgtttcatatcgaggctgggagagaaggcgctacccttatttaagctcctcaagcgctcggggccgtttacttggacggaggaagctgaacgtgccctcactcagttgaaggcatatctcagctctcccccagttctagtcgccccggggccaaatgagcccctactactctacttagcggcgaccccccaagtagttagtgcagcgttggttgtggagcgcgatgaagacaatcctcatttcgcgcacccccgccctgtgctgacttggcccgggagcgagcagggaggagaagcccccgagtcgaacggtggcctaaggcccctgacgaccggagtcggccctctgcccgcttgtcagacggtgctgggtgcccccgaccctcaggaaggccccgaggccactgcgggaaggccgcacctatcgccctttggccccgaggctaaccctgtgctgactcgacccgggagaaagcagggagaagaggcccccgagccgaacggaggcctgaggcccctgacgaccggagtaggccctttgcccgcttgtccgacgacgccaggagcccccgacccccaggacggccccgaggccactgtgggaaggccgctcctgtcatcctccgaccccgaggtcatcggcacagaagacgagtgcgccccgagaggccacttggacgaagaacgccccggggatgcggcccctagcgaagaggatcggccccgccgaaaggtgcagcggcctgtctactttgttagtgaggccctccgggacgccaagacccgataccctcaggcccagaagatgctttacgctattctgatggcctcgaggaaactgcgccattatttccatgcgcatcgggtcactgtggttacgtcttaccccctcggtcaaatcttgcgtaatcgagagggtacaggacgagtggtaaaatgggcaatcgagctttctgagttcgatctgcactttgaaccacgccacgctatcaagagccaggccctcgccgattttgtggcagagtggaccccggctccagagaccgtctcaatccccgaggccagcacggacccctctcagctgcctcacaccgtccactgggtgatgcagttcgacggttctctgtctctccagggcgccggtgcgggggtcacgttgacctctccgaacggagacgtcctcagatacttggtccgtctcgactttcgagtgactaataatatggcagagtacgagggactcattgccggactcagagtggcagctggactggggatccgccgcctcttggtgttaggcgactcccagctggtcgttaaccaggtctgtaaggagtaccggtgctctgacccacagatggacgcttacgtacgccaagtgcggcgtatggagcgccattttgacgggatagagcttcggcatgtacccagacgggataacatggttgccgacgaactctcacggctcgcgtcctcgcgagcccagaccccaccgggcgcctttgaagaaaggcttacccagccgtcggcgcgacccgaccccttaggggagacggatgcgcctgaccagcccccgagacccgtcggagtccaggcctcgggacccgaagggagcgctccaagctcccttagattgattgcttggatctctgagatccaagcatacctcacagataagactctacctgaggaccgtgaagggagtgaacgcgtccaacgcatttccaaacgctacgtgctggtagaagggaccctctatcggcgcgcggctaacagaatcctcctgaagtgcattcctcaggaacaaggcgttgagcttcttgccgatatccatgaaggcgagtgcggagcccattccgcctcgcgcaccttggttggcaaggcctttcgtcaagggttctattggccgacagctctcaatgatgcagttgatctggtccggcgatgcagagcgtgtcagtttcacgccaagcaaatccatcagccggcccaggccctgcagatcataccactttcgtggccatttgctgtctgggggctcgatattttgggaccgtttaagcgggccccgggcgggtttgagtatctgtatgtcgcgatcgacaagttcactaagtggcccgaggcttatccggtcgtcaagatcgataagcactctgcacttaaattcattaagggcatcacggcccgttttggagtgcctaaccgtattattacggataatggcacccaattcactagtgaactcttcggcgactactgcgaagacatgggcatcaagctctgcttcgcctcacctgcccaccccagaagcaatggccaagtggagcgcgccaatgcagaaatcctcaaaggccttaaaaccaagaccttcaatattctcaagaagcatggcgattcgtggatcgaggagttgccagcggtgctctgggcaaaccgaaccacaccaagccgagcaaccggggaaacgcctttcttcctcgtttacggcgcagaagcggttctcccatccgagctcaccctgaggtctcctcgggccaccatgtactgcgaagctgatcaagatcagcttcgcagagatgacctcgactacttggaagagcgaaggaggcgcgcggccctccgagccgcgcgctaccagcagagcctgcggcgctaccatcagcgccacgtccgggcccgatcactctgcgtcgatgacctcgtcttacgccgcgtccaaacgcgtgctggattgagcaagctctcaccaatgtgggagggtccgtatcgagtgatcggtgtcccccggccgggctccatacggctggccacgggcgacggcacggagctgcctaacccgtggaatatcgaacaccttcgtcgcttctacccctgaggggggggtcgagtgtcaggttttggctcgggccaaccccgcacccccctcgggtgtgcagggttggccgggggctaccacgcatgcacattcttatttctcttatttcagcatttcaataaaagcagtttcaatttcctaaaggttgtgtctgtgccgttttttccttttgaagaatcttgacttgaaataaggtcactcgtgctcaaccttgccctcgggggctcggttcggtcagctaaaatcgccaaacggggcccagaaccgagccgtgccccggggcgtggtgaacttcgggggggaatcggcaaaaacccacaatcgggtcacccataaccctcggtcaccacgttcccggcctggccagcctcgacatgtggatctccccaggcactagccccgacccgagccattagaggactgggacttgggcacgagcccttaaatcaagctaagacacaaaagaggaccacagcacagatcatcctcatctcatacgcatagcaaaataaaattgacacgaattttttcatcatttttgattgtagattaagttgatctatacaaaaaagaggcatgaaggccttagaagaaagaaaaagaaaaaactggagtctggcgggggcctgggggctcagtccgatgcgcccgggtcgccggcctcgtcgttacggtcgtctgcaccgctggcatcgccctcctcgtcggagttgggggcgaacgcgagccgaggggccgacccatcgaaactgtggacgatgtggtcggcggcatcccggacccgcgcgcgcgtcgtcctcggtcccgggagggaactcttccagcgccatccatggagagaagttggggtccctggcctggtaactcgctagtacgagttcaaccgctccttgggcgaggtccctcgaggatgacttgatggtcttctcgagctcctcggggagttgttggaaagcccaggccatctttgtgaggtgcggagcgaggccttccaggttggtggggtgcgtcattgtctggcctttccagaggcccgcttgccgaccggcgcgatccaggcgggagaccgcatcccaaagcatgccgggccctatttcgcccgccaagcggagggcctcggcttccccggcggatgagtctagcgcgcactgcatgtcggcgatggtgagttcggcagctgcgaggcgggcggctaagtcgctttcgcccgcagccgccccgctgacacgcgccctcgcgtccagctccttttcccgcgcctcgaggtcggcagcccgctgctccagtgcggctctctcggcgcggacggattccaaattgcggcgtgcctgctccgccagcgctgcctcacggaggggaaggctatccgccaaccgttgcgccgcggcctcggcctcttcgagagctcgctcccgctcagcgagtgcgtcctcgcggaggcggagcgcggactcctcttcggcgcaggcggcctcgtgcaccgccagcgttgcctcccggatagcggcggcggcctcgcggtccgccaagcccctctccacgacgccggcgtgttcctccaatgccatagcatgggcctcaagggcctcctcgcgccgccgggacgccgcttcgatctccgttgcccgccgctctcgggcagcggcggtgtcaaggaccccttgggcggcgtcgagctttttctttagctccgcctcccagctcccgtgttgaaggcggagggtgtcctgcgcctcgatcatcgcggtggtggcaatgagggcggcctcccgctcctcctccacctctcgggcgatctctgccagcgccgctttgcgggcttcaagctccgagacgtgacggcggtgagccttacggcccacctccaccatgacatccaccgagcgccgcccctcctcgacacgcgcccatgcggcctcgagctccgctcgttccactcgcagggcctccacttgggcgctgaacccatctagcaccgcggtgtttgcggcggccaaggcctgcagaaggggctcggcgctcagcggggcgacagaagacgaggagaagagccgccttggagagaatgcgacgcggctcggcccgccggaggacgcactgggctcggggatgtcccccggacccgtttggtcatgggcgtcgcctggggaagtgggcccaggcgatccgcccgcggcctcgtcgcgagccgccccggaggctgtcgcctgagcgtcgcccgagggagtgggcccaagcgacgcgccagcagctttgtcgtgagctgcctcggaagacgccatcgcctcagcctgacgagcccgggcggcctcctccttagcagcttcttcggcttggcgagcccgggcggcctcctcccgagcggtatcctctgcatggcgagcccgggcggcctcttcggcttcccgaaggcgatctgcggcctctcgccggtcagattctcgcctccgttcctctgcggccgccggatcttcggcctcggactggccggacttgggatggcgggaggaacgtgacgggacatcgctgaagcaaaagaaaaaaccagaagacaaacaagatgggtaagggaaaacttgcttttgggataaaagaaagacggtcgcaatgagagtgggacgaacctgcgagggggtcggttaaatgaccaccttggaggggaaatcaggtttccccgggatggttccgtctcccccatcttgcggagccgcttcttcttgcgctccccctcgggctgcgatgtcggcgcggccccctccgggtgccgactgctggcacgcaccgccccgccccctcggggaggagatgggggaggtgttcctcccagcttcctcttcccctgggcgtcggcagggcggctgctccccgagcccccgacgcggggcccagaagcacgaccccctcctggggtagattgttccccccggcggctctcgcccgcgctgtcgtggcccttaggagtttcctcctctgaggccccgacccccatcataatggtcagaatggaggcgcggtcgggatcgctgcagagggggaggattccttgaggaatgagagatgcctccacggagctgagattcagcaccctttggaccacgatcttgaagtcctcgggagcccaatcccatctgactccctggtgggtccgcatgtagtcttcggacccggtgtactcccaggcgccccgggcgcgccgttggagcggcgcaatccggcgacggaggtagtcgccgtacaccatggcccctgtgagcccctgggatcgcaggcccgccagtcggtcgaggacggcgtcatagtcatcccccagatctaccggcgcccgccagctggagacctgcgccgggggctgacttggaagtcggaggcgcgcttcgttggcgaggggggtgtagaaccagtcgctcttccagtcgtcccacttcttgcggagggcgcaggggatgtagtggttcaacaccggcccccgcggctggaagtagcagccaccaaccaccgacggcggcgacaccgactgcacggtgaagaaccaccggaacagccgaagagatgggcgcaccccaatgaacatctcgcacaggtgcgcgaagatggccaatgtcatcactgcattgggggtgaggtgcgccatctggagatcgtagaaatccagaacatccataaagaaagaagaaaatggcggaaccagccctgccattgcgaaggggaggaagaagacggaccgccccgggtagtctggtgccgggcgtccctcgcccagcatcactatctcccggccggtggcagattccggcataaagcggcgcggcagcccggcatgcctctcgctcacgatgcgagaaggcggaagtacgcttccgtcgagcagagcggaaccccgtgccatggcgccggaggaagggatgattgagaacgagcgcgtgtggcgaaggaaaggcgcagcagagaaagagttagggctcaagcagcgaaggcaaggggaataatggcgaaaggaagggagcaaatcctttcctcggtgtctttatacccttgccatcgctgtgcccggctcctcgtttctcgcgcccactatctcgctccctcgtttctcactatctcgctccctcgtttctcgtgcccacgtttccactaatcccattcgcccgcttgcggcgcatgaggtggatatgcggttgtggcagtcgagatagatcgtatcgtgcgcgcgttaattacgctcgctgaccgaagcgacgttaccatatctccaggcgaagcaaatcggttcacccagattcgtacgccgctcaagtgatgtggcagtcttgaagagaccgcccattatggacagccaagtcaccattaccgatgtgcatgatttgagaccgttgggtttctgcccaaccatggagaccggtcccacctgtcaccaggctttaggagtggcgtcacgcccgaccgcttcccttgagaagggcgatcgccctggcataacgccgggggctactgtcggtgatatgggaccgggagtatcgtgaccagaggcttgaggcagacacaatcgcccacgtggcctggcaccttcggggacgtcgggcccgagggtgaggtgtccgccctcctcctgatttccccgagggggggtcgggtgactcctgccccggccccgagggccgaggcgccccgaccccttgtggagttagcgccacatgaatgggttgggtgaacacggtaagcctcacctaactacatttattgcggtctggtcgaacgtgtcacgctgcatgcagcgtagtgcagcgcgttcctttatccggtctgtgaccagtcacagaccggtcagatcacgggttaggtggcgactggcggtctgacgcacgccttgccccatcccgtcaagacgaaagcctctaggcactcgtctcaagccggagctagcgtgtaatctcttagagatggcacgttagccctggttagatttataccaggcttcatcccaaccattacaggcaagatgctatatgaagaagggcaaaaatgcacgttgctaagctgacacgtggtggacaaggatgactgatctgtgacggtctgacactggtcgcgtcatcaacagacaccataatcccacgtcgcacctgtttccggcggaagtgggggtagatatgggccgtcccgtcagaagggcacccggacagcaaccgtaccgatctccgtccatttatgaagagaagcatagtccagtttggagagggagaggggcatgtggtatccccttgagatataaaaggaggaccttgcccacttagatagagagaggatttttggacacaaggccttctccagatccgatcccagggcgattgggggctggttgacactttgttacttgttcatacacaaatccaccagaacacaggagtagggtattacgcttcccagcggcccgaacctgtatacatcacccgtgtctcgcgtttcttcctagctggcgatctttccacataccgaacaaatccaccaaaacacaggagtagggtattacgcttcccagcggcccgaacctgtatacatcacccgtgtctcgcgtttcttcctagctggcgatcttttcacataccgagagagcttgagatttcaccctaagcccccggccgaaccggcaaaggggggcctgtgcggtctcccggtgaggagccacgagctccgtcaacatgcaagcatattcaatcattacctcacatcatttccacaatagttttacaaatttctttatcatttttataatatttaatatatacttatcaatatgttttacattaaagtgtaaatttgataaatattgataagcccttagatttgatttttttttctttttactcctagctaaattgtaaaaaaaataacattaaaattacttagtaattcccgcagcaaagtacagggaataccttagttctaatattgtgccttgccaatagaattgatataattcactcacgtgtgacaactactactatattagaaaaggaataattcgatttcatgaaaatagttctatcgcttaggattagatttgattaaacttctaaaacattattaaatatttgtgataggagggatatatatgtatatagtacttcgtaataagtttttttttgcgggggtatatagtaataagttgacgcaagggccctggtactttaattggtgatactaaacttgccaacaattggtgggccgttcgagcttaataattactaattagtgatgagctaattacggatctgggctcggataaaccagaattaattatcaaaatcgaaatctccgatggcccacttggccggccggggttgtatacctcgcgacagcggcgggaggacgcccttgccgcagagctccgggaaggccatgtacgccacgaggcagcacgcgccgccggtgcgcagcgccagcgtccgcacgccgcgccgctccgccacctcctgcaccccgcgcaggttcgagtccaccactaggcacgtcgccgccgcctcctcctcgtcgtcggcgaggagcgcctggcggagggcgtcgtcgaacggcgcccggaggagcgcgtcgaggcgcatcagcgcgccggcgaagtcgctgccgctgccgcccgtgggcatcagcgccgccgcctcccccgccactccggcccccacggtcacgaagcggtagtcctcctccgccgccgactgctcggcggcggcgggcgcgttgacgggggcgtggaagacggtgacggcgaggccggcgcgggagcggagcacgtcggccagctgcagcatcggcgtgacatgcccctgaaacggaatcgggaacatcaacaccctcctccgccgccgccccacgccatcgctcgccggagagatcgccgccatctttgatctgatcagataagctaagctctcgctccttcttggatcaatcttgatgattatcttcctgtgcggaacgatcagtatgatttgtgttaattaatttataagaaggtggtggttaggatggatgaggacggaattaagggggaatattggagttatattagcaagagtgtgtagatcgatcacattgaatggtaggatcaataggttgatgtcatgggggatttgggttgtggaggtggtttggtttgggaaatgcgtgatttgcttgggcacaagccaatatgtgtgcatatcgttagggggtgatccacggcaaacagacaggtggaggaggtgaatgacttttgtgactgctgctgcggcgaaagctggggctagctgccatttccatgtcgatctgttgtaatgattgttgtgtgtgatggcaggcacgacgacagcttcgcgtgcatgcactgcatgactcctgtaggtaggcctgcgcaggtacttacctatcttgtgcatgtatagggtgtgtgcctattttcttgtggtgctacgcaacgcacgtactccctccgtaaaaaaaaaaaaaaaagacaaaccttggtttttgtgcccaacgtttgacaaaccctgggtcttatttaaaaaaattatgaaaaaaattaaaaagacaagtcacgcataaaatattaatcatgttttatcatctaacaacaataaaaatacgaattacaaaaaaatttcatataagacggacaatcaaaattggacacaaaaacttaggtttgtcttttttttgggacggatggagtaagcacgtcactactagcttttgaatgcttgatcgtgttgtaccgtggcatatacgaaaacgtattttatgcccacgagttttttgcacactcttcatacacattaattagtaaacgtcataattgtttttttaaaaaaaacttagacatgtgctcctaatgatgagtattatacatatgtacaaagttttttattcaaaattaatattacagcttagaagaattaaaaaaatctaacagttttaagactaaaaatctattagacttttgtctgtgtgggttgggttggaacgcacgctacccgcttccatccacaaacttggttaagatatatttttttaactatagttcgtatgtttccaccacttagtataaattcagacactcatataaagctatatttgatcaaaagcagagtaaagcagttaagtttcactcctaatttgttttagttcatcttgactccgtgagtccacattggtagttagaagggcaatataactcttttttttaaaaatgagagggccccttgcctcttagactggggtgagaatggccctttttttaatgaaccctacagttttcaatggagtacttagggcatccacaatgtacttcaaaaacagtccatagtcaataaaataatacattcagctacctaaccacacagtggaagtagttcataggagagaaatagcaaaagtcatccataagcatatgggctgtccatatagaataaaatatgtcatttgtctctatttcctctctcctcctcctactacttactaactatatacattgtgaatgttgcaatagttaaagtccacaaatgtaagtcccatctatatggactactttaaccatatatattagtgttgcccttatttccaaaacataaactactccacttggtttgcttgcttgctttaatcctgtgcatacaccatatctaattaacttgagaataatatgggactcttatggacgaagaaccacgatgaaaaatggagagccacagtcaatccaaatgaaccacgacgacgtgttaattagtagaacttagaacggcacccgatgaaaacttggatcaataatatagtactccctctgtcccatattataaggaattttgagttttttttattgactactcgtcttattcaaatttcgtcttattcaaatttttttgcaaatataaaagacgaaaagttatatttaaaatactgtagataataaagtaagtcacaaataaagtaaataataattttaaaaatttttgaataaaacgagtggtcaaacgttgcaagtaaaaacttaaaatcccttatattattggacggagggagtatcttggatcgtacgtcttacacatgatgacaagacgttgatggcgtattgatcggtcgtctcgaatttaagatcgagttaactgcggatgcaaatttgtcacatcgtgtcgtgttcaactattcatattcgtcagtgtcacgaggattgcgctgcacagactgtaaaggaaacctgtggcatactcccctccgtcaaacaaaaaaaaaaaagacaaaccctggtttctgtgtccaatgttggaccgtcttatttgaaaaaattataaaagaattaaaaagacaagtcacgcataaaatattaatcatgtttttgttggaattaatgaatgggccttagcccactcgaagattaattctttggaaaatcacaaaagcccacctcatgggatggcatgcatgtggagtttagtaccaccttgcttattctaggagagggggacctccttaaaagggaggatgccctcctagccacttgaaacatgtgtggtggagagaagaggggaaacgcgtgcgctcgctcgcctcgcctcgcctggcagggcgacaatcaatctagggtttgcctcctactctgtactgcgccgtcgctcgtagactactccatcccgctcgccggcgtgcaccagcgatcgggagagcaggtctccggaacctctgcctttgacgtcctgcaccggcgccgtcgctcgtagactactccatcccgctcgccggcgtgcaccagcgatcgggagagcaggtctccggaacctctgcctttgacgtcctgcaccgggagaaggcggcaataaggtttttgggaagcgcttcgcgcgactgctccctgttcgttcgcgacggctcgccttcctcttcgctcgcgtgtttcgtgccttcgtagacacctgcgaaaagtttcgaccaagcagccggtcttttcgtcacctcggtacgtgttcaatatgttgcgcatatttgatctgttcatgttattctgcgtagtttacatgtgtagatctaatgatgcgttcatgctagttttcatctgtaatatcatgatttatttatggaataaattaaatcattatatgcccataatatcaacaatccaaaaaccttattataggcactgtgattttactatggctggttttgccgatgcactgaggccggataaattcaccggtgtgcattttaagagatggcagatcagggtcactctgtggctgacagctatgaaatgcttctgggtgagtactggcaaacctgaaggagttcttactgctgaacagcagaagcaattcgaggaagccactactctctttgtgggatgcattcttagcgttcttggcgatcgtctggtcgaggtgtatatgcatatgaccgacgctaaggagttgtgggatgcactgaatactaaattcggtgctactgatgctagcaatgatctgtatatcatggagcagtttcatgactacaaaatggctgacaaccgttctgtagtcgaacagtctcatgagatacaaaccatggctaaggaactcgaactccttaagtgtgtcttacccgacaaatttgtggccgggtgcattattgcaaaactacctccatcttggaggagtttcggtactgcactcaaacacaagagacaggaatactccgttgaggggttgattgcgtctcttgatgttgaggagaaagctcgggaaaaagatgccgcgtctaagggcgatggtgggcagtccagtgccaatgttgtgcacaaggcccagaacaagagcaaggggaaatacaaagctcagcagaccaccaacttcaagaagcagaagaagaacaacaacaatcctaatcaggatgagaggacttgctttgtgtgtggccaagttggtcatctggctaggaagtgtccacagcgcaaggggatgaaggcacctgcagggcagacttctaagtctgctaatgtgaccattggcaacactggagatggaagcgggtatggtaatttacctactgttttttcagttaatcaatctactaattggtgggttgatactggggccaatgtacatgtttgtgctgacatctcattgttttcttcttatcaggtcgcacggggttccaccgttctaatgtggaatgggtcacatgcttctgttcatggtgttggcacggtagatctgaagtttacttcgggaaagatcgtgcagctgaagaacgtgcagcatgtcccttctatcgacaggaatcttgttagtggctcccgtctgactagagacggatttaagttggtttttgagtctaataaagtagtcgtgtctaaacatggatattttattggtaaaggttatgagtgcggaggcctgttccgcttttccctttctgatttctgcaataagtctgtgaaccatatttgtggcagtgtggatgatgaggctattgtttggcattcacgtttatgtcatattaattttggcttgatgtctcggctttccagcatgtgtttaattcctaagttttccattgtcaaaggttctaagtgccatagttgtgtgcaatcgaagcaacctcgcaagcctcacaaggctgccgaggagagaaacttggcaccactagaactcctacattcagatctttgtgaaatgaatggggtgttgacgaagggtggaaaacgatatttcatgacattgattgatgatgctactagattttgctacgtgtacttgttgaaaacgaaagacgaggctctagactattttaaaatttataaggcagaagttgaaaatcaacttgacagaaagataaaaaggcttaggtctgatcgtggtggagagtttttctcgaacgagtttgacttattctgtgaggaacatggcatcatacatgagaggacgcctccctattctcccgagtctaatgggattgctgaaaggaagaaccgcacactgactgacttggtgaatgccatgttggacaccgcgggactgcctaaggcatggtggggggaggcattgttgacctcaaatcatgtgttaaacagagttcctaacagaaataaggacaaaacaccatatgagatatggattggtagaaaaccatcactttcttatttgcgcacatgggggtgcttggcgaaagtcaatgtaccaataacgaagaagcgcaaacttggacctaagactgtggactgtgtttttctgggatatgctcatcatagcattgcctatagatttttaatagttaaatccgagataccggacatgcatgttggtacaattatggagtctcgtgatgctaccttctttgagagctttttcccaatgaaggatacacatagtggttcgaaccaaccctctgaaataattcccagtttaattacaccaccagaacaaactgaacatacacatgaacttgtctctgaggaggatgtcagtgaagctcctcgaaggagtaagagacaaaggacggctaagtcttttggtgatgatttcactgtgtacctcgtggatgacactcctaagtcaatttcagaagcatatgcatctcctgatgcagactactggaaggaggctgtccgtagtgaaatggattccattatcgctaacgggacttgggaggtgacagagcgaccctatgggtgtaaacctgtggggtgcaagtgggtgttcaagaagaagcttaggcctgacggtactattgaaaagtacaaggctcggcttgttgctaagggctatactcagaaagaaggcgaagatttctttgacacttactcacctgttgctagattgaccacaattcatgtgctactttccctagcagcctcacatggtcttctcgttcatcaaatggacgttaagacagcttttcttaatggagagctggatgaggagatctatatggatcaacctgatgggtttgtagttgaaggtcaagaaggcaaagtgtgcaaattgttgaagtctttgtatggtctgaaacaagctcctaagcaatggcatgagaaatttgacaaaacattgacatctgcaggctttgcagtcaatgaggcagataaatgtgtgtactatcgccatggtgggggtgagggagttattttgtgcttgtatgttgacgacatactgatatttgggacaaaccttgaggtgataaatgaggttaaatcattcttgtctcaaaattttgatatgaaagatttgggagtagctgatgttatcttaaacattaagctaattagaggtgagaatgggattacactcttgcagtcccattatgtagagaagatcttgaatcgctttggctacattgatagtaagccttctccaacaccttatgatcctagcttgttgcttcgcaagaacaagagaattctaggaatcaactggaatactcccaaatcattggctcgttgatgtacctggctagtgcaactaggcctgatatctcctttgctgtgagcaagttgagccgatttacctctaatccgggagatgatcactggcgtgcgcttgagcgagtaatgcgctatctgaaaggtactgtggaattggggcttcactatactgggtatcctgcggtactggagggttatagtgattctaactggatctctgatgtggatgagatcaaagccactagtggatatgttttcacactgggtggtggtgctgtttcatggaggtcttgcaaacagacaattttgacgaggtcaaccatggaagcagagctaacggcactggatactgctactgttgaggcagaatggctgcgtgatctattaatggatctgcctgttgttgaaaaaccggtgccggctatccttatgaactgtgacaatcaaacggtaattgtcaaagtgaatagttctaaggataatatgaaatcgtctagacatgtgaaaagacgattgaagtctgttaggaaattaagaaactccggagttataacgttggattacatccaaacagcgagaaacctggcagatcccttcacgaagggactatcacgaaatgtgatagacaatgcatcgaaggagatgggtttgagacccatgtgagttatactatggtggtaacccagtctatgtgatcggagatcccgtgaattagatcctgggaagaacaaaccattaataaactagaggagagtaccaatatatataccctctccaagtgaagatgcatatactctcgtgagctgcaaggcaggttggctatgccttaatgagttcttttggctttaattagcaaagatgttgtcctgcagagcattcttgaaggaactcacctttgtgagcttgactgttggtcgcagtctatgaagattttgggtgaatctgctaggaagcttactaaagacctaggagtatgacttatacgctccactcgaggggtagtctacagacggtctagtaccagataagactttgagtgaaacttgcttgcacaagacttgcaattcaaggcgtagtccattgttcaagttgtgagtaagtgtagcttggagttctaggtggatgttcaaccttaattggtctccatcgaaccgctgttatataaacagtacattggaaaaggcaaatctcagtgggattttgagatttggtgggggattgttggaattaatgaatgggccttagcccactcgaagattaattctttggaaaatcacaaaagcccacctcatgggatggcatgcatgtggagtttagtaccaccttgcttattctaggagagggggacctccttaaaagggaggatgccctcctagccacttgaagcatgtgtggtggagagaagaggggaaacacacgcgcgcgctcgctcgcctcgcctcgcctggcctggcagggcagggcaggcggcgcgcgtgcacgacgtacgcgtcgaatggtccgaaaaattggctcctcacccttgcgcagatgcagcctccttttgcagttttgttttgctgcaaattcggattcgtttttgttttggaaacgttccgaaaaatccggtgcgtgcaaacggcgtggagtccggataagttacgcgcgacttatccggttcggttacgcgcagtagagatcgtgcgggcgccctgatcaagcgacccttctctatataaaccgacctgccgtcttcacgcaacatgcgaaaatcaatctagggtttgcctcctactctgtactgcgccgtcgctcgtagactactccatcccgctcgccggcgtgcaccagcgatcgggagagcaggtctccggaacctctgcctttgacgtcctgcaccgggagaaggcggcaataaggtttttgggaagcgcttcgcgcgactgctccctgttcgttcgcgacggctcgccttcctcttcgctcacgtgtttcgtgccttcgtagacacctgcgaaaagtttcgaccaagcagccggtcttttcgtcacctcggtacgtgttcaatatgttgcgcatatttgatctgttcatgttattctgcgtagtttacatgtgtagatctaatgatgcgttcatgctagttttcatctgtaatgtcatgatttatttatagaataaattaaatcattatatgcccataatatcaacagttttatcatctaacaacaatgaaaatacaaattataaaaaattttcatataaaacgaacagttaaagttggacacaaaaacccagagtttgcttttttttttgacggagggagtatagtactatttttatgatacgtcatattctacgagtttaagatgatgggagagtatttgctgagaaaactgtacgtcgttgcaagcgtttgtcatgcgtatcagtatcacagtatatatatatgtgtgcgtatcatgcgtgcaccgttgtgcttgcatgcttgctttccgagcagccttttttttcttttccagtgaatggatcgatggatttacgtgtatgttttctaaactcttaaacaacataattttttaaaataccttttatgtattaatttttaaaatactgttttgaacatatcctttttaatttataacagttgattagtacctcaaataattattacaaatgcattttgctattcagctattcatccattcatggaaaacacacacaatagccagttgggtacttacgcgctctagggcattcctaacccaagacactaaatatagtttccataaactctacatcattaagaaactagtattagacactactcttccaatacaaacactactattccatacttaaatttaatactatttatctcacataatgtcttggatgttgtgtagaaaccatgtctcatgcaagacatggtttccttctctttcctcatttatttacttgccacatcaattttttatcctagatggcagcttatttaatgctatagacaccatcctaatcattgggttgggaatgccctagtgatctgttgtcgtatacacgctgcttatgagttatgactgaatattttttagcgtgattctgctgattgtttatttcttattttattttttttatacaagtgcgaacacacattaattatggtaaactcgtggtgcatataccaactggcaagtagtacagtacagtattaaagaaaattctaaattagttggaagcattcatttggattgcataaaaatggcaatctgtaattgtttttggatccttgcaacaatgaaagatgtgtggatgctaacttcccgttgttgttcgtgtcttagctggcctcatgcatgtatcaattgattggtgcatgctttcttagggcccatctccaattgaggaaatgaactgggcctagttcattttgggtaattggatgcccattttggtggcaaggatttataaggactattttgcattctcaaactttttttaaccaatcaacaagctaccaatttcattaaatatagcatgaaaaaactgtacaaaaggaaagtgtaaaaaaatgtacaagctagtcccctaggcccaggtagcggctatggtagccaagcagtgagattcctaacccccgctagggcttatgtttcggcctcctcctttaccttgtgttaacgaccaaatttggtaatccaaggatcagaggtgagaagaaaccaagatggaattcaagatggaaatcgtcccggaaacagagtaaggatcggctaaaatccgaatcggctacgactaagatcggcagagttcgagtcggacgaggttagccggttgagccgaatccgacaatatgacacggcatatgttgtcggtttaggttgatgtgcttcatgatgattgccacgcatggatagagtcctgagaaggcaattgtatctattaattaggatattttatgtaatttccttagagctatgtttgggcaaaagtctgccgcaaagacttatgatatcttagagtttgttagagataagagtcatgtccgatatggacatattctgtaattctcgggtataaatagaccccgagccccatgtaataaaaataacacacgttcaatacaatctcggcgcatcgccaccctttttactttcgttttgtttcgatgagttcttgctttcgggttgagctgcatcgatttcgatcttcaacaagaggtaaaacttgttatggtggcttgctttctcgggattagtgcttccatctttatgatactctaatcttgtttatgtaattcgtcaagttatcatatattttacataatcttcgacgatatcgttatctaacctacaatcggctaacatctgctaatagaaagcagccaattaggttaaataccgatgttgacttagattatataagatatccaccactctatgacacttccaacggcttgattgtctagatattgtttttcttttcatacttatagctgcatcagctgagtttgatcttatgagtcgtgattagaatctcaatctctagcctgtctttggttgccgattagggtactatcggggtttcagccgatcttatctgatttaactacatttatcttgtatgctttattgacatgttaaatctgccctttatgttaagatcttgttgcatttaagtatattaggctttttgtttgatatattctacttgctttaatatcttagtatatagtagtatcggagtattagccgatacatgctaaatctatttgatcggctatgctatgaatatatagtcttgttgttaatatatatttcgattaagtgatttatattgtctcggcatggcgatcgatctatcccaatcacttaatttaagtatatgtcgacatgaagattatatattgttaatatctacagccgatcgagtagatttagttctttcttacttattaatgaccgctgatcgatgcatatatgacatcggctcaaagataaataatatgtcatcggcatctagccgatcggctatcgtttatggatttaaccgcggtttctttatctttgtttcttgttaattgtaggatcaaatcaactagcacgctagcatatccaaaagcaagttttggacctgcactggagttaagcagatctctgaggcctcgtgttacacatcaacaccttgttgactaagtggggcacgacaactctttgtgttgaaaggtcctttaattggtttctttcctaccatatctcccagaagattagcagtactaaagtgcggaccgcttgttttgacgctcctcttgtgttagcagttaccttccaccattcttgcactggtgtggttggttcctagggtttagctgatcgcacaaatcatcccttctgctagagtcctccaaattcttttttttttatctacatctaactaagaggtggagggttgtctcttgcatctgaccatatagggggcatatggagttgtttcattattctcaaatttcagcaaattctgaatatatccttaaacttcaaaaccaaacactattaatgcctcaacttttcaaacagattattttgcattcctagtttgaaccaaataaaggtggttatagccgattttgcatcctctctcttccattattcttcttccttttccctaccacaactaggataccacataagtgatatgtagcctaaaaccatcctaggttaggccgagagatgcaaagtaatatatttgaaaagttgaggaatgttacttttaaagtttagagatcaacttaagattataaaaaatttgggaatgtaaacaggacttttcactaagaatttctccgtagtacgtacaatcagtttacaatatcattatgacatcttagtacggtacttgagttggttatctctctatccatgattatgaaccatcttataaaatcttatgaattaaatgtcccatagcaaattttacctttagactaaagcttcactcaagaaggcaaatttgttgtcctttttaaccacacataaaacaaaaacacacattagcttatgattaattaagtactacctccgtcctagaagaagtttagagttggacatagttattaagaaaataggcagaattaaatagtgggaggttgtgattggttgagaggtggaggtaagtgggaaaaaaggatggtggaggattgtgattcgtaaaatctatttcgagaggcatctcgatttagacttaacgagtagtagcgttagcgttacagacatgcatgcaaagtagtttttgctattaggttgtgcatattttttttcttcttatgaaattttctcttaaattactcatccgatctataatccgattacccattgtgttcgtaacaattaaatctttacaacaagatctcacatgattatattttgatgaaaaatcacaaattacttttatgatatgtctaaattacttttagatttcactaagttacttcttaggcatacaaaagtaaattcagtaaagcctaaaagtaatttacatatattatagaagtaacttagaacaaaacgaatgtaacttagaacaaaacgaatgtaactttggcatgtcatttgaagtaaatccgttgtagagataaaaacatgactctatctagaaattaaattaatcagcacaaattatgaaattaactaaaaacaataataaaagtaatcacctcagagcattatgaatgtataggaagtattttaatcaaatctaaaaaagtaacttatatatatgataatttgttcaatgaaaaaagagtattaattaaagttactttctttttttataagttacttctataatatatgtaaattacttttaagctttactaaatttacttttgtatgtctaagaagtaactaagtgaaaactaaaagtaatttagacatatcataaaagtaatttgtgatttttttatcaaaatataatcatgtgagatcttgatgtaaagatttaattgttacgaacacaacggtgtaatcggatcgtagattaaatgagtagtttaagagaaaattgtatttgaagtataggtggatggtgtctcttatagatgaagtggtagctagtttctaccactagctgtgtagtcacgtccattgtgattggttgaggaaaaaatattggtggagaagttgttatattttggggaaaaaattgtgggatttagggaaaaattttaagtgctaaaagttgttatattttaggatggagggagtattaaatattaaaaagttggaaaatgaatctaatttattttttagaaatcttctatatagatttttttttttacaaaatacatcatttagcggttcaggaagtgtgctaaaaaaaaataggaagttgtcatttcgagttactgaaaagaactcagcttaaactcatcttaggtaactgtgcatgatatccctgtacgtactagtggcaaaatcctaatttaagtcttgatcccgaaacctagttggttgcacatattgtgtgaaatcaataccaactctcaaatatatgaaagaaataatgcattcacgaagctttttcagggaccatagatacatttcataagttgatcattttcgataatagttctgatgaagacattctccactattacccgcacgcaaagacgcaacaaggggccaagtggtccagttgtagtcgggcggcgaccttgtgagtctctaaataatcccaccttgcttagcttgggaggaggaagccaccttaaaagagagagccacccttccccaattggactagtcttttagggagattggatctttccccgagtgggtgtgcctaagaactgttgactattacccgctggcaaagacgcaacaaggggccaagtggtccattccccgagtgggtgtgcctaagaactgttggggtccggacaaccttaatttgttgggcctcggccaacccccccccccccccccgggccggatcttggggtccgggcaaccttaatttgttggtgtcggtgatatgggcctaggggttgatcgccccaaagccctcgcccggctgccacgtggcggctgtctgagggcttgagcgggctgaagcgccgtccgctaggcgcatttatgggtggcgccccaaccgcccccgtcgcacttaatacggcgtggcaggttgtgcgccgcccgctggtagacgtgcaccccaacccccccgggccgaatcttggggtccgggcaaccttaatttgttggtgtcgatgatatgggcctggggggttgatcgccccaaagccctcgcccggctgccacgtggcggctgtctgagggcttgagcgggctgaagcgccgtccgctaggcccatttatgggtggcgccccaaccgcccccgtcgcacttaatacagcgtggcaggttgtgcgccgcccgctggtagacgtgcacccggtgaccgctttttgaccggtctgtgacccgacgatggatggatgggacaggcggcagcgcactcacgtccgacttcgtgtcagacggcgtaggggccagtatggcatgtcccatcatgtgcagggaaaggacgtgcaggtcgccacctcccatgcgcgtgtgcccatgaagtcgccaagcatttaatagggaatgacggggatgtcccccgtgttaggcgaaagacttcagtggggggccacctaagggcggccgcatggatcgcttccagcccaaggcatgggcgctctttaatgtaggcaatgtgggcccctctcccgggcggagagggtagggacagtgcatgtggtatccccttcacctagaaaaggagtacctcgtcctgcgggtaaaaggggacgactcttgataaaccagattctgggtagaggctggccaagccctagtttgtgcgcccaggatctgaactctctgtaaccacgtgaagatcatcacacacacaggagtagggtattacgctcaatagcagcccgaacctgtataatctccctctcttgtctcctcatcatccacctcgcaagcttgattcccaccgatacacctcgctcgcacaagaatacgttcctaagcattgtacccagtcccctggctgaactcagaaaggggggcctcacagcctcccgctagagaggatcacccctcgacagttgggcctcggccaacctcacctgggccggatcgttatcattaatgatgaggacatcctccactattacccgctggcaaagacgcaacaaggggccaagtggtccagttgtagtcgggcggcgaccgtgtgaacctatgaataatcccaccttgcttagcttcccctattggactagtcatttagggagattgggcctttccccgagtgggtgtgcctaagaactgttggggtccgggcaatcttaatttgttgggcctcggccaaccccacctgggctggatgcatcatttggtatcagagctgggcccttgtttaaaggggtgagaatgatgaggacatcctccactattacccgctggcaaagacgcaacaaggggccaagtggtccagttgtagtcgggcggcgaccgtgtgagcctctaaataatcccacctttcttagcttgggaggaggggcaaccgtgtgagcctttgaataatcccaccttgcttagcttgggaggaggggcaaccatgtgagcctttgaataatcccaccttgcttagcttgagaggaggaagccaccttaaaagggaaagccatcattcccctattggactattttttagggagattaggcatttccccgagtgagtgtgcctaagaattgttggggtccgggtaaccttaatttgttgggcctcggccaaccccacctgggccggatgcatcaagttctatgtaagcaattttaatcaatttgattaaatgacctactaaccaaagatctcaatcgagcatgatagacccgttggtaaatatggtggagacacctaagcacaatggcaaagccaggatttagagattgggggacccattggtaaatatggtggagacacctgatctcaatcgagcatgatagacccgttggtaaatatggtggagacacctaagcacaatggcaaagccaggatttagagattgggggacccattggtaaatatggtggagacacctaagcacaatggcaaagccaggatttagagattgggggtgccatctatgagatgtgggaactcacttaatcgagcatgataatgatagacccgttggtaaaaaatggtggagacacctaagcacaatggcaaagctaggatttagagattgggggtgccatctacgagatttgagaactcacttacggttcgatgaacagtactttgtagcgttgatgcgtggttggcaacttggcatcatgcatgttacagcgattagctacaagagagaacgagaacccatagatcatgattcgccaatttaaaatccagtaatatttttaatatatggatgattgaacggtttgttccatgtttttaattggagtcttgcaatcacttctgaaatgatgaattagttagctaaggttgtgttcggcattgcctgtttccatcctcgtttttcgcgcgcacgcttcccaaactgctaaacagtgtattttttaaaatattttctataggaaagttgctttaaaaactcatagtaacccattttttaagtttattttagttaatacttaattaatcgtgcactaatccatcgctcggttttccgtgcaggaggtgagggttcccaaccctcacccaataacatagcctaagtcattttagaagtcctatatagctatgcagctgttctatatagtttgtctcatctacaactaatggtgtaattaatggctagattatacgggttaatcacccttagaagaagagaggggaggggaggtcgcataagggttggggaggggggtgctggtcctccccggcccccacggtggcttcgccactgcctaagcaaagcatggacattagcacataactctagaacaatagtaggagatgattcctcctacgaaatataaaagggacttgatagagaggaagagaataatgaaaagttatgtgtttcgtactacgtctaattctcatagtaaacgtctaattctcatagtaaacaatttctagatgattttttatgctcatgggagtgtaaataataaaatattactccctccgtctaaaaaaacccaacatatcacttcgatgggacataatctagcacaacgaatctggacagactgcctgtccagatacattatactagattatatcatatcaaagtaatagttgggttttttttagatggagggagtatttgtaactcgttccatcgctttcactaattttggttatgtaaatcgttttcgctctaaacattctgataaaaccaaacggtggaccccagaaatattaactactcaaaaccaccctaaactctcaaaatatttcttgatagaggaacatcaaaatagaagagataaaggacatctacaccgattgtagcacagcacagctaagagcaaggtcaatagtatagcccgctgttggctccaaaaaatagccatgtcatctatagtaagcagtatagctaatgtctacaatagaaatactataacacaaatattttattgtttcatgggacccaccatcttctcctacctcccattctctctctctttctcccatccgttgttccgttcatgtcttctgttctttgtttggttcttgagcaacagagatggcgggcggggggaaaacagcggcagcggacacaggagaccgggcggcggcgggcggaagagggcggcggccgtgcggcgggcgtcggagacggcggcggccgggccgagcggcggaggcggaagaggacggcgggcatcggagatggtggcggctgggccgcaggacgaaggtggccatgcgtcagcgccggcgagggcggtggtccggtggccgcgggagttggcgacggaggcaggcagcgcaagcatctaggcgggccccacgaactcctcgagcggcgcgtgcagcccagcgacaaattagtcgccggctcactctctctctcattccctctctcctccagatcatcacaaaatcttacgtggaaccagtatcgcccgttattgtacctgctctaagctgcagagtgatagagcccaacacaccacgccttgtcctgtcctccttcgatttgctcacacgtgctcagctcaccgaccgccctcgcttcgcttcgcagctcgattcgatccccacccaaaccaatccaagaaaccaccgcgaatcatggacaccggcagcggcggcggtggcggtggcggcggcggcggcgggggcacgagcatccacatcacggcgctggacggcatcgtgaacgtgaactcgctcttcaccctggcggccttcatcggcctggcgtggcgcccctccgccgacgggcccgagctcgccggcggcgccgaccgcctgggctccgcctgcgccgcgggggaccgcgtcgagtccgacctcgtcctgttccacgtcctcgccttcgcctgcttcctcttctccagcatcgtcgcgctctgcctcaagcagatcgtgcgcacccacccgcactaccgcctccggagcggcggcggcggcggatccgccgtcagccgcacggccatgatcaaccgggtggcgctccgcgtcgggatcctggcgtcggcggtgggctccgtgtgcgggtgcgggttcctgatgatggcgctcgtcaacgtcgtgcaggtcaagctcggccgcctcggctgcggcgccggcggcgccgccgcgtggggcgccgtcgtgccgctcgtctcgctcgtgcccaccgccatgctcatctacatcggcatcgtcttctacgccttcacccgctagcccaaccaccggatcaacaactgaagcgcagcaatgctagtattgattttttgcttgtgattttgagagatctagatgatgctgcattgctgccgacacggcgacattgtatatacaactatgcaagtgtatgcagcttgtgtgttcttggagttacctgctaattacctaattaatatgttcgatgttttttatttcttccttgcaagttgatagatttgttgtgatgtgtttggtcaagtaccaagaagattgaagtcatgcagtgatgaaacttgagtgccagctgctggttgaaatgataccagctcagattcttcgattcaggaaatatttggtttttgttacttactctgtcggcaaatgagcttattgtggtttgattcagctgcaggaaatctcactgctttcatcattcatggttctgtttcttgttactctctttaccacctactaaaatacttcaaatgattgaaagaaagaaaaaacaagttgagttacacagctactaaaacatcctggctcaaaacactaagaattgtggcatgactcgaataggatattcaacaggataccaagaaaactcaggcagacccagagttcagagcaaagcactagttctcatatctcccaataatcagtagagtttttttttcccctgttttctaacactatcttctttctacttcttttgagccgattttttttttttggatttaagttaaatttctatctaggtgaccttttctttttggattttagttaaatttcattctcttaaaaatgctctttttcccaacttcctagattaatcctatgctcttttttatttcaagcttcccagattaatatagtttctttgttttctgtatactatatttctcagtatacctgtgcatgagtaaaggcataaccggataagatgtggatgattaagccatccattcataaggttccgtaggttatctgacgtctatctgtaaatcagaatttagaagtggctgttatctgaggtctatctgtaaatcagaatttagaagtggctgtaccactgtagtaagagtttatactacagagtctagaaattttttttttgtctggttattagttgagttggagaagtataatttccatggacatgatatatttactaccttgtctgagaaggatatggtgaaacgaggaaaaactggacactctaggagagcttgatgaaacgagttactttcagtctttcagccatttcagctataacagcaaacaacagaggcgaagcaatgtaaaaccagcacaggactcggacttgattagcccaaaccaagatgaccgaatttattcgacaagagaaacaaccgaattcaatatacatccaatcttctaaatcttggagctactgatttgcgcatatggaaggctaagcactatgacatgctgaaactttcctgattttacaatgaatcctgttgcattctaaacagaacatacgacctcatttattttggagctctgcagcaatgcaattattggtaatagcatcacatctttaaatagagacggagcaaattcgacaaattttgggagtctatggctggcaacactccacatcgctgtgaatgataactgcaataaaaagaatagttcttagaagcatgtcatctagtcgtaccattgataatgtaactatgttgaccatcggttactcaaaagaaagtccttttccagaacattataacgagaagagatggctacatttaccaaaatcacattcatatgtgagaaatggaaatcacctcaccatgaaaataagaatgccttcacctcattgacaaccggtcattctagcccagtccacaaactgcattcctccataaatgttatttgcaaagcgcacaccgacagtgaatgccagagaaacagctgggacacgcttggcaacaggtgaagcctcaaccacacgctcaagcccattaataatctgataacgggtgttggaagacacaccaaggaatgcacctgaaacattgagcacgatttctgtttagggagcatcaatatatataatcaagtatacttaaaaggtaccgtaaatgtaacagaaataaacagttagaattctttgaatcatgcaaatattatattgtgagcagaacttaaaaacttttgagttagttagcatatagcgaagatacctaagctcagaagtactgcaggttttggctagaaacagaatcttaacgattggcaatttcattcaggcccactttaaacaacccaatagcagtatgctgacatggggaa

SEQ ID NO: 15289 - DNA, 2119 bp, Oryza sativa
tgcatgattgcactgaatggggagattgcaccggatacttccccatgctgacattagcttctacggacagcatggtcaaaacacataaattacatggtgtatatcaactatcaagcatagctgttatataatactatcatgctattggttaggaaaatcatgtctaatgccacatacaaataagcacagtaaatggtttctcatcttatgatacaagttattgcagacaaacttacgttgaaaacagaatatatatagcacatataaagcagctttgaaggttaatccacacattgccatatcatatgctaaccacaaaacacaaaactaggtgaaagttaactcttatgttcattgtaagaaaaataaatatgaaccccacaatgtattcattacatgcatgactacctatttatccacatcctcccggtacaaaaactaatttgttttagtatactgcacagcaacagaggggaaaaaataatgatatagacttcaaataaaacggctaaacacaaaaatacgcttaccccacaatgcagaagttttgagcagaggtgggacaggtacatcatcatctgacttctttacactcctgaaattcaaaggaaaataatatattcgagatgcataaagactaaacagtacaaaaatacaatcaggtcaaaaacatattctgcatttttgggaggaataatatgagtgtatcatgtacatttaaatcagaactcaacttagatatccagcaaccagcatttgaaaaggattagtataacatccagtgtcgattgtcaaatgtaagaataacaactaaatgaacttgtgcacagaaattgacttgcatatttgatcttacgaacttctcaataactgatgtatgcatcacagcaattaataagctttgatagaaatgcgttggtgttaatatgagcatttgcatatgttagtgagattgtttttattagtaccattccagattatgaactaataattaagtaccaaggggatccatacaatgtatatgattattctgttaaactctaattttgctcatgtcaatatgtgatacatcgtgatctaaatgttatgatggataatcacaaaatgcagccgcatagtaattattaagtcttcctatatctcctgatgatttacagaccttgtctgaggctctgagccctctacttagacgcataacaatttttcatgttactatcaattgtaactagagaagtatataaatataaccttaccatgcatggaattacagtaaaatatgtcaataaactaggagcttaagtctttcgttttcttagcttcagggacatgaaatgttcttgtttttacacccataaaactggtcaaagtaccagaacataaagaaaagtgagataccttttggcagtcattatcaagttcgcaattccttgacccacaagaccacaaaagaatccaactgtaccatataaaataccctgttcgcaaaggtattttagatattagaatatacaatataagtcagcatccaaacacgaggtgaaattaaaaaagagatgcagcaaacacaaaagaaaattaccttaaaaaagtatgttcctatccgttgttgaatggaaaaactatatcctggcctttcagcttcaaacacgctgcaaaacatcagtttcatcagcattacttaggacagatggtcagatgcactattattattttttactgaacaaagttctcataagcagatgtaattaacaaattctgtatggtgtttcaaaactaagagctaacatcaaaagattcaatctatttttggtaatattgtatttcacagcagttcaaggcaattaattgactcattaacatctagaacattttgaaacatatgttacaaagtattcagtgccacagtataatatagtccataccactcaaaagtagatgccattttagactctagtgcaggaactaatgtatgaagtaataaaggaaaatggcagtgatcaaatatgggaagggtataagcaaggatggggctcaagttaaaattctcaagaaaataatagaatgttctgtgtttaaaaacaaaattagaaggctaaaatgagatgtatttgaaacagat

SEQ ID NO: 15290 - DNA, 1206 bp, Oryza sativa
aattctacacacatcatacacaagtccaagtatctcatcatgagtgagttcttaacaatatacctgcatgtccaagtatctcagcagcagtagcttctgaatcccgacgctctttgcggcctcaatcatatccgcgggcaagctgggcaagctgacccctcgcttctccacctcctggaccacctgatcaaaactcaggatcggcccaaactcatcatccccttcatccccaccgtccccaccatcaccaccaccgccgccaccaccattatccccatctccgccgccgccactggagggtaacttcccattcccacccgagccgtcaacatcagccacctcgccacgctcccccttcgggagcacgctcggaggtgcaaccgcgccgacctccttcacgtggtcagcaacctccccagcatcaggcacggcgacggtcgaaccggaggtggtggcgccgccgcccccatccgcgcaggcccgcggcggcagctcggcgcggatccccctaacccccagccccctcctcccgcccgggtagaggcagcagccgctccgcctcaccaccgcggcgccaccgccaccaccaccaccaccccggcatttccccacgccgacccgcccctgctgcagccgcgcgcccgcgcacgagaacgccatgctcatgctcgcccacccacgcaccactacagaaatggtcagattggattggaaatggccacaaaaaccgcaaaaaaatcagagaaaaaaaatcggagaagcccgcacctgattgcggctcgacgaggaggcgacggatcgcggaaaactccgaacaaaatccggtgaatgattaggttcgatttatcgtgggggatttgagcgcgaggaggtgaggcgtggaggggttggtggaggagggggattggtggcgagtggcggcggcgcggcgcgaaggaggaggggagcgtgcgtgcgtgcggatcgtgaggtttttcgggggcgttttgtagcgacgggtgagaggcgccgcgtgtgaggctgtcacgtggggcccacctccggcgaggcgtcgcgcgtgaggctgtcaggtggggcacgtccccttttttgttgccttgtgggggcttcggatgggtgggtgacaggtggggccaactgacatggaggttttgcaagtgggggtttcttctcgttttggctgacttctggtcaaattgcacacga

SEQ ID NO: 15291 - DNA, 2185 bp, Oryza sativa
ctgatggaggttgaaagcttctaaacttgtgatggtttagttaattaggaaggcttgcatttaaaattgctccatgaaagcttcgataataattaaattatatatgtacaaacttagtaccatgtgtgtttgtattgaccttatcgtttttgcaaaatataatagattaacaataagtgctacaattattttatatcactagctaaatgcacatgcgttacaatagagttgtaaaagagatattcatctttataaaatcatttctcattgtctattcatgaaactatactttcatcaatcaaattttattggttagctataaaatgattgctaatcatcatcataatttaaagttgatattaaattttcttacagatttctttttacttttatagcctggttcttttttatataattgataaaatggcatgtaaaatgtctaactaacatttaccgtatatgggcctcactgtcacactgggcagagggtgatggcagtagaaccaccaccatcatttgtgtctttcataggagtatatataaaggacactatactactcctctcgtcccaaattataagtttacactggcttcaatgacatgctttgacctaaatttatttcatgttatgttatcaaacacctacgaaattagtatcacataaaattattttaaaatataaatctagttatataacatgcataatacttagtataaataagctaatgtaattattagtgaattttttttaagtttgagttttctaaaaataaggacaccctataatttagaacagaggagaagtcacagaggagaataacagaagcagtttttcagtgtttggcaaaaaccaatgttagtatttgcactattgttacaccatgagttgaggagaagttagagatgaagaagtattgcagacagagcaattgtaagcatggaaggtacagagaacataacactgatagcttctgaagaatctccatggccatgggggttgttttttccctcgctctctttagcatcatcaccctgcccaagatcaacaaaagaaaaatagttaatgaactaagggtttcttgaagatatccatgaaaaatttccattactatagaaattgaatatatatgtctatgaaaattcaaaaggatgtcgaaataggtggcaaagagaaattatcaagcgtgcatctctctcattttctcaatggtctcgtttcgatgcagtccacgagcatggacacatggatcatgaatgaataatgcgtgtacgtaccgcggcttccgtctccggcgagtcgccgtcgccccccggcgtcgtcgtcgcggcggcatcatccccctcttcctcctcctcctcctcctgcaagatgcgccacaaaggagtttcacaacgatatgtcagtcagtgtcggcagccacaaaaaccatgcatggtgatggcgacaatgagcgtcgatcgtgtcgagcacggacgcgcggcacgcaccggattcttctcgtcggccgattcgccctccgatggctccggcgaggccgagccgtcgtccgacggtgccggcgcggtggcttcgtggagaccttcttcccaccgacgacggcgcgggcgcactcgcctcatagccggcgcggcggcctccgactccgagtcacgcttcgtcacggcggcgccgctggcattgccgcccttcgccggcgccggcgccgacgctgatgacttcccctgcattacgcaacaacgttcattgcactcgccggcggcgcggcgtacggacggacggacggacgtacgtaccgtgtctttcatgaggccgacgtcgtacatgggcgtgaggtcgggcttgaagaggccgaagttgcgctcggcgatgggacccggcttgaggttctcgttgaagagcgcgaagatgtaggtctcgaacgtccgcttcggcatgagcggcgtccccgaccccgagctggcctctccgatgaggtagcggttgtactccgccgcctcggcgacgctcacgccggcttgtccgggctccgccttggtcggccacccggtctcccccaccgtgatgtccacgtcctcgaaccccagcttcttcatcgccgagaacaccgagtccagctgcgcctcgagcatgctggtgtaggtgatgcccgtgcccgggtcgagcacgccggggttggggcgccgc

SEQ ID NO: 15292 - DNA, 3469 bp, Oryza sativa
atgcgccggaagcgggcggcgacgagcgccgccctgagggtgcgcatggccgggacgaggccgccgatgagggcgttgtccgccgtgttgatgatctcgttgccgacggccacgagggagatgtccgtcgccgggtagtacggcgcgatgttcgccgccacccaggcggcggcgccgtccttggtgcccagcgtcgggatgtcgccgtttccggcggtgaccatgaccgtgatgcccgtgccggcgaaggccttgacgatgtccgggttggtgtcgaacagcttcacccggtcgatgcgggtgcggttcgcgaggaacttcgccacggtggccggcggcggcaggttgtctcccttggtgccgtagttgacgccgattgcggcggcggaaggcagaaggatcgtgaggaggacagggagaacggcggcgaccgcgtccacatgccgtgacggcggcgccatggcggtgggggaggacggcgcgcgcaatctgactccggtcgaacaggtggtgacgagagcttctggcttttattggtgcgctaattatagcactagattattagctagccaataaacaacacgtattcaccctggcattgattgctggaaggaagggattgcttttaatagaagtttatctatcagggtattaaacacaaggcaccgaaatgccgttgatatcattattgttcgaattaagaaatgtccattatcagttcttcgcccccgcgtcgtcctccctcacggaagacacaggaggtggaaaccaccaccgtcgcccgctccccccctccttcctcctccgcctcgccgccgcccgagcggccgccggcaaagccgcacggccgcaaggatggtgatggaggggcttcgtctcgtctctccctcccgccaggggtgggggccgcacgggacggcgaaggccgcccagttcgaggccatcatgaccggatctggcagggagaccgccggcgatgggtcagcgtggtgaggcggtggcgattggcggtggtggcggcggggatggaaggcggcggcgaggatggtaacggcgggcagggctcggtcgctccggaggcggacacccccccccccgagggccgatccagtgcggggcaagctcacggcggtggtggggctacgggactcgcggcgacggcgtcggcggcgatggcgtcgagcacgtcgcgacaacgacagtggcaacggcgtggagctcgtggcgaaggtggtggtagcggctggacgatggcgacagcacagtggttggtagacggcactgccggctgctgtggcaacggggcgcactcacggcggcgacaacggcgcggagctcgtggcgacggtcgcggtagcggcgaggtggccatcggcagtagtggctgcaatggtggtgaggcatggcggtctcggaaggctagccgggggcgtggcagacggccgcacctggccggtgcggcagtgattggaggggtcggaggccggcttggcgtagagaggcacggctgttggcagtggaggtcggcaaggcgcgagaggcatggccggtggcaaggaggccggcatggcgtgagaggcacagccgatggcaggaaaccggactggcgcgagaggctcatccggtggtggaggaggacggcgcggcgcgatgaggcacggccggcggtaaaggaggcgaccacgatgtgaggaggagctgcggggggtgtgacgcggtcttcggcgcacgaaggttggccagcgggaggcgccggtgcagtggtcccacatgtcggcagaggttgagcagtggtggagcatcggtgcatcagccgtggacttggaggtgagcggcgagtgaaaacctagcccggccttgcccggaccgacaacaatggtttccccctcctaagggcgttgtcgtgccgtctcatccctcaagggtgtttgtcgggcaaaagcccaatcttggctcttttgagtccccgacggacagcgacggcggttttccgtcgcttatctccttggagacgtcgtttaggcatccccttgtcaaaaccactcgaacgattggtgcaagcacactctagatagagttggctttgtgtaggttgtaagggcttttgagcattctcgtctatgttcctttgttggcctagcggcggtcggtcacgcttagccgcggccggtccagtgctagtcttctctcggacctgtgtgttggcgctgtcgatgtgtatgtggtggtatattttttcctttttcctgattaagaccttctagggttgtaatcttgtttttttttctgctctatcagtagaacttcgcaccgtcttgtgcgagtcgttaacaaaaaatgtcctttgaagtaaagaatcagtgtgcctaaaatcaatttgtttgaaaaaaaactcattgcaattgaaattttgttgctaggagatgttgcattggatttttttaaacccttttcatctcaatttctaaataagccttccaaaaaatttatgtacatatatgaatctgggaaactattttcatcccttgaggggatgtctacttgtttacttaaaaaccatccaaacggatatgaattttttttgcagcactcgtacaacatatctccatagaatcttaggtctaaactcaactcacaaatcaagatataaaagagataaatttaacgtatgaatagtagtgtattgtccacatctaaatttgttttttttctcgatgtgtagctcgaatttgaacttgatttttggggtaccatagatatcactatgttctacagtggaaaaaagtttagaatttttctacaactatttgtatcaaatttaaaggaaaaaaagtacacaaatgacattccctcgagggattagaatccactctctatgaatcttcaagatatgctatttttattggtgtggcaggacaacactcccgcacccaagtatgtaaaacattgttgtgtgtttgtcgccacacttcatgatgtacttcctccgtcttaaaataagattatctttgctccctcttatttatctcaaaataagttcattttttagaaatcattacattggggtttgtgaaaagtatgggacaaatgcattggaattggttaaagtgaggggaattgataaagcgaagagtattatttttccacttttatactagaatgtgtgggttagatgaaaaataagcttattttagaacgggtagtagtaacttgccaaaccattttggtggatggccacatagtttattctataagggcaagctcaatgtatgtgcaacgatgaccgtaagggtggggcctaatgcaagtgacataagttagtaccaactctacaacagttaaaggttgtgaaatcgaatttaggtacccctcgggttcatcacccaatgaactggtgtgaactgtgaatcaataaaaggatcctatgttattctcttatggcacaccttaatgttaaggtcaatctttg

SEQ ID NO: 15293 - DNA, 55155 bp, Oryza sativa
aaatacgcagcaatgttcataaatttttgactgaacgtagtgatgcagaaggcaaatgttaagttcttatgcttctgaaagcgttctatcatccatgtgaatgttgcacgatatggtatatctagtctcaatccttttcgagtagtactctactatgtacttgcccataagaattatttccataacctcatgccgattttcttatcgtatatggagctttaccgtacatactggcatattctatattccacgactcgtacaccacccgtagtagaattttcagtatatgtcatcctattcgcagcactttcagctgttgccacttaattcgtaacaccttcagaacataccaccagagacgcgaattgttttattccgtgacactccgtccatccgatgccgcacccgtcaattggtccgtgcaagcgctgtcgttcgtccatcgggcggggagcagctcgctcgtcccatcggccgacgaggtcctcccagcgctccgccggccagcaaggacgtacacacgcgtatctggctgccgtcgagcgcagccggccgccgaggtcctccatgggtggccgccgtcggcgagctcctcctcgcgtaagccatcagcagtcgatgtcttgcccagcgtacgcatccggtcgccatcgagaaccgccagctaccgaggtactcccgatgggctcattgggatgttcggccgccatcgacgagttactcctcgcgcacggcattggccggcggggtcccctcacacgcagcgtgctggccgacgaggtccagtcgtccagccgcgtcggtcgcttctccaatgcatggcctcaacatcctggacattatcagcgagcatgcacacattacttcatagcgttcatggggtgttcttgcttgtgagcatgttgttcttgctcgtgaccatggtcagaggcgacgcgatatggggacgaggagggtgctagtgacacagggatggggccgttgggtgcgtgctgcgcggccggagcggcgagtgcgcgccggaggagatgaatgccctcgtcggcagcgcgggaaatccgactccttctttgtccacttcgacggcagccgacgccgcgtgcaggaaggaactcagcggctggcggcgcacgcggggaggaccgacaagctgctccccgcccgatggacgaacgatggcgcttgcatggaccgattgacggatgccacattggatggacggagtggtacggaatgaaacaatttgcatcctccatggtatattctgaaagtgtgacgaactgagtggcaaaatctgatagtgctgcgaattgagtggcatatagtgaaaattctcccctacaatggaaactattgtaaagtggttttttattttagctcctacagtcttacatgtcagcctctgctaatttttttattttcagataactaaaacttttatacttcacaccctataacaataaaaaaacacatataaaccctatactcctggtagttctactgtgagcctctcactttcattgtccttacccatccttgctcgctctcctcacggaatcccccactgttggtgctcttctccgcctctctccctcttcattttttccaccagtggtgccgcctctcccttcgctcttcccgcaaaacggaccactatcggtcgacaagctcataggccgagggtgacgagatcggagcggatcgaggctccttcccgaccatcacggcgggatccaggcggcgcaaattgaggcgactccatcgcctcctctccttcgtcgaccatcgcgtggcccagatcaaggtgactcccttcctagctgccatcgtattctctccttcttcggccaccgtagcagccctattgaggcggctccctacctggccgtcaccatcacgcgaatggaggatggctctctccctaaccgtcgttttctcctcttcttcttcggccgttgccgtcggcgcagatctaggcagctcccaccccatctgccgcccctgttgttcgcagcgttttccgacggtgacctccagattcctctttttttctctggtctaagtctctaacaggattaccaagatgtcagggttatggataccatatacctaatagtagttgactaaatctcggcaggacccaccacacaccatgtcttatacggaaactgacttcagatatggaggcagttttggataaggaaagacaaccagagttctacatggaaacgacaaggactactcggattgtatccattttggtttccctagttctacttggaaatgggacacctatgggtataaatacaaggccctctaggagaagaggggacacgaccaccacaatcaacatacacggaacaatagatcaaaccacaagatcaatatacaagtcaacatacgccaagacaagatgccagatatcgacttcagggataagcacagctagtctcctacggtgtctccggatactgtcaggagagatgaaagcgctatctctgatcttgccgggcacggattcgaggaggaagactactctgttgtcgacttcgagtcagagcttcagaccgccatgtcgacaacagttagataggctaccccaaatattgtactggtatgattatggtgaataaagagcaacgaccggctccggccaacaggatgtagggttattacctgacaattcaagggctcgaacctatataaaaatcctgtctccatctattttacctcagtctcgcatatatcctagtaccaacaatccccatactatgcaaataccggaatcgcgacatcaaacgtcgacagtggcgcgccaggtaggggggttttggtgcttcaggatttggacgagatgggttcaagagatggattctccgacaacatattactcgacgagatctccgaaccatcttctcgtcgactacaagggaaagtgctcctcgcgacgccctgactggtcggccctacgttggttttcgagagatgcagacatatacagcaggaggacggcgcgccagccacccgccatcttgcatgtagctgccagagatcaggaggacatcagcacgcggaagacagaagtcgacatcgatcgattatcatgcatatcactgtgcgtgtgcgtccagatcctgtccatgagtcaccgagtcggactggtagccaacagatgtctgtacacggcacttgttggtaaaaaccaggatatacactcgtatacgtgaccagggcacgtgaaggagttacatgcacgtggcttcttgtctacttgttgatcttgatgctcagactgtaaaaagaaaagggtaattagtggattagttttttgaattaatctactaatttcgtagatatctacacaggtacgcaatattttatatgcaatgtactgtacttatttttcagataatataatattgtcagatctataatttattatgtttacctagagcatgttttttatacaatctctgttatacgagcgtcttcaatattagaccaccgcggtctaatactgggggctcgctttattttcttctgtataaatcatgcttgttcacggtttatataatgcttgatatttaatctgctcgttatatcctgataatgctagaagatccatacagttattcgagtacatactcgatattctctgctatatgtcttgccttctagaaaatatttttcaggaacaattgagcacatgagtaggttgtcatcgagtacactccattatcgagaacattctcgacaaatgcggagttatcgcacccaacctgccaacgaagaccaacgacctatctcatagcaccggccatggctggaatagtcgagaaaaggttgttaacggataattcctcgcgaatgtcgtcggcttgattgcccgacatgattgcgaacagatatccggatatgctataagttgggtatgtgagtcatgctggccacatgagatgcacatgtaataaaccaactctagcgtctccattggtgttcgagagataattctactcgctcgctggttcttgaaccagtacgtaacaatctctcacaccgcaaacttccattggtgttcgagagataatcctactcgctcgcaggttctcgaaccagtacgtagcaatctctcgcaccgcaaacttccattggtgttcgagagataattctacttgctcgctggttctcgaaccagtacgtagcaatctctcgcaccgcaaacttccagtggtgttcgagagataattctactcgctcgctagttgtaacgccccgattttcgttcgggattaaaaatcgtttaataatgcattttctagaaattaaataaaagttaaaacaaattcatcaagtgaaataatgggaggattaaaattttcccttgaaaatcatcggccaggaatattttgtaatattctttgtgccctaaatattttctaaaaatttcccgagaattttcggagctcgagaaataattttaaaagtcacaaagttcatttaatcaattaaaataaatagaaaaaccaagttaaatctcccctccttcactttgggccacttccggcccaaagccctccttccctccccacgacccgttccctcccctcttccttccttcctccttgggccatcgacccatcttccttcccctcgcgcaaagtctaaataaccccctgggttctcctccctttctccgttcccgacaggtgggcccggcaaccccacctgtcaggcccttcctctacctgcagtctctagagcagaagctgccatggacggccgttgccgcccacgtcgccgccgattccgggttctcccgcccgcgccctcgcacccaaaccacatgaaatcggctccccaccatctcctacacattttcccccacttttccccaatttttggcgccaatttgagctccacttcacccacgatgtcgcccacgtcgccggtcggttgccgcctgattccacccctctcagccatgatctccctcccccgcgcccataaaaaagatccccgggctcccctcctccgtttccccctctctcccaagctcccccatgcccggaaccccctcctccccttgaggccgtgcgccgccgctcgcgggagctcttcggtcggccgctgctgccgctcctgacgtccccgcgccacgccgcttgcgctaccgcgttcgccgctctctgccgcaaccctgcagccgctccattttccccaatagccaccggaaagccgccccaccgcgccaccaacctccgctgctcgtcggcgtcgttcagccacctaccgccgccactctagctgcgcccgtgctgtgccactaccactatcggcatcgccgtaccgagctccaccccggcatccactcctccgcccccaaaccccaccgcaaccacctttccacctcacatcccgagctccaccaccgcctgtcgcctccagccgcgcacctccatcgcctcagccgtcgccgcaccgcgccgcctgcgccactcgcttcgcaacgccgaggagcacctcggttgctttttttcatcgccggaaccccaccaaaacatgttttccgtcgccggtgagtcccttctttctttttcctcttcggccggccatgctcacgccttctcccttttccctaatccctccaatagcttccccaggtgtagccgcccctcggcctcccctcctccttcgtcggaagccaccgaatcgtcgccgtcatcgtcttcctccgtgccggctgctgcttccggtgaggatccctcctcccccgtcccccttcctttcctgtcccccttcccgccgcctctcggccgcttgccaccattccacaccgccagtggccgcgcgctgcccatcgccgtcgttcggctggccggctttgagccgtgccgtgccctagccatgctgcctaggccgtcggtcccgtggaccactcccgtggtccgggtccacggtgctgccccggccgcggtggaccgagtcaaccatgcacccgtccccattgcccgctgacgtgcggggtccacgtgtcggcgccggccgctcctttctgacgttagcgatggtcttttcctttgagaaaatatttaataattgcacgataaataattaataattccagaaatccattaaaatggctcaaaacttctaaaattcatatctaattcattcgaactccaaattaggccattcaacttgcaaaattcatctaaaattgagatctacatgtttgtttactttttatgtactgtttccttgttgtttatgagagcttttcctcattttacgtgccagcgtgtagaattcgctgtttcggaagttcgcggtcgcgaggataagagttcggaagattgcttgaagaagcaaggcaagtcatacattccccttgagcattttgatcctactttacaaatgttttaccgtttgcaaataaatatgaattgttttgcttattacatgggatctgggtattacctatctgctcgcttgtgccatgtttacttgatatatatcctttgtcaaccgtgggtaatagatcgactagctcatgttacttatgtgacatagctagaactatatgcttagtcatgcttaattaccactagctcagttgatgggataattgcagtattagacctttttagtatcagaacgagctgtgtgctcgagacacctgaccatgttgcattggtcgtaattatccaactaaaatgcgactgaatggtgggctgtgggtgcatggttttgctggtcgcatccatggcaattaaggaccggttcacgggaaaccctggaagacttacagtgcttaacacaagcgggagcgggtaactgcttaatctgaagtatagctcgaccctttcctaggcaccggtggcaagggtgggcgtgatggagttgggtcggccggggagaccggttgtccagctgccggattcaccacggcgcacgaggggactgcccgctgccttgcgaggagtgggggtgaaaccttagcgtggtgtggatggttaggggagggttatatgaagggtcttgtcacaatcactcgacgtggtgacatgttcatcatgggcacatgatgacatggtgacatgccggtggattgtgtcttgtgggtacagttgtgcacctctagccagagtaaaactattcgaatagccgtgcctgcggttatgggcgatcgaccagattcaccgtgattagtctcacacttaataaatcgacccaatgcactgtagttcaagtgggttggttgggcctgttcaacgtggtgtagcgttgatatgtggagatttaatattaccttaattactcaactgttttactattttgctcaatgaaatgttttacaactgcctttacgcaaatagccacaagccattcttgtatccccttgcacgtttgcatcattggtgtggcttgctgagtacggtggttgtagtcagccttgctattattcccccttttcagaagtgtagtacttctgagctgaagacaaagttagaagaccaaggcttagaacccagttgagttttgcctatggagtggagctgaagccccgctaggatcgcctttttccgctgctgctgttttcttttggtgtgaggactaagtgcctcttctataagtattttacgctttatttatgtttggaactgtttattatttgtcgttttgtgtaccctggctggtcctggatagggatttaatacacaaaatagtctggaaatttgggttaaatttctgggcgagacactggttcccgaaccagtacgtagtaatctctcgcaccgcaacttccattggtgttcgagagataattctactcgctcgctggttctcgaactagtacgtagcaatctctctcaccgcaaacttccattggtgtacgagagataattctaatcgctcactggttctcgaaccagtacgtagcaatctctcgcaccgcaaacttccattggtgttcgaaagataattctactcgctcgctggttctcgaaccagtacgtagcaatctctcgcaccgcaaacttccattggtgttcgagagataattctactcgttcgctggttctcgaaccagtcgtagcaatccctcccaccgtaacttccattggtattcgagagataattctactcgctcgctggttctcgaaccagtatgtagcaatctctcgcaccacaaacttccattggtgttcgagagataattctactcgcttgctggttctcgaactagtacgtagcaatctctcgcaccacaaacttctattggtgttcgagagataattctactcgctcgctggttctcgaactagtaaaacgtagcaatctctcgcaccttaacttcagatggttgaggaacagctacgactgatcttcgaccgacagcatagtggtcctcgtaccacgagtcgaaatgatcgagagacacctattcactggttctcaaccaattaatcgtagcgatctctcgtacatctacatctaatggtcgagttacaactactacctggttctcgaccaacggtgtagcgattctcccactatttccactttaagtggtcaagttacgactactacctggtcctcgaccagaggtgtagcgattctcccactacctctactccaacaaaactgatatcaggtacataatatcgccaagtgttttacccagagatcccttaccacgacgacacctagcgttaaaacctatcctactgttcctttacgccgtcttgacaaggccttcgagtaacctaagggaacttcggctggggacgcccagagccgataaggccttgtcagagcctgtagagacaaaagaccatgtaagatctggtcgtgtaagagttctcgccgtgcgtattaaccaagccgtgtaatcggaaattgagttttccaacttcatggctgggggctaggatcagtgcttgttcaaccaaggcaggtcaagggtccaaaagccttctccttcgagaacgattctctgacgataaggctgggggctaggcagagtgtatgacttaacaaactgactgatcgaagtcggtaagagagaagacgctcacatacaaaacattggtctgtaaatttaattcattttcagttttccatacatattataacatgtcaccctttgagcattcgctcgggggctatttctatctaatattcttttctgagtattaatttcaggaaaattctattcgacattgttgaagtctccatgtctctatggttttataccaagatcgactaaggcgagtacgacaaatgttgacaaggctccatcgcagactctgcgccttctcgatcactcgagaacgattggtggatctcgacaaggaatacggaatgaagagagggtgtacccgccgagataaaatttcttgatttcaatccaaattctcgattacagcaagacaagagacttagtcgtatattctgtactttcttggttgacgttggagattgactcagacaaaccctttaggtgcccgcacgaggctgataaaggaagtctaacattatctctgaactcatcaagaacagtcacgtgagcacgacaacagttactctagggtctgcggttgagaatatgaatttgttcatttgcattgaagtcgggggctactgtcagggttatggataccacatacctaatagtagttgactaaatctcagcatgacccaccacataccatgtcttccgaactatccgagaattatccgatccgaaaagtatccgtatccgtttttgtccggagcggatggaaactatccgctccgttttcatccctagctgtatagtggtagcatgcttttatcctcttctttgttactataactactgtagctgatggatttttttttcacttgagggacatcctatcgtttgtccatgtagtataaaagtcatcacaaaatttttaaacgattgataaaatagattaatatgtaatatattattatacaaatatataagttttaagtacgacctatataattagagtttttttttaccgttcagcactgagagacgggaccaaatactgatcattgatcggaccaaatccaacggctgccagtgtacagtaccgcgaggtaccacttttgtcccttatctagtaccgtacggtgaagagaggtgaaaaggtaagatagtaatttcgcttagtagggatggatgaggctgaatggatgggtgaggggttgaggtgggccaaaaaaaaaaatcctagaataggattggatcgaactcgccgctgctatgtttatcctccaccgccgttcccctattcttcttttcttgctcgtcatctctctttccctcgctgccgcgccaccattttgcaccctgctgccgcggcgctacgaggggatggaaggggagaagcggcgcaaagggatgggtggcgtgcgctgggaatgcgaaaggggatggaaggggagaagggcgcacggggaatggaagcagagaagtgacggcggcgcgggttgggaagggcgaaagggcgaggcagcgcacgctaggaagggcaaaggcgtcgaggcaaccaccctaacttcgattcccatcatacccccaatgaattgaacagtcggatttgttttggcacctataggttgtaggtactagtactaggcggtactttttgctggataggaacaaaactagtataactaaaataataaaaaaatagatttgactccaaattacatgttatttttaaagttaaattttttttctacttgcatgagttgaatttgaatatgtatgttgtgtatttttgtggacatccctttcaagtaagagaaaattcccaacataccccttaaaagtttcacaatttcttctatacccctaaattttgtcccattcctacatgccattgagttttcattttgatctcctctatctctattccattagttgaccgtgagttgatcgttagattttttccaaaatgaccatatcgcccatttcccatacttacatgctatctatgtcagggttacgggtaaggtataccctttacccttcgatatacgtcacatatcgatatggtatacctgcgcgtatacagacgttctctgcatacattaaggaaattcatcatggagttcacagatggaaggagtcctactcggacaggactgggtcgtcactgtatcgtgcaaggtccgatgtctccgagttctacttggaaaccgcctgacctgcgatataaaagggaccccctgggaggacctaaggcatcgaatctcatagccaacacatccaccacagcctacgaagtcggaatctacaggagccaagtcgtcgggagatttagtcgaaccagctcgattacgatctcgccggtatcattgagttccattgttccctttgtaacctgtgatttccatcatataatcccatatcaactggattagggctattacgtatcaaggggcctgaaccagtataatctgtgctttttgtctgcttgatgtcgtattacgtagatcctcgtaccagcgtaccacagtacccactatatccggtatcccccatcgacagtggcgcgccatgtagggggccttggtgctcaaggttctactactatttcatctagcttcgtcgacaacagcgtcaacaccaacctcgaccaaggagttcctgcttcaacaatgctggtgtgtactcaagtcggcgaaatcgtcttcccgatttacaccacggtgccgatctcggctggtccatcagtgactggaagcgagaacacagtggctacaacccaggacgacttcatgtcgaaggatcctcccgccgaagcggagaacggaacgtcgacgacatccgagcccgagaaggatcctaatgcggccaaaccttgtctcttcaacaagaatcacgagccgacgaggataacttccgaggtgataaggtcctggtgccctatccacaaaaccagaaaacacaccttgcaagcctgctgggtttttctcaacgtacatgccgaaattcgtgcctgcaaagagcgtggaattcagcgtacttctccaacccgtgatatctattgtcctatccacaagacaaagaatcacgacctctcaagctgcaaggtctttctcagcgccatgaagacggcgcctcctaaggtccagcagtcatgtatctctcctagggatgcggacaaggaacaaggagcgacactgatctcggatcgattcgttggggtaatcgacatcgatcctcacaagccgtcagttctacacttgctcgaagactatggctcatcatcaacaagtacgccacgcgaggtattggctatcgacaggactagcacgtcagcgcgcgctaatgcggaagtagaaaatcaagtgactacactggcccagcatatcagggccatcaacgcaatactgagggaggccccctacgatcccgttctgaacgacgatctcgcacggtggacagaacggctacaggaatcagtaaccaacctcagtaacgcgtttgaagaggccgtcgctacagcgcacccggaacagccaccaactggtggtgctaatggcgaaaaccctgaacagcgggaatcgcctcatcgagccacccctccacctcgcggcaccggcgatctccgcgatcacctgaatggccgccgagaggcacgacgcacacgagacaacgggaaccgttcctgacatcgcgtctcttcacgacgtcacgataacgaagaacgaggaggccgctcaagtgaagaccgagaccgtgataaccgccacaactaccacgatcacgacgatcgcgaatggcgggtgccgggcgatacaggtcgaggacgccgccataatgacgacgacaatggagatcggcgctgggacaacaacgggaggcgacgacaggattctcgagaacccggccgacgcccttgtaatcgcacaccggagtagatgacaacgcgttttcgaattatttgccaactgcattgaaaggctctgcacgttcatggctgatgcatctcccgccctactcgatttcttcgtgggcagacctgtggcagcagttcgtcgtcaacttccaaggaacttacaagcgccacgctatcaaagacgacctacatgcgttgacacaaaacccaggtgaatccttgagagattatgttcagcgctttaatgagtgcagaaatacaatccccgaaatcaccgacgcttctgtaatccgcgctttcaagtccggtgccagagatcgctatactacccaggagttggcaacgaggcgcatcacaactacttggagattattcgagattgtcgatcgatgcgcccacgcagatgacgcactgagacgcaagaacgacaagccgaagaccgcaggagagaagaaaccagccaaggacgcacctgagtcaagcaaaaagaaaaatcacaagagtgggaaaaagaaagctcaagcggaagttctcgcagcagaatacgcggaccctcccaaacgcccagacctacaaggtagtgacgcgaaggaagcatggtgcgctatacacaagtcggacagacactctctggaagattgcctcgtcttcaaaaagtcgctcggaaagcacatggcatcggaaaaaagcaagcgagtacgtgtggtagagaaggacactgagacggctacttaggaatcggactcatcatacccagactccgatctccatgtctcgcacatctttggaggttccacggcatactcctcaaagcgagaatacaagaaagtgaaacgtgaagtctgttcgacgtggcagggggctacacccaagatgaagtggtctgaacagaagatagaattctcagaagaagaccaccccaagactgccgtcatcccatggcgatatccgatcgtggtcgaacctactattcggaatatcaaggtcgcacgagttctgatcgacggcggcagctcaatcaaccttctcttcgccagcacattggacgcgatggggatcccacgaagcgaattgacaccaaccgatcaacccttccatggaatcactccccagtcatcgtccgaaccattgggcaaaattacgttgcctgtgactttcggccaagcaagtaacttccgaacggagcagatcacctttcatgtcactgaattcgatacagcatacaatgccatcattgggagaactgcactcgcgaagtacatggccgcatctcactacgcgtatcaagtgctcaatatgccgggaccaaagggaacaatcactattcaagggaacgctaagctggcagtgcaatgcgacaagcggagcctcgacatggtcgagcacacgcccagcccacccgccacagctgagccactcaagaaagtgagcaaaacaaacaagacgccgaaaccagacggcgcaatcaggatcgttccactctccagtgctaaccccgacaggaccgtcaagatcggggcatcactaggcgagaaataggaactcgcgctcatcaccttcctccgcgacaatgctggcgttttcgcttggcagccgtccgacatgccgggggttcccagggaggtgattgagcacaaactcatggtgcgacccgacgccaagccagtaaaacaaaaactacggagatttgcaccagattaaaaacaagacatatgagaagagctcgacaaacttctcaaagctagtttcatcagagaggtactccatccagagtggctagccaatccagtcatggtgcggaaggccaacgggaaatggagaatgtgcgtcgatttcaccgacctcaacaaggcgtgtcccaaggatcacttccctctttctcgaatagaccaacgggtggactcaacagccggttgtgagttgttgagttttctcgacgcttactccggttaccaccaaatcagcatggcaaaagaggacgaggagaaaacaacattcatcacgccattcggggtattctactatgttaagatgccgttcagactgataaccgcaggaaatactttccagcgcacggtccagggcgcacttagcgaccaacttggaaacaatgtcgaggcctacgtcgatgacattgttgtcaagaccaagacaagcgactcattgattgacgatctgcgggaaacgttcgacaacctccgacgatatcgcctcatgctcaatccagagaagtgcacgttcggagtaccatcgggcaagctactcggttttctcatctctagcagaggaatagaagcaaatcccgagaagatcaaggcaatcgataatatgaagtcgcccacaagactcaaggaagtacagaagctatccggatgcatggcggcactaagtaggtttgtcgctaggatgggagagcgaggacaacctttcttcgctctactcaagaaacaaaacaaatttatatggacataggaagccgaagaggcattcattgcactcaagtgctaactatcaaatccccctatacttgttgctccccaacctaatgaagaattatttctctatattgtcgccacgccatattccgttagcactgtcattgtcgtcgagagagagaaggtacaacgaccaatctactacatcagcgaagctctccacgacgcaaagacaagatatccacagatccaaaaactgctctacgcggtaatcatgacatcaagaaagctacgccactacttccaaacccacaggggagcaggggcaggattcatcttgacatcaccttcaggagatcaattcaagcatgcaattcacctcaacttcaaagcgaccaataacacagccgagtacgaaggactactcgccgggataagagctgcagccacactcgtcgtgaaaggggattccgaactagtcgcgaaccaggtgcacaaagactataagtgctctagccccgagttatccaagtatctcgcagaagtcaggaagctggaaaaaaggttcgatgggatcgaggtccgacacgtataccgtgtcacgtcccaaaacgactctaaaatacatcctctaaattatgcctagaataattaaaatccatgtgaaagcctccaacaattaaaatgtgcaaagttaaaagtcaaataaggcttggaggatttttgtatatttcctaaaagcctaaaatgcgtaaataaattttagtggaattttcagagcacaaataataattattaagaaataaacaaagttaaaatgattttataaaaagaaaaactctaaaaagtcccctttccctccctctccctcttgggctggctcggcccatctccctccccctccctctcctctccccgcggcccatccggcctctccccgcgcgcgcgccactgacgggcgggcccgcccgccaccctcgctgatgggtggggcccacccgtcatccccttcctcccgccgcatccttgccgacctcgtccaccctccgtttcgctcgtcgaccgccggagcgccgccgtccccgtcgacccgagccgcgccgccgccttcctccgctccagccgccttttcgtcgtctccgtcgacctagggtgagccgtggaccgccgcctcgtttccccctttccctcccttctctcggccgccgctccgccgtgcctatggccgccgccggcgaccataggggcgcgggcgcgccgcctcccgccggccgtgccgccgtggccgccttcgggcgcatcgagcggctgccgcgtggggcccggctgtcagccgcccgcgccctcgggtgcggctgacgcgtggggcccacggcgccggccggtgtgagcccgggtgcacccagtccaccgtggaccgtgaggctgccgcgtgggccccactcccgtggacccggtccgcgcgccccctcccctcggctggcgcaataaacttttttttaaattaaaatttaaatgaagaaattcgcaaatattcacttaaagagcatataaacttcaaatagccataacatggccatttgaactcggaattggaccgttcaagtctctaatttttccttaagaagtcaagaacccatttttgtgctttgttcctgcttgttatatggagtttattagagtaaaagccttttcttttccgttggtcgtgtagacgctgcagcttcggaagatccgctcttcgtggaagttgaagccgacggttgggaaagcgagcaaggcaagtcacatcatccttgaacatattgaatcccagtttataaaattatgttgatttaaattattgcattatcggtttatttaaattcccgcgttatcactgttttatctagccatgcctatttacctttgttatgaccttattattgttattgttattatttccttgttcaccctagaataaacaaaaccccaactagtggacactctactcatggtaccactagtatgattttaggtagatgtttcgccgcttaattaggcagcattaggtggttttacaactctagactttgggatattcatatcacctggacactatggaatggttggattattgtggaattggattcacacctccccctctattcaaaatcctcaaaatggttttaggctgggctcggggtgcatggttttgatagtagcacctcggccatataaggaccggtcttcgggcctctgttgcaaagcactaccgtacttccacatgtctagtgggtaaggcttagtttgtggctcagtctggttataaacaaaagtacacggatggagatggacgaagtcgggggtcgatggacatctctaggacaaatgaaggctacacgagctgcggcccggtagtcgagatgtcatggcacagggccggtgtcctgctgcaaggggctcagtcttgcctacctgtcccgggggttccggccgtaggtggggttgggtcggtactcttgtctatggctaggatgggttggaaactatgtcacgtcttccgtccgtataccgtggtggtatgcggcacgtggttacacatgaggaagatgtgtcttgtgggtaaagatgtacacctctgatcagagtataatctattcgaatagctgcgccctcggttatgggcaagccgagcaatgtacccaagttagtgttttaattcttaaaacctgcttaacaactaaaatgtggaatggttggcctgggttgacttgggacgagctgggacccagggtcgggttgccagttcggtctgaatcatcgtaggccttgggttaaggcaggttcgtgtgggttcacggccttgattaataatattgtatagctctggaatcgtgtttacaaaatagctttgagcaactaagtgtcttttaatgctgtttactgcaaaccctaaccctttatattataacccccttgtactcccttgcatttatcctgcacttgtgggtgtgtcttgttgagtacggtggttgtactcagtcttgctcaatttttcccaaacccagaagaggagcccctggaagatgaaggcgttggtgtctagctcgtgcctgccgtcaagcgcctgtggtcgtcgccctagtcttccgttgtttctcgtttgtctttgtgtgtgctgggccttcgccgcccatgtaataaattaactatttacgcttccgcttgataaactctgaaatgtatcaacttttggtgtaccttgcctcctgggacaaggaataatacacgcacgtaaggaacgcccgttggattaattccggtcatgacataccgcaaggacaacatcgagccggatgatctagcatggcgtgcatccagacgagagccactcgaacccggtactcttctggacgtcctgacaaagccatcagtgaaagaggcaagcgacgaagatagcccagtcgcccccgacatcagcttgggggctacagaggcagagcgcgccgttgccgatatcgagaccacagatgactggcgcaccccactgatgaaattcatatgcagcgaagagttgcccgaggacgacgaagaagccgacaaaataacctgtaaagcaaaaatctactgtatgatcggcaacgatctatacaagaaagcgccaaatggggtacttctcaaatgcgtctcgtccgacgacgatagacatctcctcctcgacatacatgaagggatctgcgggtcacacgcagccggtcgcacattggttggaaaagcttttcggcaagggtttttctggccaaccgccctcaaagacgcttgcgacatggttcagcggtgcgaagcctgtcaatttcacagtaaacacacaaagctaccagcgcaagcactccagactatccctcttacttggccgttctcgtcctgggggctcgacatactcggaccattcccacgaggatagggcggctacaggttcctattcgtggcgatcgacaaattcactaagtggatcgaagcgacacccacggggaaaatcaaggccgacgccatcaaattcatcaaagggatattttgcagatatggactgccgcaccacatcataaccgacaacggctcccagttcattagcgccgacttccaggattattgtatcgggctgggagtcaagatctgctttgcctcggtttctcaccctcagagcaacggataggtcgagagggcaaatggcatagtactagaaggaatgaagacccgcgtctatgacaggctcatgtcacaggacaagaagtgggtcgaagaactcccatcagtactatgggccgtgcgtaccacaccgacaacgtctaacaaggaaacacccttcttcctcgtgtacagctcagaggccatgctccccaccgagctacgacatcaaagtacacgagtacagaagtatttcgatgagaatcaggaggagcagtgaaacgacgatgtgaatctactcgaggaacatcgtgaacgagttgtcgtccgagaaaccagctaccaacaggcccttcgccgttaccacgagaagcgcatccgagcacgcacgcttttgatcggtgactacgtcctccgacgggttcaaagccaagcagggcgaaacaagctctcacccaaatgggaaggaccgtacacgatcacacatgtcttgcggccaggcgcattcaaaattgcagacggcgatggtcgtgagatggcaaatttctggaacattgatcaattacgtaaattctatgtataagtcaatagtatccatacttgtaagacatcttacagcttcaataaagcctattttcaggtacagattacaaccaaagtgttccttcccgatgatcccttacccagatgacacctagcgttgaaatctatcctcatgtccctttacgccgtcttgacaaggcctccgaggaacctaagagatctttggctggggacgcccaaagccgataaggccttgtcggatcctgtagagacgaaagaccatgtaagatctggtcgtgtaagagttctcgtcgtgcgtattaaccaagccatgtaatcgaaaatcaattttctaacttcacggctggggctaggatcagtgcttgttcaaccgaggtaggtcaaaggtccaagagccttatcttccgagaagaattctccgatgacaaggctggggctagggagagtgtatgactcaaatgactgatcgaagtcgctaagtaataagacactcttacacactacatccagagtaagagagcttagttaagatagatttcttttctatttcacaagtacttcttacaattccgtaaaaacccaaaactatattacacttttccctaagatatttgtcacagggtacagagactaccaggaaggccaatgccagtccatagactggaagtccttccctgccagcagcgccatcgacttcgccaggtgatctatctccaccggagttcaccgagaacgagaaaacccttcgtggaggaactcgaggtgcagttgcggacgatgatgtcgtatgcaagccaacacgtgccctccggcatatcggctcgatcgacggcactcctgcttcagggcttcgtcgatacgctttgaagcatctaggcccccgttgttaattttggtaattaatgacaagcgctaattgtggactaaccgttgctattgggataatattttaagttagatccacatcatgtgtgtgcatggatgactatcgatggattaaaatttgctagtttattttacaattgatcgaggtgtagggcgatcaaatttagaattgatcgaggtgtagggcgatcaaatttgctagtttattttctagtttcgccgtactattaagaggggtaatgacctagcaaagagatgattaaattgccacattaggtcattatgcatttagacgtgtgctcgcttttcatcacacacacacaatcacttgggatttcactgggctcggcctgaacaggggcggtcagaccggccacatagtggcggtctgaccggcgtaccttggccagtctgaacggccgcaagaaggcggtctgaccggcgcataaagccggtctgaccggcagtacatgcgcggtcagaccggcccactggaggccgggatggtgctgctccgggtggccgatacagagccgatggagccgtagtcggtcagaccgagccgatggcggtctgaccgagccgaggccggtctgaccgcccactcaacgccggtctgaccagccaggccgatggggccctctgatagcacttcaacggctagttttctagccgttgcacagtagcacggtctgaccggccacatacctccggtcagaccggcagagcacaaagttgggggatttcacccctaacggctagttttggtgggtgggagtataaatacttccccaccagcagcaaggggactctcttggcacccaattcaattgcatacatcccttgcacctctctcacacccacttgagctttgtgttcatccatctagtgtgttagagggttgattagccaagagtcaagtgcattgcttccatttgtagagctagtgtggcacttgattgatcatctccacgccgggtcattgcttgttactcttagaggttgccgcctcctagacggcttgtggaggagttgcccggtgacctctccgagaagattgtggaggaggcccggcgtcggtttgtgagtggtttggagttcagcaccttcggagtgaaggaagaactaccctagtgatcgaggcttgggtagtcctctccatgggccgctcccgccttgcccaccccttgacgaaaggggcgtgcggtggtttcgtggttgagcggtggagttgggctcgcctcaacggggtgtaggaaacaggcgagtttccgaacctcggtgaaaaatctcttgtctacttgtctaatttgattgtcgcatttacatttgtgcaatttacatttctagagacatacttgagatcatatcaccctaggattgctaaacattgacataggagtgtgatttacttttcctagagatataattgagccactatcaccttaggtttgcaaaacataacttagttacttagttagagttgacccttaccaagcctagcaacttaggttagttttgattaggtgtcatttagttttaaatcgcctattcacccccctctagttgacctctcgatcctacaagtggtatcagggcttggtctctcttgattgggcttcaccgcctagagagaagatgtcgaacgaggtgaaccatgtagggaaggctcccatgtttaatggcacaaactattccacttggaaaattaaaatgtctactcacctcaaagctatgagcttccatatttggagtattgtggatgtaggctttgctatcaacggcacacccttgacggagattgatcaccgcaacctccaactcaatgcccaagccatgaatgctttgttcaactctttgagccaagaggagtttgatagagtgagcaaccttgagaccgcatatgagatttggaacaagttggcggagatccatgagggcacaagtgagtacaaggatgccaagcttcatttcgtcaagatccaatatgagacattctccatgttgcctcatgagagtgtgaatgacatgtatgggaggctcaatgttattgtgaatgatctcaaggggcttggggcaaactacaccgatcttgaggttgcccaaaagatgcttagggctctaccagagaagtatgagacccttgtcaccatgctcatcaactccgacaagtcaaggatgacaccggcaagcctcttggggaagatcaacaccaatgacatgtacaagttgaagaagaaggagatggaggaagcctcaccttccaagaagtgcattgctctccaagctgaagttgaggacaagggcaagggcaaggtgaatgaagccaatgaggacttggaggaagagattgcccttcttgctagaaggttcaatgatctcttgggaaggagaaaggagagaggaaggggctcaaactcaaataggagaagaaatagaagacccaacaagactctctccaacttgaggtgctttgagtgtggtgagaagggacactttgcttccaagtgcccttccaaagatgatgatggagacaagtcatccaagaagaagagtggaggatacaagctcatgaagaagctcaagaaggaaggcaagaagattgaagccttcatcggggaatgggactcaaatgaggagagctccgcctcatccgggtccgaggaagaaggtggtgatgatgcaagctccaagaagaagaagatggccgttgttgccatcaaggaggctctatcactcttcgctccactttgtctcatggcaaagggttcctctaaggtaacatctcttagtgatagtgagagtaatgataattgtaatgatgtttcctatgatgagcttgtgagtatgtttgaggagctccatgcttatagtgagaaaaagattgtcaagttcatggccctaaagaaggatcatgcttctttggaggtcttgtatgaggagctaaagacttctcatgagagactcaccatgtggatattatgggtaccccatacccatacggcatggttatccgactagtcataggggataacttatatatatggaatatgtaacagatcatgacttgggtattacgtttccttatatattacggaacagcctaaagtcctggtttgataatattgtaaagtagatttaggaaaccgataccgtattggttaaggtttctatcttgtaatcctgccccccaccctatataaggtgggcaggaggccctctagggggcatgacacaactagatcgtcagatctatatacacccggcggattcaaatccccaaacaggagtagggtattacctttcattgagagggcctgaacctgtctaaatcctttgtctccgcatccatccactttaggtctcgtacgctaccctcttttattattgccgaattcatgtttcgacagttggcgcgccaggtaggggttgcgtcgagtttcctatcaacgagcgcgatggaatcaatttcatgagtcgccgacttcgttttcgctttgggagttttcacttcctttccgtcgatcacttcttcaagctcctcttctctgacttgatccaaatcagtcagggggaaactcaatctgatttttatcattatttatcatattgatttttaatctcagattaatctcttgctattttttgttgttgttcacatataattacgcggcactattgaggcgattgatgctggtcatggactcgaagcgtctcagctttccggtcgatcggccgcgagtccactctgccggcttgtcttcgccaccgccattgctgataacaacaacgacttcaccgaccggcccgcctccgtcgccgccgagtggtgcctccgcctacacggctggcctattatgccgccgctgttgggcgtctacgacttcaccgccggcctgcctccgtcgccgccgagtggtgcctccgcctacacggctggcctattatgccgccgctgttgggcgtctacgacttcaccgccggcctgcctccgttaccgctgagtggtgcctccgcctacacggctggcctattatgccgccgctgttgggcatctacgacttcaccgccggcctgcctccgtcgccgccgattggtgcctccgcctacacggctggcctattatgccgccgctgttgggcgtctacgacttcaccgccggcctgcctccgtcgccgccgagtggtgtccccgcctatacggtcggttggtcacaccaccgttgaagggcatcgtcatcttcaccgccggcccgcctccgtcgccgccgactggtgcctccgcctacacggctggcctattatgccgccgctgttgggcgtcttcgctttcaccgtcgaccgccttcgtcgccgccgactggtgtcttcattgttattgatggacgactttgttcccacattggccacttctgccatcaccaaggggaatattacaaagctaagtcatcatttattttattctttatatgatatttttccttttcctctgcctcactacaccaattggtcttccattgagcagtgagtcgggggctatagatgttatatcatattttttataatatttatcttgattgcttgcgacataatctgagtacaaaagtacctatcgagttatggagttctatcttcctatgctttccgtttggtttgccaatggatggttgcctttgggccgattcctagcacccgggggctcgttggatggaccgactaacgcaaggtgctaagtattattcggaataaatcaaaagcatagagatgagataaatttattttctgctcttaataattgcaaaagtacccgagtagtaaactccgatccgtgaaactttgttccattaatgacgaactcatgtcactcatatgcatgtttgggaagtgcttaggccgactcccagtgcttggtggctatgactagttgggcagagcgtttaaacgtaatgagtcatctgctcggggaaatcaaaattgacaagaggagaaatacatatttataaatattttaaaatacttgattttttttctcgagtattatatttatatcagatactactcatcctatatgtttgttctgcaggatccagatccagatatgcataaaagggattcatggctttaagcttatctcttacgctctaggaatggatcagtcagaacatcaccaccggccgcctcgtccgccgccgactagtgttttcgcctgcacggttggcctattatgccgccgttgttgggcgtctacgtcttcaccgaccggcttgccttcgccgccgccgactggtgtttccgcctgcacggctggcctttatgccgccgttgttgggcgtctacgtcttcaccgaccggccgcctcgtccgccgccgactggtgcttccgcctgcacggctggcctttatgccgccgttgttgggcgtctacgtcttcaccgaccggccgcctcgtccgccgccgactggtgcttccgcctgcacggctggcctttatgccgccgttgttgggcgtctacgtcttcaccgaccggcttgccttcgccgctgccgactggtgtttccgcctgcacggctggcctttatgccgccgttgttgggcgtctacgtcttcaccgaccggcttgccttcgccgccgccgactggtgtttccgcctgcacggctggcctttatgccgacgttgttgggcgtctacgtcttcaccgaccggccgcctcgtccgccgccgactggtgcttccgcctgcacggctggcctattatgccgccgttgttgggcgtctacgtcttcaccgaccggcttgccttcgccgccgccgactggtgtttccgcctgcacggctggcctattatgccgccgttgttgggcgtctacgtcttcaccgaccggccgccgcatccgccgctgactggtgtcaccgcctgcacggctggcctgttataacgccaactaatgctatcttcttcacggctggccacgtcgccgtcaccgctaataggcgttatcatcttcaacgcaagctgtctacatctgctgccgactagtttattcacttccatggctgcatgattccgccaatgttgattggctttatcttcttcatcgccggtcgtctcgtctactgctgactagtgccctcgtctctacatctggtttatacagcctaccactactgatgaacatcatcgtcttccgtcgccgactagtgcttttattttcacaactgcgcgtcttcactaccagtttgcttctgttgccgacgactcgtgttcacttcatcacggcaatgcaactttgtcatcatggtagagcgacttcatctttattatcttcggcactggcaaactctattgctgctacttcacaagttttgctacatcaccaaccatgacgttgttgtgaatctcgacatctcggcatgcgatgccgtgttattttactacaacaagtggctctccaacattcatgatttctacttggacatcttcaatacatatcttcaatcaagcaataactattcgacgacaagaggctacagttctcgactctatgttcagttgtttcccaactaatcaaagagtcgggggctacacaaatacaaggctcaaaatttgacaaattttatgtcaagctgaagaaatcaattcatcaacccacgagtcaactccaggagtcattatcttcatctttgcttcggagcagacattctacttcaacaacttcaaatatttcggtttagacgagttgggcaacaacatcaactctcctccaagtgaagcatctacaacagctataacattaatttgatggattattgtcactgacatcatcaccagcacctctgcttcatcgaccctgacatctccgctgttgctaatggatgattatgttttcgccgacttattatttcaccttcacggttgacctactatgcaaatgctgatgagcgtctttgtcattatcattggttgctacactgctattggctggatcaccgacatcgtcttcttcatcatgtcggttgcgtttgtcgtcgtcaactattttcttcatcttcatgattggtggattttgtcatcacctttgatctacctcgtctgtcaccgactgattattttgctgccatggctacacaattttatcgctgggctccttcatcttcattgtagttgatctgtctgccgccgactggtttcttcgcctccatggctatgcgacttcattacttttgattggtatcactatcttcactaccaccagtattgttgccacctctggtgggcaatattatctctatattggtcgtcttgtctatatgccaactgcgtcagctaccatcaatggacaattgtgactacgacagaaggacaagctatatgctcaggggctcatcaactcaagcgtgaggattatatctccaatttggacttattccggatacattccacatggattcatagtcatgagtctattttctatgctcaaagactggaccaattattattccccgtaagggctatcaaccgaatacttgcgccagtcgggattcaattattatatttattttggagtatcccataagggataatcattcagatcagaagctattcatatgagctacacttggtctatattacccagaagatttattactcgggagcatgttacatgcgtcatcctttaaagggtgtcgaaggcatattttttggcctaggcctaatatgtctgcagcccatattttcaggtgtggcctgtcacgttcttttagggacttaggcatttttcgcttaggccaaagtgcgcgtgatcaagtgcccaataccttaaaatccttttataccgcagttactcgactttttaggagttggtacaatgcatcttaaaaggtgtcaaacagtaaagctttatatagctgccccgctgacttttttatatagtcaaggtgctgtttgggtttatcaagcaattgattggatacaatatcattgctttttgccacgtaagtgtgcatttttattgaccaatattatggcttaggctgattatatattatggtcatttttcaggcggttggtaaatcctttatgagtttatttactcggattttacaccacatatgccatatatttccaggtgtggtgaaaccatgtgtcttctagggacttaagcacatctgttaaagcagtgtgcgcatggcgtatgcccaatactttggaaatttctttattcacaatatgcaagcttctttatagctattttgctatatcactcatcatattttacaaagcagttggtatatcactcggatcatgttatttggaggattcacaccgcatatgctatatattgatatcaagtcacttggttgattacgattatcaaaaccactcggttggttggattatttattccttgactatatgcttggtttgttcaattaaccacattgtcgggggctacacctattaggtgcatctagtcggtgcacctgactttattttccagccctccacagtcttcagatttggtaaaagtactcgggagaccatgacaaagatgattgaagcactcggctttggagtaatctggttcgagagaagattatcttttcgactgcgaaggtctcaggggctactgtggatattatgggtaccccatacccatacggcatggttatccgactagtcataggggataacttatatatatggaatatgtaacagatcatgacttgggtattacgtttccttatatattacggaacagcctaaagtcctggtttgataatattgtaaagtagatttaggaaaccgataccgtattggttaaggtttctatcttgtaatcctgccccccaccctatataaggtgggcaggaggccctctagggggcatgacacaactagatcgtcagatctatatacacccggcggattcaaatccccaaacaggagtagggtattacctttcattgagagggcctgaacctgtctaaatcctttgtctccgcatccatccactttaggtctcgtacgctaccctcttttattattgccgaattcatgtttcgacacaccatttctcctgagaagcttaaggaagctcatgacaacctcctttccactactcaacatgaagctctcattgatgttggcatatcttgtgatttgcttgatgatagtgctacttgccatattgctcatgttgcatcatctagcatttctacctcttgtgatgatcttgtggatatgtctagctctagatctagctcttgtgtttctatttgtgatgtctcacttgttgttgagaacaatgagcttaaggagcaagtggctaagctcaacaagagcttggagaggtgcttcaagggtaagaacactcttgacaagattttgagtgagcaatggtgcatccttaacaaggagggacttggattcattccaaagaagggtaagaaaccttctcactgtgccactcgttttgtcaagagcaatggtaagtattgctccaagtgtcgtgaggttgggcatttggtgaatgattgccctggtggtaagcctcctaagacatgcatgtttgattctcattatatgcttaggaaggctcatgatggtagcattgttgctagatatgtgggttcccctatactcggtggtaaaaagaatgccatttgggtgcccaaagctttggtctctaacctccaaggacccaaacaagtttgggtacctaaaagagcttgatcttcttttgtaggtgaactaccgcaccggtgggagccattgggtgcttgacagtggatgcactcaacacatgatagggctatgttcaccacatttgaggtaggaggaaatgaacaagagaaagtgacatttggagacaatagcaaaggaaaggtaattgggttaggtaaaattgctatctccaatgatttgtcaattgataatgtctctcttgttaaatctctaaattttaatttgctttcggttgctcaaatttgtgatcttggcttgtcatgtgctttcttcccgcaagaagttattgtttctagccttcttgacaagtcttgtgtattcaaaggttttagatatggaaatctttatttggttgatttcaattctagtgaagcaaatttgaaaacttgtttagttgcaaaaacttcattgggttggctttagcataggaggctagcccatgttggcatgaatcaattgagcaaactttcaaaacgtgatctagttgtgggcttgaaagatgtgaagtttgagaaatataagctttgtagtgcttgtcaagccggcaagcaaattgcatgttctcatcctactaagagtatcatgtctacatcgagactattggagctcttgcatatggatttgtttggcccaacaacctataagagcattggtggtaatagtcattgtcttgtgattgttgatgattattctcgctatacttgggtgttctttttgcatgtcaagtctatcgttgccgagcttttcaaaaagtttgcaaaagggcccaaaataaatttaattgcactcttgtgaaaataagaagtgacaatggttccgagtttaagaataccaatatcgaggactattgtgatgatcttggtattaaacacgaactttccgctacctactcacctcaacaaaatggtgtagtggtgaggaaaaatcgtacattgattgagatggcaaggactatgcttgatgaatatagtgtttccgattccttttgggtggaagccataaacaccgcttgccatgcaaccaataggctttatttgcatcgtctcttgaaaaagacttcctatgagctaattgttgggaggaagcctaatattacctattttcaagtttttggttgcaagtgttatatttaccgaaagggtgatagtctaaccaaatttgaaagtcggtgtgatgaagggttttttctaggttatgcctcaaatagcaaggtataccgggtctacaacaagaacaaaggtattgtggaagaaaccgccgatgttcaatttgatgagactaatggctcccaagagggacatgagaatttggatgatgtaggtgatgaaggcttgatgagagctatgaagaacatgtccattggagatgtcaagcctattgaagtggaagacaagccatccacctccactcaagatgagccgtctacttccgctatgccaagtcaagcttaagttgaagtggaggaggagaaggcacaagatccacctatgcctctaaggatacacaccgctctttccaaggatcacccaattgaccaagtgttgggtgacattagtaagggtgttcaaactcgatctcgtgtcgcttcgatttgtgaactttactcatttgtttcttgtcttgagccaaaacatgtagatgaagctccttgtgatccggattggatgaatgctatgcatgaagaactcaacaactttgcaagaaacaaggtgtggactttggttgaaagacctagagaccacaatgtcatagggacaaagtgggtctttaggaacaaacaagacgagaacgggttggtggtgagaaacaaggtaaggttagtggcacaaggtttcacacaagttgaaggtttggacttcggtgaaacttttgcccccgtggcaagacttgaggatattcgcatccttcttacatttgcatcatgctttgatataaaactatttcaaatagatgtgaaaagtgcttttctaaatggtgaaattgccgaacttgtctttgttgaacaacctcccggttttgaagatcctaaaaatcctaaccatgtttacaaactctcaaaagctctttatggtttaaaacaagctcctagggcttggtacgaaagattgagagattttcttttgtcaaaggatttcaaaattggaaaagttgacaccaccattttcacaaaaatcattggtgatgatttctttgtgtgtcaaatttatgttgatgacatcatattcggttctactaatgaggtattttgcaaggaatttggtgatatgatgtctagggaatttgagatgtccatgattagagagttgagcttcttccttggacttcaaatcaagcaactcaaggatgggacgttcgtgagccaaaccaagtacatcaaggatctactcaagaggtttagcttggaggatgcgaagcccatcaagacacctatggcaaccaacgggcatttcgaccttgatgagggaggtaaaccggtagatttaaagctttatcgttctatgattggtagcttgctttaccttaccgcatctaggccggatatcatgtttagtgtttgcatgtgtgcacggtttcaagccgctcctaaggagtgtcacttagtggccgtgaaaaggattctaagatatttaaagcattcctgtactattggcttgtggtacccaaaaggtgctaagtttaagcttgttggctattccgattcggattatgccggttgcaaagtggatagaaagagcacatccggtagttgccaaatgcttggtagatcccttgtgtcatggtcatccaagaaacaaaactccgtagacctctctaccgccgaggcagaatatgtttcggcgggtagttattgtgcccaattgctttggatgaaacaaacattgttggactatggcatatccttcaccaaaaccacactcctatgtgacaatgatagtgccataaagatagccaataacccggtccaacattctagaaccaagcatattgacatacgccatcacttcctaagacaccatgttgccaagtgtgacatagtcattagccacataagaaccgaggatcaactagccgacatctttaccaagcctcttgatgaaacccacttttgcaagttgaggaatgagttaaatgtcatagacttctctaatgtggcttgagatggtgcaccatggttgcttcttttgcatattgtatatttgctcctatttgctcttatgctttggatttatttccatttggttcttcattgcgaaaatggagcatgtcacattaagggggagttttgcactcttgcatgtgctctacttccttttatatgtgagcaaatcaactaaaagtgctagtagtgtttttaaaatgcccaagtcaacataagtcaaaacttttgcaaaatcaatgtaatttgaaaactatctcttggaaaatgtttcaaaaggttccctatatgttttccaagcctcacattgcaagaaaaatgatttttgaatgaaaatgccattttgaccctcttttgaagaaactagattcttacttttggctaaaatgagatttatccccaaaatgagattgagaaggaatttgagaaaagtttcaaaacaaagttggtagagaagaagatttgaaatgtttttggtattcaaacctatttcaaaaaccaaatcattcaaaagttatttgaaaatcaaattcgcccaaaaacccctatagaccataaaaggtcacctcctagcactcaagtgagttttgttgcaaatcttcataattttcaaatgttatgaatggttggaaatatttcaactcacacatttcaaaattgctccaaaaatcaaatttttgttgaattttattgtgtggggatagccgaactgtgtaagagctgtgcacaggcggctgggggccaggcggtctgaccggcctcatatagccggtctgaccggccggggatggtgggcccaggaaacttccttttctttctctcttcttcccctacccgactccatctcctcccattcagccttcttcttccccaactcgaaaaaaactcctcctctctcctctcccaaaccctagccacctccctccaccaaatcccctcggtttgaccgcggatttctctccgattacaccgtaagtgattctcctcctcttcctctctctaatccatggattagttcgtgtttttgttgagtttttgatccatggcatggaaccctaggtgaagcacgagttgttcttcgatttgcaccaatagagggtagtttcttggtgtgattcaactcctccaaccggtaaatcactctccctcttgtgcattctctcaaatcgatctatttcaccctagggctatgggtagttgttccaatcttgatgaaataggtccaaccttttgatgttctagttccaatcttgtgcaatattgttctagcaatttttagactcttagtagatgtgaaaatttttggatgcttgaacttgtgggaggaggtctgcccggagccacaggcggtctgaccgttggtcagccgccggtctgaccggcgtgtgcgcccagtctaaccggccggcagctgtcggtctgaccggccaccggtgggcggtctgaccggcctgatgccgtcggtctgaccggctaccacgggcggtctgaccgccctactggctgcggtcttaccacccctccataggatataggcaaattttcacctctccaaattgtttctagaattattgctaatatcctatcatcctttgttctttgacagtgatgcctccccgcactcgtcatggtcgtcgtgatgcttctcatccttccagttcggcgcgtcctccttctcctccacaagagtgaagaccttttttttggtgcttgatgccaaaaaggggagaaaagtgtgttttatgttttggtgcttgatgccaaaagggggagaaaagtgtgttttatgttgggttgggactagtagtagtaaggatagtgccctcatatctaataggttaaggtggtttgggctatattatgtacgggtatgggctattactctatattgtgtgttatttgtcgttttgttaaactctaagtcatttggacccttcgtggtcttgtaatagcctatgttttatttgtgagccctttttaggatgttttgtgacttttgtgagttaaatggttaagtgatgtgaacttatgcaatgatggatggtgtatgtgatattgatgtatatgtgaccatcttatgcttatggattgaagtttacattgatatattgctaatgtgtctgtgcttgttgaaatgtgcattggctccatatttgttgtttatgattgatatgcacatgtttaggggagcttttgattgttattgcaatatatgtccatgtgttctatgtttgattatatatatatttgtggtgtttgtcatcaattaccaaaaagggggagattgaaacatctaggcccccgttgttaattttggtaattaataacaagtgctaattgtggactaaccgttgctattgagataatattttaagttaggtccacatcatgtgtgcgcatggatgactatcgatggattaaaattgacggagcaaagcaaagagaagacggtaaaactagtgctttaatttagaattgatcgaggtgtagggcgatcaaatttgctagtttattttctagtttcgccgttctattaagaggggtaatgacctagcaaagagatgattaaattgccacattaggtcattatgcatttagacgtgtgctcgcttttcatcacacacacacaatcacttgggatttcactgggctcggcctgaccaggggcggtcagaccagccacatagtggcggtctgaccggcgtgccttgaccggtctgaccggccgcaagaaggcggtctgaccggcgcataaggccggtctgaccggcggtacatgcgcggtcagaccggcccactggaggccgggatagtgctgctcggggtggccgatacagagccaacggagccgtagtcgatcagaccgagccgatggcggtctgaccgagccgaggccggtctgaccgccaactcaatgtcggtctgaccggccaggccgatggggccctctgacagcacttcaatggctagttttctagccgttgcacagtagcacggtctgaccggccacatacctccggtcagaccggcagagcacaaagttgggggattgcacccccaacggctagttttggtgggtgggagtattaatacttccccaccagcagcaaggggactctcttggcacccaattcaattgcatacatcccttgcacctctctcatacccacttgagctttgtgttcatccatctagtgtgttagagggttgattagccaagagtcaagtgcattgcttccatttgtagagctagtgtggcacttgattgatcatctccacgccgggtcattgcttgttactcttggaggttgccgcctcctagacggcttgtagaggagttgcccggtgacctctccgagaagattgtggaggaggcccggcgccggtttgtgagtggtttggagttcaccaccttcggagtaaaggaagaactaccctagtgatcgaggcttgggtagtcctctccgtgggccggctcccaccttgcccaccccttgacgaagggggcgtgcggtggcttcgtggttgagcggtggagttgggctctcctcaacgggtagtaggaaaccggcgagtttccgaacctcgaaaaaaaatctcttgtctccttgtctaatttgattatcgcatttacatttgtgcaatttacatttctagagacatacttgagatcatatcaccctaggattgctaaacattgacataggagtgtgatttacttttcctagagatataattgagccactatcaccttaggtttgcaaaacgtaacttagttgcttagttagagttaaccctcaccaagcctagcaatttaggttagttttgattaggtgtcatttagttttaaatcgcctattcaccctccctctagtcgacatctcgatcctacacgcttgtcgatgccttcgagctgggtgcaggccccatacagccacgagatgtatccggccgccgactcctcgggatcgccacggggtactcggagctctctacagactctcgtcatggacgtgcagcaactcttcaggtacaagttgaaccacacctcgcgacctcggagtgtttccacggcctgctccttcttcacttctagcatagtcttctcgagctccgctacctcaaatttcgtcttccaatattggatgcgacgatcttcgttagcaagcacactctcgaaatctgctcagcatggaaacaactaagtcaagctgctcttctcttctaagaacacagcaaattaagtcaatccagacggaagagtaaaggagatgaaaacaaagatcaccaacctaaggaagtcgtcggcaagcccgtttccacgggcaaattttgatctacatcgtcctgtgacacatgtggctcaaacgcaagtgccggaacgatcactggcaactcaggctgcccgcgctgctggacatcctcgacatcgacatctctataaacaataacaaagtactcgggatcaaaatgctaaagaaaattaaggtgatgacttcacacgcaaaggcagttggagccaacaaaagttttacaaagcatgactgattaaagagtacaagggaactgaagtcctactcttcaaaaagtgggagaacagactctcccagatcgccgacttcttccatcacgcccttacgcacgtcgttagtcgctccctgatccaagatccgctggagatcaagttcagggtgcgccaaccttatgaacgcgaggatttgacatgccccagtgtaaatcccattagatgtctcctctccgatcctggccgcatgcttggagggtatcgcctccatcgccgtggccagttctgcgagcgaagtcgtcagcgagaactcgtcggggttcaccgggatggtggtcgtaacaccacattccccggcgagctggtgtaggccggtgtaggtgacccgcgacgagccacggatctccgacaggttgttctcgagttccgacatgcggttctcgagtccccgccgttgtcgctcgttgccagccactagttccctcattttctggaggtcttcatgaacctccgccaggtcacacgccagcttgtcggcatgctcgtttgccgatgacgccgccgccgccctcgcctccgcaatctcacgacttatgccgcgagcactggcctcgaggatgcaccccatgtcgacttggagctccccctaggtgaggacgtcagcaggcgggcctcgagtgggcacaagatcgctggcagggccgctgggcgtcacctcacggctcctgggcacgagcacgacatctgtcgaggccactgcaggagacacgctagagtttcctctggacccatcttgcgccgtcttcgcccgcactgacctacaaaagattgtcatcaccagccttcaagacaaattcccggaattcgatcaagtgaaagacctctaatttcatccacttacttttcgccaagtgtcaccagcctctgccgccgcggaggtgacggagacgcatccaaggcctaagtaaaccaagtacgacgtgagggagccatcttccaactacgtaattaataacccaagagacttaccgacggggaggacgctttccggcgaccgccgagcacggaggtgaacttcctccccttcctcgggacatggctgccactggtcgtggcgacagcagcagtaatggccatgtcggacgcctcctgggcgatgccctccttcaacgaggccgccgcctggtggtccacgagcggtccaatgacgtcggtcagagggagagcctgcaccgcacgaagtcattgtgcgatccaggagtaaaaataaaggggtcatcgaatacactcacattgattgcggcttcacgctcggccgtccccttctcgcaaagggggatggggacgttgctcgccgttgtcgagccgctgatcatcaactggccgacgcgacgctatacggtctcgctgttcaaacctgtaagtcaggaggaacatgcacaaaaggaagtcaaattaaacacaagaaaaataccccgaagagaaacccgggtcacgtccttcggccaataatagtcaaaggctgggtggactcgagcctggagcggctggatccgcctaccaatgaagtcggcagcgacttcataccccgacaaacctcttactcagaggtcatcgatggcatcgatgaacgactgaagagaaggggtcaaggcgggtttggcggtccaagacagagtcttgactggttgttcctcaggaacaacaaagattggatctggatcctttatctgaagatagaaccacctcgcccgccacttgctacgagaagaagggcactggaaggggatgtagtgcgacttcagcccaacccaaagtcagaaaccgacgcatccagataccctggtggatcccatccaacgcaactcgtagtagaagcgaaagaggtcgagaaacggctctaccccaatgtaggcctcacaaagatgcgaaaagatactgaggaaggcgatggaattggggttcaaatggagcaaagaaagaccgtagaaattcaaaatgagaaggagaaactcagaaggcggggggagaaaaccacagagaatataatcctcaaccgcaaccatgcgacctaggacaggttcaggttcagtacctcctggttccctctccatggtcccgcgaccggggagagcaccctcctcctgcaacttcttcagggatgcactagtggaagtggacttgtcgaggtccattgccgcaggagatcgccggagaagggaccggcgataaacaagctagggtttggcgggagcggagaagacgaggaacgcttggaggctgaagagctttttcacaacaggcggacttcaaattggatccccaaaatcctcttaaatagatacatttctgacggtgcgaattccaaggaaaggagaaagagatggccgccggaaatttctgggtccgttacgcgcggcagtttttcgaacttcaatttaaattcactcatgaccgttgggcttcacacggtgttgtcgattactccctgtcacctggagaattagtcgaaccaactcaattacgatctcgctggtatcatcgagttccattgttccccttgtaacctatgatttccatcatataataccatatcaactggattagggctattacctatcaaggggcctgaaccagtataatctgtgctttttgtctgcttgatgtcgtattatgtagatcctcgtaccagcgtaccccaatacccactatatccggtctatgggtatcccccgtcgacaatctacttcataattcacaacgtcaaaaattgtacttcatgataaaatcaaacggggcctaattatttattgtaaaattcaaaaaataaaatttatttttttgaacaaatttattttttttgacaaaatccatataagagttttagctagaaattatgaaccaaaattatttatttattgggttcaaagtttgatgaaaacaatgtacgaatttcataaaatttaatttaaaatttatttaaatattttagatttatttttatataagaattgtgtttttatcactaaactagcacataagtataagagaggggtaataaagtctatttataaaacattcaatggtcaactcatggccaactaacagaatggacatagaggagatcaaaataaaaactcaggggtatataagggataaggcaaattttaggacacacaagggattgaacaaattctcatgggtacatagaggattatctcttcaagtaaggattcggatcaggtttagtcactgcaactttggcagtaccaatcatccaaccatccggcaaataagggatggtctagattcttgctcaattttccccaacttttcacctaccctctaactcccaaccgatgccttttggagggaaaatgctgagaggtggtgagagttggcgccaattctaccatgggatcagaagaatacttttgagaatgctctacgacaggtgcccgatcaaacgaacaattatcggacgctcctctgctacatgcaatggaattctctctttcccttttactccgcattgctatgtcgcctgctatctttcttattcccattcccatacttgagtagaataatcgcaaaccatattgcatggcatcaaattataatcaagaatttgggctcacttaactaaaacttatgttttactagttactaacaaactgtagctaatacagaataaaagcacctagtcctcgtcgttggtccacagtcgtcgaccgccttcatcatcggatcaaatcagggcttgacaaaccacctccacaagggttactataccttccttggttgggtggtttcaccacaagaattaccttctccactgctagagattcacggacgaggaccaccttctccatggacattggatcccgctcaagagaaatataaggagaagggtgaactaggagggaaagctttgagaaggagactgcaatgggagagtgtcacggatgagtagcaggattgggcctgcgtgcctgtgttgggtgtaatttaagtcttgggcctgcgagcccacaaacgatggctatttaagcaaacgctgaggattgtaggcggcataaaaacagaaataagaaatacgccttcctcctcaactctgtcttcttcctccagcttctccgttctctcacgtctctctctgcttcttcctcaatccccttctctagatcgaatcgcgtggtgccggaggcgtgtggcggcggtgagttcatatcagagagttggatggctaccactcatgcctagtcgcgaggatggactgaatccagcgctagtcaaaggtctaaactgtaactgtgtgtaaaaaagagatacacagagttgaaagaaaactttaggtacatttgatccattgtaaaactctagtcaaattgacttttgtttcaacagaccattaattcagttttagatatcaacaattaaattaaatcacacattttatacttacagtgttgattgccacaaacgtgcttttttttatttttcaataagttgaggggtataaaatgggaaattaaatgtcaacattaatttattagcttaactaaaattaaggggaatataagaacgactgtataaaaaaatattttctagtttgcccaccttttgtgaataaatttcagaggacctagtttcacagttgttgttaacccaaatctatatatgcagcaaaatatttataaaacccatgcactctttgaagaataaatatctggtaattttgtacctatacacatgcattagccattttcttttgtaagtatatgatttgatggcatatttattaattaaataaagtgtaaaacctttgcattacggataaaaaaggattttagggttttgcgaaaattttgggctctgtttggtacggctccaaatttcaactttcaactctaaactctaactccagtaagagtaggtttctataggagctgaggtgggtatgaaagtgtttgtctagattactaaactccatactaccacgttccttgtagttatttcatcgaacatcttgttggcgttgccctaccgctgttgccgtcatcgtcgtcggtgccgccaccagcggtcagcccgagcgccgccaccgctgttgccgcaggtctgcccgcaggccgccttcacaggtccgccggcacccgccgccatcactcaacccacgcgtcaccgccctgccgttgccgccgtcgtcgcttagcccgcacatcgccttgccaccaccgccactgttggtcataccgcgcattgccggcactagcaccggtgcccatcgctcaacccgcacgctgccgttcgctaaaatatgagagagaacaggcggagaggggtagatgaggagagagaacggagggagaggtgtaaaggggtagttcagtggcatttttatgtaaatactccctccatttcgaaatgtttgacaccgttgactttttagcacatagttgaccatttgtcttattcaaaaacttttatgagatatgtaaaattatatgcctacataaaaatatatttaacaatgaatcaaatgataggaaaataattaataattacttaaattttttgaataagacgaacgatcaaacatgtgataaaaagtcaacagcgacaaacatttcgaaacggagggagtacactgaaaaggcagtggctatggaacagaaaaacctagctccactcccactcctgcagtagaatctatactgtttggtacagcggaagctgtaggtagggcatcgtccaaactccaaactccatttgcatttctgggcggaggaacaaccgccggcgatcagggctagagagctcgccgtggacagcctcctcctagctcccctctccccgccgcacgccgtctcctccaatctgcggcctgacctcctcgcgcgctcggccggcacggcaagaaaggctgacctccgtctccgttcgaatcggagccgaaggtatatccatcccttcttctctccctcttcctcctcgccacttcatgacgcacgtatgacctggcctggccgtgtgacctgagttggagatcaatccgagggggtttggattgatttcttaatttcttcctttccctcgaatcaacccatccgactaggtgtgtttgattcgtcatgttgtactaatgtcagttcgtttccaagattttggggtccatgccacacgttaggtaggcccctgatgaacgcacgtatgctccctgattggggtaaaataaaaaattggggaaaccctggtagattctccaaaacctcaccttgaaatttgtccaagtgtgtccgttgcttgactatccaatcaagctgaaatgttgacagtaatctgtaaaatcctattcacatttgtagctacttagaccatcgcttaggcagattgatggttttattatgaagtcttgattgattttgttcatagtgcagctcacacataaaaaaaaactctgcacgaattgaaggctggggctaattagtacacgttgaatatagaaatcacccttcctaaatcggcgcggtctctttcgattatatgaggctgtattctacaattgtgtgtatgatctaatgatggcagagatctagtaatactagttaagatgataaattcctggtgtgcggttgagagcagggaaatgcactagtgggaacaaaccagttcaggtcactagtttgatcgcatgataatatagagtgtatgcattcatgtagcttccgtatgataaggtcttgtacaagtgcttttttttttcgccgggcctgtgaagagacaccagccgatttcattggattggaaggaaacaaattacaaagattgttcaggttatatgacaacagtcagggcagttggaagggaagccattccccagtaggggggacaagctacgagtataaagcagagaaacgtataagtgcatttgcaggaaacagtggacctgctatcttatcttatactccatccgtcccataatataatggattttgagtttttgcttgtaacgtttgaccactcgtcttattcaaaattttttgaaattattaattattttatttgtgacttactttattatctacggtactttaagcacaacttttcgttttttatatttgcaaaagaaaattgaataagacgagtggtcaaatgttgaaagcgaaaatcccttatattgtgggacggagggagtagtataatagcgtaagcatttccagaacgtttgtttgagaaggtcttatacatgcgcatttcacaataggaagcaatggaactgctagcccagatggtttgtcctcacttgagttagtttgtaggtgccgggctcaaaaccagctgtgtgggctatttctagcatttgtgagtaactgcgggttgggttgcctcggccacccaggcaaatcaaaaatctccaggccagttgtaacttctatctgatggacggactggcccaagtgatgctttttttctgttcaaactgcggggtggtccaagtctgatagcaatatgctgctgcgcaagggtttgagattttcttatttcccttgtttctcctggacaatagagcacagctctcttggtagatccttttttaaaaaaggaaaatcataagcgtccttttctacgcctactgtatgtctgtatgtggtgcatattggtagatatctttaataccgaaatcagggctatggatctggctttttattgggccacgtggctccctaaaaatttggttacacccctccaaaaatttgccacgtgtcaaagcgacggtattcactctccgagagatcgggaaaacgttcgcctatatacgcttgcaacgtgggccaggcatctcgcaaggccatgcgagcttgggcctggcgccgcacggcctttctccgcaatgtacctgcgctgctgcgcatggtcctcatgcagcgtgaagctagcacatacaggtacagattactaagccagtttagaataaaataatatgtataaaaaaaaggagaaaaaaataataggatttttagccttttcataataatcttttaacaaatgcaatttactacagattactcggaatgaggaaaagtcacttcatgttaatatcatgtgtttcaagagaataaaataaataaatagttaaatcaaatggaaaaaaaatagtgacagcaaggattgcgttaggacaattaaaaatcttcagataagatttacttgaaacgaggaaaataccttaatttctatagaatggaaggaatagaagtgaaatttccatgtgaaccgagaagtttataactactttcctattaattcagagtatttttgtttttttttctcctcacattatacttttttatgttaggaattcatttattttagaacattggtaagtaacaacaatcatattgctatttttttattgcgaaacacaatagatatagatgttcatatacacgtgtgtatacatacctgtaaacgcacacatacaaacccaatcactacaagcacctccgaagattgggccgtcaggcatatcttaggagtgatgaagaatggtgggtttcctaccattgaaaaaacaaatagccgtaaatacaagcgtctatgctaagtttagaacttaactcgtataggtagagaacctgaccagctgagctctacatagtagtatatctggatatatgaaatcaaaataagtgtctttaccatgtcatcgtcctttatttctaaatgaaattagtataaaatttaggtaatcgaagacacgtttatttcggatatgtatttcctactaatacgaactcaatggcttacatctatatgttggatattaataaaacatatatttttactaatgttcagcatgacaataccactaatctagatgattttactattctaccttattttgttcacaaacataaaaataaaagggaatggactttcaacaatccttttcgatgtatgatttctgaagggaaatacacacatgctataaactaacttagctagcgtgacaactggcacgctcattttctagttacattcttaaaaatgtgtactagcatagaattaaggataccattaaattgaactttaattaagtgcatatgcctaaaattgttggatcacggttttacatgatgggttacaagaccgaggcttattatatcctatcatttccagcatgtacttgcattatccattttttctttaccatttaattttttgctccttagtgtttatatgctgaattgttggtgcaaacatgagaaaatttggtttatatgtccttgaaaatatctgcaaaattttatattctttgtatcagcacagtaagtatgcatatttatgcccttgatagcataagacacaacattcctagctttgtgcagtaatctcttaagcatttgtggatgttattctgattcaaagattgacacaaccacataggctgacatcttgtatattgggacctttggcaggcaatcggccatggttttccttaaggtggatatgtcttggaatgtgttgatctcacctagcgagctgagccccaagggtctcttgctccgcaaggctgtcattgttagtcttctggaggagatagcaaacaggaaggcctccaaggatcatggttactacattgctgtcagtgagctgaaggcgatatcagaagggaaagtgcgcgagctgaccggagatgttcttttcccagtgacattcacctgcatcacacagaagcctacgaagggcgagatcttagttggctctgtggataagatcctcaagcatggcgtgttcctcaaatctggaccaatagaaagcatcttcctgtcagagaagacactgagcgactacaagtacatcggtggggagaaccctatgttcatgaatgaccactcgaagctggagaaggacaccgctgtgcgcttcaaggtgatgggtttccgctggatggaagctgatcgccagttccagatccttgctaccctggctggtgactatcttgggccactatgaactgcttccacaggttagtggtgatgaatggatctgaaatgtattatctttaacctgctgtctgtagtttgatgtcatgatgatgatgattagaccagtagctgtgatgctggctgttgatgtaagtgacatttggccctatgtttagcatttcagcatgatgcgaattgtcatggccgtttaacctctgtttcctatcgctgctcacagttctcctatgcatatatttgctgcattcctttctgagatatttgcctttgcaacgtcgaatttgcaatatttctctatgcaattgtttccttgtgttacaatcagcttaatatgcaagtaacatcaaaataccccagatgttaccctgacaagcaaatcatttttgccacaaattagtctatgacagctagtagtagttggcacttggcaaatcgtgttgtctgcttcagtttgctctttgctacacactttttgccgagagaagtagaaagcttttaaattttacaaagaaatttctttttttcctatgttaattcaaattgagtcaatcatatggtgattcgtgaacgaccatctagcttcaggagaaattaacgatctgcaaccgggtttcagaggaagtttctctgcaaaatgcatctctgatttacagtggagctcgagaaatgaaatagatttaagtctgaattccaattaatctatccatagttggacgcagggctagtcactgattttggcaagtggcaactgattaatccggcccctaaatggcacagtgaattgatgttttttataccgaagggcaacaatttgtttagatgtacaataaaattatttacgacttgttaataatgtgaggcaataataaagcattcactgtccgtagccaacaatataggagatggacttcaattgtgcaatataattttgaagaataaatgaaagaaaaaactgtttttcttttctgaaagttgaccaaaagtcatcattccaagtcgttgccgtgtcgtgtctgatacatcatttttgttttctctatctatcataatcatcatcaatccatgtgtatctttagcatgactgaacaaagttcgccattaacaacctgacttgcctagagccatagcagcctgtgcatgttcatcccatacggtaacaccattagctatgttttcttgtgctttgtactactgcttttatgcctttatcatcctcctttctacctcccatgccgaagaattcatctacaatggattcactgatgctgatcagctaacactcgaaggtgaagcttcaattgacaggaatcgcttagggctaacaagtcgccttaacataggaggttttggccatgccttctacaagtatcctctaaactttagaaagaactcaaatagtcccaatgacccctcctttgctacaacattcgtgttcactattactacttggagagatcagcctcaagaagcaggaagtgatggtattgcctttgtgctttcttccaccaacaagttgataaaccactccttgggaggtcagtacctaggccttttcaatgcgtcgaatacttcacaaaatatattagctatcgagcttgataccttcatgaatcctgatttgaacgacatggatgataaccatgttggaatagatgtcaacagcttgatttcaatcaactcccataccgctgggttctacacctctgatggtggattccaactccttaggcttgccaatggtagatctccaatattgcagctatgggtggactatgatggcaaagctcaccaactaaatgtcaccttaggtcttccctattcccctaaacctgaatatccgctactttcgagcatcgtcaatctctcatccttgttaccaagttcttcgtacattgggttttccgcgtcggtaaattcaccgaaaactagacattttattctaggttggagcttcaaggaaaatgggagagtcccaccccttccttcagtcccagtcacagacccagaaacatatggatggggaggcaacttctttgcgccaccaccacctccacagcttaacacacaccaagttcacaaacactccttgcaaattctcctaccaatagttatgacttcagttatcttgcttcttcttgttgctttccttggttggcggaaaaaagctgggccacaagaagactgggaaatgaagtgcaggccaccatctttcatatacaaagatttatataatgcaacttctgggttcagtgacaaaatgctccttgggaagggagggtttgggaaagtttacagaggatttcttcctgcctctaagcggaatgtcgcgatcaagcgcatctccccagagtcgaagcaagggatgaaggagtttatgtctgaagttgcaatactaggcaatgttcgtcaccggagtctttcagttacttggctatcgcaggaacaagcacgagctcctcttggtttatgattatatgcccaatggcagccttgataaatatttgtatggtcgacacaaattggctttaggttggtctcaaagatttcgcaccatcaaaggtgtcgcgtgtggactcgcttacctccatgaggaatgggagcgtgtgatcatccatcgagatatcaagtcaagcaacgtattgcttgacgaggaaatgaatggaaggttgggtgattttggccttgcaagattacatgatcacagagttgatgcctacaccacacatgtagcaggcacatatggttacattgctccagagctagctaggcttggaaaatcaaccaagggtaccgatgttttcgcatttggggtgttcatgatggaggctgcacgtggaaataggccaattgaggtgaattcctgtggagaacctcaagcgctagcagatcatgtgctcaatgcgtggcaacgcagttcaatcataaactccatagatccaagtctggaagatcacgttgcagaggaggtagtattagttttaaagcttgggcttctatgttcacattcatcgcccaaggtgaggcctagcatgcgcttagtgatgcaatacctggaaagggaagcaacgctccaggacttcgcatttagtttcttcagcatcaatgaagctaataatgaagtttatggtcagcatgttgtatcaaatccctctgtagcaaccaccataaccactctttctggaggaagatgacggttgttgcagcatgtattttctatatgatcatatacaattttacatcattgtgtcgactgtaatacaatgttgaaaaaatactaataattgttaatccgtgctcctgttccttgtgaaatacaccaaagagctgttcaaattgttttcgctagcacattacgaaacaattgtagactttgttcacaaaccagaaggagaaatctatatcgtgatgcaggaataatccgattgttaatcaattttacaaaaatcctcgtactatccaattaacaaaacgagattaatcacatcatggaataatctatcacgcaatagattaattttgttccattggaaatctgcagctcaatgtagattattgaagtcgttacatttgtgttcatcgctggctaacacaacaacaggtaagatgatgtccatacattttattttcctaatcatctaacttgtacatacattcttttacactacaacataggctcccgatatgagtcactacacttgccctatggaatccttctaattaactagtgtggtggatgtcacaactactgtaaatcaaggaatgattttgctacaacaaacagctgatcatcagattggggaacccagattccttgatctgatcccaacagataaatggcatgtcctaactcctaatgctattcactattcacgagaaagggtggcaacaagaagaggagcagcttttgtagcagagcattaatgtagatggtgaatttcaatcaaaccaacgagggaaggaactcaaatttgtgccttctgacaagggtgtttgactaggcaaaccctcttaagtcatgggagaatgcaaagttgggcggcagcaacataaggggatcgtctccagacttcttcaggtaggccatcgccagggcgtatccaagtgctcgtccaacaggtacggccaccgcatttccaatctggcgatacctgcagccaggctcatcacgtgtaacctgtgctaaagaaggctcaaaaactaccagtagctatacatattatcactcctctttgggcaagaggaccgtgatctgcacgtggacatactgtcaaccttggccacctgatccaagttctaattatagggtcgactactcagggtatctgaatgcattgactgctagaaaagaaaaggcgcatccaaccttggcccccaggaatggaccccaaccctgaactacaaaccctgaactactaatcatgtgaggccactgaaccatggattttagctgaagcggtgcaggtgttccactggttttgacatgtgtcgtgaattaaattttggctaacatagcaccccaattggaagaattagcaaagttatagccctcacccatcagtccgtatcttctacttctagcatcctcgactacatgcaactcctctctgcacgcaaccacccatcgatctctctgaaagccctaattgataagctcatcctttttcaccatgcacatgatgaccaacagtaacagaatcttaatgatgacagcagtagtgagctcactactgttggccacgcaacaaatgttgctggcggagtggcgatagtggaccttgaggatggtgacaatggaaatggtaggcttcagggatgacagcagcagcggaggaccttggtgagggaggttcttcaggaagagggcaggagaaaggaaagtaaacaagggctgctttggccactgacgtggactccaaatcaaacaactaaactatccatgtatatgccacctcagctaattccagcttcaaatagcattgagtgggtaagttacttgatattgaaagttatcaatggtcatcctgtcttgcagtacagggtctttagtcgagggatcaaaagtacccaaatgatattatttaagaaaacctcatacgtgcactaacaataaatcgcagaattcaatagtttagatatgccaattcatagagcaacatggaaaaaattgagcccttcatcactcaaaataaaaaaggtaaagacaaacaagtacctgtctttgactgttccacgaaacctgtaattgtcaggaaagccttgcaaccgagcactttcacgaatagtaagcagtctgtcttgtgcaggatgtatcaaggcctgaaacataccctcagtaattattttgaatcacaaccaaagtggataaaagaaatgagagaatcaaagataacctgcatacgggcatttggaactgtcagcacggttcccactacctcatcccaccatactcgaccaaaaggtctaaaaataaattatagaacgaacatataaagcataaagaagaacaaatatgtctacgaacaacacaactagataaactgaagtttggaaccaaccttaaagatttaccattctcataagctagtatgcaatcaagcacctgacatgaaaaacaagaacccatagcatggtaagctaatcaaaatttgcacaaacagaggtatagttccacataggggagttttgtggtttcttgttaaatgtcttaccagaggacgaccagatggcaaaagtactctttctttcgttggatctaatctagccacattgtcaggaccaactatgactcctgaaaggtctctaaaattagctccctgaaataagacagatgagactataaggtttaacctaccaaacttaaatctgaatgtaaaaagcatttcagccaacctttctcttgggaatttgcaatatcctttggtagttatcattatccagtaccaatggtcgatgatcatacaattttgaggatttggaatcttttgtaacatgagctctgggaccatgcacttctgcataaaatttcattcgtgagtttctgatatagctacaagaaacataaatataattggtcaacaaaaggtgtattagttaattcttggaaaaaaaatggaacaccatatagagaaaattaacacctaaaatgttaaattattacacccatcatatgctgtttttcaatatttcgccaattgaatgcataactccttgttccatattttacaataattgctattaaacagacttataaatgatcatgggaaaataaactgaactctgcaacttagtttctttctttctctttgctaagaaaactaatctagttattattatctgcccccatgatttggacattttaatattcggtgtgtatgggaatacatattccttgttacaaaaccttaattttattatccaggttcaggaggaaaatccaagtttttttaccagaggggaaggcgatcaactcaccaacattaaatgaccgaatgtatctttggaattcagtttgaggaccctttacatacagcatttcatcacggctttccccatttgccacctaataattcaacttaagtatcaaaatgccattcaaattagatatttcaaagatataatgttgtcagttacttctgggagatcagaaagaatgtcttcaaggacaattggtcttgctagttgcattggtgtgtcattgggccaaccaaccaaattacgctacaacgagaaagaggaa

SEQ ID NO: 15294 - DNA, 1237 bp, Oryza sativa
cttgataatgcattgcaactagccgacttaaagcatatcttgcaagtgttgcatcagcaaatttcaatatatcaaggacgttttccatgtacacatatttgggcttcaaaaattgcacaacatccataaaaactatgatctgcttgtttttctcacatttaaatggtgcctcgaattctctattgcggttgtagccactaattccttggcatggtggacccccacatacaacgtccacatcaccctgaacacatgataaacatgacatggaaatgaatatcaaagagtccaactgtagcaagtatatgtaaaattaaaataattactcttatttcctaaaataattcttagtagttgtcgatatgagataaagtatatttgtcaaagactgaattgatacgctggtattaccggttggcacctataccatagtaatcaaaatgttaagtacatgtacccttgaaaaaagctacattatattgatttaatttgttttcatgaatgctaactgtgtatggaagcattttccttcccatttatttgtttttctgtgtggacacataacatttacatgtcttagtctaatatatgatgatccaagaaattaacaaatacaggtaacagaaatatgtgcttcaccaataagctgagggttgttcgtatctcgggtatatgggttaatctagtattggagccaaattcaggttcattgtgtttgagtggattaactgatatgtactctatatggtcaaaaccaatgtttctgacatcaaaaccaccctaaaacataatttaaccaacgatttatatgctacctaaaaaaaatttgagtttatctcatataggaaatttatttttatacaagaggtctatttgaggatgtctttgtccatatttcacaaatataaacatgacctatcttaatacttccccattaacattttaattttagaataatttaggtcgttgataaatataatatgtaatctaatcattaatgcaatgcatattgttttatggaacaaccagtcctgcagcaattcgcgtaacaactcctagtaacttaaaaactgctactcaacctgaaagaaattaatgaaaccaacataaaatctgccatgatgccatcaaagaccacttggaatctacatttgtggctttgccatcgatactttttgtcctttttctctatttagttagtcaagagaccaatttaaccttctactaaaattaattc

SEQ ID NO: 15295 - DNA, 24375 bp, Oryza sativa
accacaatacaggtctagcaaagagagctccatcttctctagcacaggagacttgtgcttcttattgacatctatcttcttcattttgtcattgattctactagtgtaacatgactgcattaaatcatctgtgtcttctgcttttcaagaaatttaatcagaataataggcacctaaaagaaattattacagatgaaagaacagaaaccatgcaaaatgtaatttacaagacagtacattacagaaaactatgatcaataaaaaaaaatgctaattcaaacaactgcaagatgtagatatcagcttacaaacagacatgattggctctgtgaagcattcgttgttgagaatactaacccatttctatggtagagaatgtactatagtcgatagagtatttcatgtcatagtaatagtcggacgaaggaactgactttgattttccatctacctgtaaataaaatcagaatcatacgtctcaatggaaaatgtttcagtagaacacagccatcacaagacaatatcaaaactgcaacatcaagccttacactaggaggaacttgcacgattgtcactttcgagacaatgcagtccagtaaattgtcatctgtcaggtctgagtaaaagagcctcctcgggtcatgtgattgtgcttgctctcctatgacctgagatcagtttagaggtttaaaccttaaagcattaaggaaaagtaacataaacttgtctgtccgcttctatttttacaagctgagaaatgatgttatggttacagtactccaggtttgatgcataggcaatataaaacttgtcaaaacaagcataatgttttagtcaaccagaactaaccgtgtcttcagctgtgaaaaaccattgcactctgaagtaacattcaccagtttttgtttcgaagaactctagcaacctgccaatataatttggttttccctctggaccctgcaaaagttaaatctattaaacttgtgcaacaaaaatattttttgatagcaagataaacattacttcaatataagaaagcagtaaactcacaaaaaacataccctgaaatcaagcatctgtagataaacatacataaagactacacaaaaagatacggtaactagtctgcacaattgtacagaaggacaaaatgaacataagaatcatttaagttatttttcctcagggaagtcaattttatacaattgaattgaaatgcaatgtgtcactgatgtatcatatctgaatcaaggacctaaatataggcctcacaacgagtgttgtattgcggatatggatgaaactcagtgacagagggtggatttatcctttttgtgaactagtctgtcacgttggtcagttaaaagaatatcaaccaatgaagacgcaagtccataaaagctacagaaacgaaaaataaacatatatatctcaacttgcctttacaaatgcgcattctccaatgcaaaatgtgtatctggagactttggcttgtagataatgacatttgacatccaagacagctttgccagcactgtaatataaggtagtgcatatagctgttaccatgaatagcttcaattatttatctgatataaatattgaaaataaaatagtgcatttgggctcacttggcaaatgtttggctgctggtcctcttatccttcaagaaaacaagcaaaaaaaatgttactcacttaaatttaattgttataggcagcatacgggcagactatataataccattagcaaattaaatgtaaacccaggtgtagaatagcaattcagcacctcgcagtagtgccacaaggagacatccagtaacaaaaccagtcgtacagtcagtaaatagtaacatcagaaggggagtgcagtaacacaccactggaaactcattaatgagtgcactatgtttgaaacggcacacccttcatgctgttactccacgaggagaataactattctacacctggacgcaaaatagagtctaagtgtacaatagtgttgtccataaattctttatatacaaatatccaaaataacaaacttcagatgaaaccctataagctgacaaaaaatgtacaagcatgtttatgttcatgtacaactatgagtatggctccacatgtcgaagatttttgagattcacttagccacatctatgtggggaaacttcttgcaagatatcggtgtaatataatagataaaagaaaaagaggcaacagctttttcacacaacttctgtatttatgcgttattttatccttttacaccaaaatttactgccattcaatcttcaaattaaacctttcatctaaccaagttgagtatcctatccagattctagatattccttatcttctcttatttatatgttcatattttaatcacggccaaatttgctcctggcagctaatcaaggcaatcatttgttggttcacactgcaaaagtcaatctttgcagaacactgctatttcatgaccatttgacagaggttactgcagctgatatagcaccacttcttgtcacgagagagaatgaggtgaaatgacaaatttccccttcaaccatattgcacaaatattggctgaaccttaaggtgctacaacttgcaaggtgggtgagattaggcactcatcttgcaaaatgctcaaaaagtcacacaacttgagtctaacgcatgccacacagagtgattgcgtaaaattggacacaagattggttgcctgaagcacaaagcaatcgaaaatggacaaattgaacacaccattgctgttgggctcccggcagcctatactaggacatcaagtttatctagagaatgtaactgtaccatatgctgccatatgttgctcttaggccgacttgggcatgctcggatctcatcaatgatcaaactttcactttccgctcatgtcatgagcataggaaaacctttccagtacaggctagattcccaggtgaagcctgctatcaaatagctatgaaggccaggcgtaggcttgttggggatcgaaacatacccagtgtccatgtcagcgcccacatggcatgagttggacttcatttggttagcatttggcaagatgactaatacgatcactgtattttattcttaatataaaacattgaaaatcagaattttcaaatttgaacttaagaaacacttttacaggatattgacttatccgcattcaagttttctgagcttgaatttaaataattcaaatttcagaatttttattctattaaattttggatcacatttactattcaaatagtataattatttatattttaaaaatcataatttttggctaaaaatcagaaattagatagtttagaaatttatattgcctaaaattcaagttttgcattctttctttgaaatttcatatttttaatatccttcttagccttgtcagcgtcaaagcttttgatgttaaaagggatcatctatggacattacactctccaacaatggaatgatgtttccactggcaccaaggtcctctgggttctaggtaatgatcacacaataacagtgtcctatggcaaagatcaaagatggtgatgtaaacaaataaatgattgactagattagcttctgtgggcaagtgttacctaaaatcaattttcatttatttgaaccgttgttcaaactatgggtaagaaaatagattgactacataggagatgcagccttccaaacctaaaaccaatgcacgagttataatttttttcttgttattctttctgtttccaactgatgcatagcttctcattcccataacatacattggatgtcagagcttgaatatcatctaaaaggttgaaaccataagacacactggaacatatataggttgatattgatcgatggaaacaagtttattaatatagtcatatacttgtatttatatccaccatacaatttttatgttctaacatgtactatagtaaaatgaatgtgcaaacaattacatgtttacccatttcacatctatgctttctgacacttccttccatgcttgaacattattgttaggaatacaaactactccctgaattgtatctgcacgaatcagcagttctcactattgtattgcatgtacttccgtgacaaagacatgaatagatatttcaaagagaactcctactcctagggaaatatgaagatgatctacttgtatatctatttaactaatctgcaatagtccacatcttattgttatattgctacagaaatatggcgatgaagtcatgcagagagcagcaaaccagccaaatcacgtgcatacctttttcatgatttgatcatttatttcgtaacggtgaggccactgcttcctagcctcatcatcaggaactgcatcccccacaaagaaacaggaaccatcgtccgtttccaacatcactgaatcaaccatgtgcttgtccaaaacaagttcgtgcttagtgctcagttctggtattattggaactcttggtgatttggacattgagccattattttctggtatcattggaactcttggtgatttggacattgagccattattattattgttttctgccctctttaatttttccaagtatttaaccgacaacgtcctggccctctgtgtctttggaggttgaggggatcttcttcctctcccttgaggcgtcttgctgaccactcgtgattttgcacttttcaactttgagttgcacaacacaataccaccaccatccactccatccagacttgtcaagcactcttcaacagcaagcttatgctttttagtaggtatacaaacatctgatttctgcacaggaggtccaccatttaccactggtgatatagctgacaccctgtctgaattcaccaatacctttgaggctaacctagtcttccttcgaggaagaacagaagctcctttgtctttcaacaaactattactcgctgctggtaaagccaccacaacctgattgtagagaccacctgctttctgattattgtcgtaagaggaacttacgttttccacggcaacaatttcttgcaatccttgaaccttcaccccgttaatcaaatcaactgtgtttactgaaattggccctgtgaacgcagggagtttgctcccttcactgcttctactcttccttgaatccgcaactcgtcgcttggaagctctagatgagtctccattctgattcaaaggcatggagctcgccgctgacttgattttcatgatcctccgtgatctccgcagagctgtaccatttgcacaagtagcatccacctcgggatccttcgcatccatggttgttccccaagcaaccgaaggggaagaatccttgataggatcctcagcccccaaaccgacctcatatggggaagcaagaggtggcgatggcacggagttgagcgtacaatcgagcattctcccgtctaaattggcttccgaggaagcgacagacggcggtagtggagactccatcgccggggcggagtcggcgacggggtcaaacccccgcgcatcaaaatccaccggaggagacgacgatggcggcgggtcaggcgaacaatcaacgccggaatcgagcgcactcacctcaggaacgtcgcccaacgaagccgccgccgcccccgccggatacgaatcgatcggcgccgcgggctcgaactccgcgaaccccgcggcggccgtggggggaacgagcgcggtggccgcgccctcgccggcgacgaccccggaggacctccagggcgcgccgtcccatgggccccccgcgacgtccatgatctcgggctccacctccgccgcggcgaactcggcccccacgccgaaccccctcggcggggaccacatgggctccagctcctccggggagccgaacagggccgtccacagcgaatccagcccggcgctgaacccccccgcgtcctccgccccgtcgtcgcctcccggcgagccctcgtcggcggcgggcggcggaggcgagacggggtcggggggcggggtctccatgggaggaggagcaaagcacgggggcaattcctccccaaccaccaccaccaccagcgaaaggtagttggaagtcaatcggcgtgtccagtggcattcacttgctgacttcgcgttccacacgggagggagggagtcgcagttgccacgagtcgggggggctttgcccgaaagagaattgtggtttttcttttttcttttttcgattcgaggaggagagcggcggatttgagaaactgaagcttccatttctgacaaattcatgtttgttttagggccaattttttttttcagcttgatccccgggaggggaaatctttggggaaaaaatttgaaattatactgtttatcgattgaccggatagcgaaggatttgcggaaataaaccatcggtggaagagcgataccgatgttcgctcctgaaaagtgcaatagcgtggcgaaatcgctatctgaaaaagcgatagcgaagttgagctggcgctctcgcgccaacgagacgcgagaccatagcggtatcgcttttccctcacgtgacagcgccacgtggagaaatccccgcgactacgttgggcggagccatcgctctcgcactttcgttgcgcgagaccgaggtcggtatcgtaatatgaaatcgcgagaccgattatgacgcgacgggagagacgtgggcacgcggtatcgcgctttgcgtgcgcgagactggtgacgcggcatgcgcgagagagagaaagcctgggggagggcagtgggaccgcggcgtcacgctttgggattgcgagaccgatcgcagtgtcgctatacgcgtgcgcgagagcgaggagcgcaatggggcagcgttgtcgcgctttgcacgcgcgagaccgtaggcggtctcgctctacgcgtgcgcgagagcgagggtatcgagagagcggcaatgggttcagtctcgcggtgtctcgcggtccgcatgcgcgagaccgtcctcggtatcgcgctccacatgtgcgagagcgacggcgctttccgcatccgacgccaccgacacctttatttcccatctctatttctttttgctttttgcacgggttctagccatctaccttagctttttagggaggggtggaagagctctgtgcactctcttatcagtttactgttgtagtcacatcatgccggccatttgtaaccgctgtagcgttcgaatccaatgcgctcacgggttaaattgagaggagaggagatggtcctcacagaggaagatagaagggactgaactaaggaggagaggaagagcaagagatgcaggcagtggagagaaggaaaaaaagacacgtaagttgattagttttctattagcacaaattcgtatgaggatttagaaaatattagttcacgtagttaatatttgtttttaattatgtcatagaaaaatttaggtatgtattagttactactacattatgggtgtgtttgaggagaaagagattggggagattgggaagatacgcaaaacaaggtgagtcattagcgcatgattaattgagtattaactattttaaatttcaaaaatggattaatatgattttttaaagcaacttccctatagaaaatatttgtaaaaaacgcaccgtttagtagtttgggaagcgtgcgcgcgaaaaacgaggtgctttctcatcctatcttacacaatcgaacgcaacctatattttgttaggttgcatataaaaatagaaatgtagaagttgatagagtcgattcgggttaaaaaataggtagacataattaatttataaggtacaaaagtataatataagttacaattaatttgtacctagtagtaattataagttataattaattagtagttcatgtgatgtttaattttatatatacggccaatattatatgtaacaaatgaaaaaaaaactgaaatattaatagttatatttgtagttattgatattgatattaatagtattgataattattaaatatggtacaaaaattaaattaaagttgtaattaattcgtagtaattttaagttacaattacttagtagttcatgcagttatttatttcgtaagaaatggaaaaggtataaatattcgttaagtagcgggaaatatatggtgtgcttaaacatatgcttatatagcatattgtaggtagttacgaacgaacaaagaaatgcgcggtactacgaagaactttgaaattggaacttttatatgagcaaattggttgaaaagaagaaggcaagacaaggtatggtactataatggaagatgtagtaaattttttaatagacagtttgtattttatttggtattgtaattaaagtccagttatataaatttatgtcgctgcaactagttttatactataataaattggtagttatgattaatttgattgattatgtaattaatcaagtgaagttgaacttagttctattaatttatcatgttatgattaatttatagataattttgtactaactgatagttacaaatattttgtatttaagtaaagttacggtccgttagataatttatagttaaagttgtaatatattaaaagtactaatccaaaattgcaatagtagtattgtttcagaggtcatatctaagtaggtacaaacaatccgtagcaaagaatatgatgcggctcaatgagtgtcattgtcctagataaagaatagaaagagctaaccaaaatgatttttaacttagcttccgtcaatgtttcttcggtgcacgtagtcatttgttgtattaaaattaattgatatgtataattaatttgttagttaaacatatggattatgcagtgaaataaactttgaggcagcaattgttatacgagcaagctggttaaaaaggagtaggcgggttctgataaacgcaggtaaatattttgtcatcatatttatgtacgatatgctatggttgtgttgttttaagtattacatactcttttacttaaattaattgccatagttatgtttaattacgtgttttaatcaattaatttgtattaaatttattgtcatgtgtctattttttatgtcaaagttgtagtaaaattataaataatgaattgcattgtcatgtattcgtaagtaaataatttatgtttacgtaattatttatttataattttcttattacaagtacatgaattttttataaataattagttattgataaagatttttttatcaaaaaaagtatgcgtgtaaactaattttagttgtgaataggacacgtttgttctgtaaatcttccttacggagtagtctgtgttgtctgcaatggcaggaatgtcggcatttagagtgtatttcggtgaaggtgaaattatggaaaatgaaagtgttaacgtgatctgagcaactttaggcaatgcacactataccatccaaatcctgacacccttaccatgcccgaagtttggtactggttaacatgcacattttctttagatctgggtatatatagtattaacgtgagggttatgtggagccgatcggccaacaaaataggcctggcaggattggctcgctggctataggagacggggatatgaatatgtcatgctggtgcaagcatgtcaaggaagagtccccacggagaacgcagcggggcaatccagcaaccgtgaggagttggggtctagttcacacgaagaagatgaagttgtagctccccatcgtggtggcgatgttggtcttgacattcaaaatctatccatacaaggagatgaagtggtcaaccgccatcctattggtgaaaccgatgaaggggaggacatacctgctatagctgaagaaattgagagggtggaccgacatgcagtcgaagatgaggaaaacctcgctgctgaagagaatgatgacgaagatgaacaagaagttgaggaactacctatgcctgcttcgtggaaccttgaagaccctggttatattgcagaaaactcttgtcatgattcaatatggttctacggggatggccaaatcaatctaggtgcaatgttccgtgacaaaactgggttgcaagacgcagtgaagtcatggtcattccagatgcaaaggcagttcagggttgtgaagtctaacaggactgagtacacgatcgtctgtgagacggaaggttgcaccttccgtcttcatagtcacgtgccaaagtacgagtgttattggattgtgtccaaactgcaggaacactcctgtctgattcggaacactagggagtcgcaccgcaacctgaccgcggcatacgtcgcgaacaagtactacgaggaaattattgaaggtgatgacactgcctgtgcggcacataataaaactggtggagaaaggtgaacaatacacaattagttaccacaaggcttggagggcgaagcagaaagccatggagaaaatatatgggacatttgaggaagcatatgacacactgccacatatgcttaacattctaaagagaaggaaccctgggacctatgttgcggtgcaggatcgggagtcaatttatcctccaaattatcttgtgatgcaacgggcattctttgcattcggagcatgcattcatgcgttccagtgctcgaggccggtgctgtgtgtcgacagtactttcctaactgggaagtaccgaggccagatattaacagccgttggtgcagatgcgaacaaccagataattccagtagcttttgcttttgttgaaagcgagaactacgaaagctggttgtggttcttgcaacatttaaagtggggagtggtgcaaaaacgcacatcgatatgcatcatccatgacgggaatgccggtctgttgaaggcaatcaaagagctccaggaggatggtgatggtgcatactactggcctgacatgcacagccgttggtgcatgcagcacatgggagacaattttttcaaacaattcaacagcccgcggctgatgaacatgttcaagcggttgtacaaggaaaatcagtctacaaagttcgatgagctttggaaacaacttgacgaggggacaaggacacatattcggtcaaagcagaccaataacaacccgcaggatgtacgtcccccaggccctggaaccaatggatgatcttattccatcaaatggaagaagcgtaggtcatcaaagaatatcaaatgttttacccattggattgagtgcgagccgaatgataagtgggcactcctgcatgacactaatgggctaggcatggcataatgaccactaatcttgcagaggcgtacaatgcgattcttcgcaaattaaggcctttacctctaactgctattgttgaaggcattatgtataggacaacgatgtggatgaggacgaggcgggccgtgacattgcaacaaatgtctaacgcacaaacacctttctgcaaaaagatggcagagtacctccaagagaaggctaacaaggcaagatttcacacggtcattaccactgggaacatcagacaaaggtgggaagtcacatgtcgcactaagggggggtttggatcttctactggggtcatcactcatgaagttactctagggcatgaatctgataacacatgttcgtgctcttgcaataagccgaagcttcttcataagccatgtagccatatcctggccgcgtgcgctaaaattaagtttgattcaacatcatacgtgtcgacattctacctaaaggatagagttctgaatgcatgaagtgctaagatcctcgggtggaggtccctccaacacctagtcgaaactgggggtgataaaaggatctatgtgccagatttggatttgttgaaggctggtaagggtagaagacaaacacgacgcttaagaaatgatatggatgcatccgaagcgggagggcctgtgaggcgatgtgaggactgtcttcaatacaggcaccgcactagagattgcaagaataacaaggagtgtacatcttcaagcatggaacctaggcaacaacgtgcgaggaggaatagaaggggctctcagggtgctcacgatagggaggaaggaaacctgcagtagttataacctacactgtccggttatttatgttcggtcatgatatgtttgctgcatgacgttgtatttcaataagtttgtaatatgttagtcaataagtatgtgtaatatttattttattatggtaatattgtaagattttattgtaaggtgttaccaagtttgtaacgtttgtaaacctattgttgtactatttatttcgtaaggtgtgctcgaatttgtacttgtactatgagaaaaatttattccttaatttaatgcattatgtactttttcgtatgtgcacttgatgaaatttctaatttacccttcatgatgtacatgcagatatggaagaggagtggccttacccgttgcttagcaaagagatcaatgcacgacatcgtgcaaataagatatctgatgaaaattcttgctctagtctagctgtcctgataccgcgtacagccggatggtggggtattgatccacgatggaagccgaggtgcataaatggttaaagtttgcaacatcatgatatcgtactataacattgcctaatgtgactaataaatttcctcataggttgtcagctacaggtcttcttacctttgttcagatgacgtaggcaaggaagcattacgatgctagagaacctaaacaaaaacaaatgggggcacaaagcaaacgacgacaaaatatcgacaagtccctacttatggcactggttgataggtggaggctagagacacatacattccatctaccgtgtggagaaatgaccataactttgcaggatgtgtccatgctcacggggctgcccctagccggccaggcaattgtacttccggaccctcagaagattggagagatgatattgtatcacgatatgcatgtattttgccacagtacgctaccggtgatacagacgatgatgaggacaaaatatttttctctgaaaaagaaactcatggccccacattgacgtggttgtcacagtttgaggtaattgaatatttttaattaaggcatattccgttcacattcacatatctcacaacacattgtttttttgttagctgagatatatgcccgacgatgtccaggagtaccaactgacgttgtaccttgaggcttatctactttggctgtttggttaggtcatgttcaccggctcgcacgggaacactgtggacgctagactaatcctccttgctcgccaaattgctgaaggtaatatagcgccttctgcacagtttagctggggatcagccgtccttgcagccacgtaccgtggattctgcaatgcttgtattaagaccggacaaagggaggcgattttcacggggtgtccacttttggtcatgttgtagtcgtacgagcacttctcgttcggacgttcatacatgagcatggccgtggcccaccaggacgattacaagggaagatattatagcatttcacccggaaatattccaaggtattgtatttatttaattccaagggaagatatgataagagagtactatgataataatttacatcacttgtatagatcaaagtctatacaggggttaagcaatatttatcggtagagatatgttgacacacagaagaagtaaccatatttttctcattaaaaataaagtctaagctaagtggagaaagaaaaagaaaagaatcatttctgtacttatagtatatagccattttaatatacacttgttagtatacaacaatgtagccaatacgccctaattatgccctcctggtgttttgagagaccacccctgattgtcgagtttcttacggcaatatgtcatggccatccaaccggtaatgaatacggaagaatacccacaccaggaatttgtcttagtactatatacccacgtggaggaataccctgccaccatcagcggcccacctctactgccccgtggcatataataccaattaatgatatctaataatctaagcaccacgcatacattactaaatactactccatatcgctgcagctgacatagagcaatcatcgaaagcaacattaaacccacaccaatgcatatctctaataagctagccaaatcattatatcgagacaagtaaaatataaagtcggtactcagatataaatgaagtaaatgaccgaagctatgtaaaaaagaatctttcattgataatggtatacgtcttacaaaagaaggaatagctactagagccatatccgaaatctcctgaagactcgaagaactaaggaaactattctattcctactctactagcactagaacaaataactaaacttgagagagctctttattcttcttcttgagtgtgtgttagagtggagtgaggcctcctccttaaataggttgccaatgacggttgtggcggttggaattgtctaaaatgcctcgcaaccgtcattggggagcaatcctggatgttcacgttgaaggccgagatgaagggcctcagctagggttcggcgaacctgggccgacccctctggcctccaattttggccgaggacttccttgttgggccttattctttgtggcatggtagttgggcttatttgcagatgttaaataagttttgtaagcccaaacatccataagtctgccactcggtggtcgtcgattgattgtttgattattttcgactgattctcatccgtatatgtagaaatctccgtgttcaaataaaattccaagtacaagtggaaatagattatttctaacaaaatatgcattgcaggtatagctagttctcctttattccgattatattgacggtcgaaattggtctataacgactgtcaatagattgcccccacaagcatgcctggttgaaaggttatagtagtaaagtatttagttaccaaggattagtttgtcctcccaaaactatgaattactttgttcttctgtgcatgatccaacgatctcacgatggtggaagggcaaccacactgggacacgtggatgtccaaatcgtctctagcacgagatcaaacatacgatagcggcgagaaccagtgcataattaacacgaagtgcgggggcttttttgcaaaaataactgatgacatggcacacgtaattctccagcaatcccacggaatttagagaagttaatatttgggatttgtctattcagagtattttaatttcaaatgaatgcttggcatccttgtagcgaagtgtaatcaatatatgttgtcatttctcagatattcttgagatgtatgtgttatatttcttgcactttatcattggaaaaaatgttattatctatgacgatgtctcaaggtggtggtaataattcagtgcatatggaaattagaactatatatggaaaataagcatatgaacatgaaaatatcgattatttttaatgcaaaactatacttatagaatatgcctctacatattatcttatcttatcttatatagtgaaagcagcaagcgttcttgcacgagaacacatgagaatacagcacatcatcaaaaacatatcaaccgttgaataaagagtttagataaataatggccattggatcacaaggttacatatgcattaaaaaacagcaatgggataaacgtatgggaatttctagaggtttctagtgccttctcttagacacatggtacaaagaaagcgggtgcaaagataatgaaggaaaaaaaacaaagaaggttctagtgatttatcatatagtacgactagctaaaccaacagatactttgtaaataaaataactcatcaaaaacctccagtaaactaatagatcctatacaacaaataattcttatacggaatcaaaagtcgcgcaacgcgcgactacgtggcttgttagtttgaatgtaccaataaagtatctctacagatacattagtttgaatgcaccaataatgtgtctctacatctgtagagacatgttaccagttcactgtaaaatgactccacctacagaaagtgccgctacatttgttttgacaaatgcagcgtctctatggcagccacatatctcatagaggcattttatagtgtcactatttgttataaaagttagtcgatatagtggaacgacgactaaccttcccgatcgcttcagtcattgatcatccaagacatgtcagatgacgacacaggaacacacgatatttgttaacgaggtttagccgaagcctacacccccggggctctgattatgggcgctcctcccgaaccaatatagctcctagccgctacaagtccatgcccacgccaccaccatctccctacgtgtctacgctacattgtagtcgccatggttacattgtggtgccccctctctacttaagagagatgccgggttacagagtccgactctaactccaccccgtaacacctattacaactccaagtccaactgtaaccaaataagactagtatattcgacacctattctaacaaacttcaccttggcgaatatatgccacctagaagttgtagaatcaccataccgatccaccggtcctccagacttgggttgtcttctttgcagcttcatcacaagccgcccgacgagtctgcaccaaacccgcgcctttaagagattctgctatccctgtaatttcttcctcttgactccacctgcaacagtgctccaccttctctcatatcaccacagtcgtcttgccaagcgaaattgaattcctttctagctgtcacatcatagacttcccgaaaaccatgttccactccatctaccatcttaaatttgacttgatctaatccatggctagataactgatgccatcaccaaatagataaatcaaactcaccagacatgaagaactgaaccctttcgtccttgtcgccctatgaaccgagctaataaatctaacatcctcgctttcccgcatccgcagactaaacccatgatactttgagaaaattcaccgttgccttgaatcacttgaagaattaccacgatagtgctcactcttcctcttcagtgacgtagattttcatatatccccatcatgtcgacccgcatatcctgaaccgccaaacagtatcgttgaccccatcaacgatatttgacccgctgttgtccggatcttttcttcagtcttggcttaactccatgtatctttaactcctcgccaagtcccagatatatcctgttttcgccagataattccatatgcaacctgactagcctgttgccgccagtctactcactctttacacttgcaaactatccatccgtagaaccttcttgtccttcttatgaatctgttaacaagttccagcaacgaaccacacgtccgttgaacccggtttaaccgtccaagctccatagtctaaccagtctgttggtctgaccaccctgccggcccaatttaaccgtcatacatgcacacctcacgcaccttctcctaagccatactcacacactgcaccaccttgatcacaacaaaaccgcaccatgcatgcctcactgtgcccagccacctgccgatgcaccgctgcgccaaattgactgcatggctcgcaactccactgcacaacatcctctcgtgcaccaccacgctgagtatacagcgtatctactggtgttggtttttcacgtgaccttggtctagtagtgtcattctcatgcatttaatggtccaccgtgtcacaatagcccatgcacttaattacactactaattacctcttgcatgcaacaagtaagctcagtaccaatccaaagtcagattgccacagaacctagccgagcctcctaagagattgattcagtttcgagcttgcactatcgaatccagattagactcctccatgcagtccaatcagaactatacgtgtcctgatccaagtcacgactccatcttcgacacgacgacacccctgcaatctccgtttgcgatcgttctctttgctcgctagttctgctcatggcttcctgctcagtcaccgcgccctcgtgtactgttagagtatatggtagttaggatcatattaggatatgattgatttgtgtggactccttccatatatgtaatccttccttatctcctcccccatgtactcctatatatatcgcccccctgaggctcaatacaattgtgatccacgttacacagtatctctctcatactatctaacatggtatcagagcgggcgatctagcgccgctcccacgcttccgccgccgccgcccccgggagtagcgatctcccaggggcggccacccgtttttttttctcttttcgtcgtcgccgttgtcctggagagatcaatctctgggcgttctgctcgtcgtcagatcgatctgaggccaatcttcagatcggtcatgcatcttcttctcgtcgtcgttcatcgtcacgtcaacatgaagcagctagcagaccaccatgccagcctcgccaggggaacccgttgccagtgccacgccggaagtcggcgctcctccggctcaccctccccctccatcgtcgtcagccggcccctgccttggcggcggcgatctggaggagtccgccgccctgacgacctccctgtcagccttccgcgaccaccgcccgtccgccggctcctccgcctaggctgccaccgcttgtcgtcgtctctccggctggggaccaccgccgcccggggggatctgtctctgccactgccagggggacagccgcctcttctcgacgcgtcaggccgccagccaccgatgctccgccgttgccgtcggggctacggggccgccgcctggccggcggtcggcgtcgccttcccggctcccgatctgaccgccgccgccggggggatggagctcgacccctccggccagccggccctgaggccccctgttggcgccggccagcctccgccgcacgacctcctcccgccgaggccatcggcttgtcggcgacccggacaacgcggcgtcctaccgctcctcggctcctgtcccctttgtctctctcgttgtggtaatgggagatgggagatgattggttggctggttgacttgcccgtgtggactgtggtgcattaatggacttggcccatgtgctgctagttgggctatctattaattgcaactgcattgctgctgctgcttgtatccgtgtatatctttcttttatcccgatcagtgaacgggtttgcgtcgcccgccgcctcgtcgacatcggcacgtctccgacattggcatcgactctgcttcgacttcatcgttccgcctcgcgcatcttcggcttgatcacccgttcaagcgtccggctacaacaacttctacaaccgatcatcatcgagcatgcatctacaccatcaagcttcgggctgccgctgcgtcgccctctcgggctgcagtgttgccgctcatggtccatctccactagttgttggaacgctgcaaggcgccctcctcagcgtggcctcaccaccggtgaacttctcgccgctgcatcgacatggagctgtagctgtgttgtgctctcgaaccgcagcttcgccgctttcatcgtcttcatcgccgttcgcgcatcgacaacctcgtcatccgcactggtcatcgtcagccgcttagggtcttcttcctctacttcgagcatcgccgccgcgtctccaagctgccactgtcgccgctctaggccggtgatccagctacctctacatggctaccgacgtcgccatctaggccgttggtcccgctacatcgccttatacttcatccaacatgattcatcgccagcgttgccgtatcttcctcgactacacttcgctcttctccgacaatcgtgtgctgctccggcaattctccctctacgccgttctcgcgccgcgaccgtcttggaggccttctctactagtctccttcgacattggcgtatgattcatggtggtcccctacctagcccgcgcggtattggcaacaccgttgcacgtgttcgtcccgagttgtccccgtgtctggcaaacccggcgtgacgtctcgtctttcacggttcgactacatcggctcttcggcgtcatctacctcaacgactgccgcgatcgtgtcaccgttatcgtcttccgtgtgtccttgcgcaccttcgtccacgacgccttcccgtgcgtccacgatcactctacgacgcctcatgcgctccctgcggctcggctacctcgacatcagcttcctaacttcggctacatcgaccacggctactctacgcacggcttcatcgatcacggctccctcgcatccatcgctttggctacgttgattatggcacaaagggctatcatccgtgttgagcactcttgccggtttcttctccagtccaagtgtccgcgctgctcacgcttgaactgcggggggatgttagagtatatggtaggtaggatcatattaggatatgattgatttgtgtggactccttccatatatgtaatccttccttatctcctcccccatgtactcctatatatatcggccccctgaggctcaacacaattgtgatccacgttacgcagtatctctctcatactatctaacatgtacgtgtatagcacatattctacatgcgctgtccgtgccttcgcacgcaccgcagtcgcagccctcgtgttcaccgttcacgaccccgtcgtcatcggccctacacgtccgccgcgccacaccacgctcgccggcttcgcccttccgtcactggcctccctgccgctgcggatccgcgatcgccgcgtgcgtcgggcacgccgtccattgcgttacccctccgatctctccggttgccttcagtcacggccggccccgtcttctagtcacgttccgccatcgccggtctaatcgcgagcgaggtcgtcgcctccgcaacgtcctcgttgtcgccatcgatctcatcgccacgactgacgatctcctgtagatgtgcgatccccacctcgtgtttcctcctccacatgtcttcttgatccaatgttgaaaccttcagctctgataccacttgttataaaagttagtcaatatagcggaataacgactaatcttcccgatcgcttcagtcattgatcatccaagacatgtcaaatgacgacacagtaacacacaatatttgttaacgaggttcagccgaagcctacatccccggggctctgattatggacgctccttcctaaccaatataactaatagctagctgctatgagtctatggccacgccgccaccatctccctgcgtgtctacgctacattgtagtcgccatggtgacattgtggttccccctctctacttaagagagatgttggattacagagtccgactctaactcaaccccctaacacatattataactccaagtccaactgtagctaaataggactagtatattcgacacctattctaacactattatctttaaggcagttcacagcaaggcacttacgggacgttttatatactgtctctacaactaactagcggcataacaaaagtgtctctactgtgcaaagaaaaaatctctacgaaccaattctgttgtagtggggattgttagcatgatcgaagctggaactaggatggccccgactcgacaatacaacaaaccatctctaataagatgtttggattaagccgttttattattcgtctctattttcagaatcacgattagaattaagacgtagtttgggacactttgaaattgaagcatgttgagacgttttggaacaaactgagacgtcttatggatgtttcatttctatggaagaatataatatatttttagttagaattaagacgtagtttgagacgctttgaaattgaatcgtgttgaagcttatgttgagacgtcttatggatgtctcatttctatggaagaatataatatattctttaaaaaataaaagcaacgtagtataaaaggaggaattataagatattttatagatggggtaaaagagaaaaaataacaatgcaaaaaaaacaggactcgagctctcaacctaacgcacacaacattaccagcttaaccaagtgatctagaagaggaacttgttggaaagttaagttactcaatatactgcaggtgtgtcgatttttttttgtttcctcctttttagagcaggggtctccgatcagatccgattaagagggaaccgtaggtccttttggtggcgggcaataccgcgacggcgacggaggccctgcccctcagccgccgtgcgccaacgcgcgtccgctgccattggcggcgtctccttgtctgtcgtccgcgacctctgatacttggcagttggcagcctctgcacttacgcatctggccatcgccgccggtggattcagcgtctccggccccccgcatctctactttggctcgaccctctcgtcgcgagacaccaacgcccctgccactgtgccagtctcaggccacagcacaaggcaaggattacttgtgaatgcctcaactattttctattattttatttttcgcgaacaccatcttttccattattttaattagatgataaattgttcactgttagggttagtgttagagtctttcttcgattaattatctgaagaataatctaagaaattggtttgagaaggcaccatatcggacgtcaattttcttgggaacatgccttggaggatttggctagttttccttatttctgaaggcacgttctcgtgcaagaaaacctgctgctttcactatataagatccctgcaggcaaacaacactaattcttaaaaaaaaattattaggtgaaattcagtagtttacacgtaatgttctagattaatatcatgtgtgttagtactgactgtaattcagatctgacaaacaagcgaatctcaatcatccaaatagagtaattttttaaacgaacatcacaaaaaagtgcgatgtttcaaatcgatatagcaggaaaaaattacaagactgcagtcttgaaaggctacaatcagggaaaataacagaaccactatcaaacaccagcaatacctgcacaaaccaaagacctagcaccgcatcgaccgccgctaagcaggatctgatgccgccaagcctagacatgaagccaccactgaaccgcccaccaatgcctccaactagctaaaacatgaggtcatctggaccaagcggaaaggtttgctgagagagaggaagagagataagaaggatccacttgtcccttaaacagacctgccaccgactaaaagcgtaattgaaattgtaaagttctggtatattgtaagcatgcccaatgggccaatgtgtacttcacaaatcaaaagaagattcagagcttgcctactcgatcagctcctcggctccgatagtccggactctagcttggcaaagcaggcaccgaggcatgccgcacgcagcgacctggtcgcttctatctacttggcacctccccaccggcctcctgctagtccccacccatgcgcctcctgaccgcttgtaggctccatgcaacaccactacgttgccctaggggtgataatgggatagggagcctgggccctttcataactaatctcagcccttaaaatagttttagctaaaatatctattaaatcttagaccaattgttttgggcctagccctcacattttgtaggctaaaatattggggcttattaccacccgtatgttgaccacgccgacattgctagttggagccacacttccgccggccactgccaagtctccctcgcccctcacttcgttgatgattcgtcaggcaggcaaccactttgcctcaccctcgacctcaactcctcaagctgactgatttgttgggagaaaagaaacaaaatgtgaacaagagagaggcgcttttgcaaaattactgagatggatgagtgacgtggaaaatattcctatgtggagccctttggatcaaagatgcaccgatcttgccattgaaccaatatatttaatttttaagttgttgcatcggaatgcgctcacagattaagttgttgtaccataagtgtaatttactctttaaaatatatgttatagcatgtccaaagaaaagaacctcctggggcctgggccaattactctggtggtgatgagaatataaaattcacatgagccaaaattctagcatagagaaagggccatagagcctatagaaagctcaaaaccattaccactatttatatctggttaagtagcaatgcaacaatgtttagcaccagtacatccatgcccagcatagaaatctacacttgactcaagattttgagcttgtttatttcgtggtcaaattctacgtaattttagcacattttgatattaccaatttttggaagcattgaattgtttggtttg

SEQ ID NO: 15296 - DNA, 717 bp, Oryza sativa
gaccggccgcctcgtccgccgccgactggtgcttccgcctgcacggctggcctttatgccgccgttgttgggcgtctacgtcttcaccgaccggcttgccttcgccgccgccgactggtgtttccgcctgcacggctggcctttatgccgccgttgttgggcgtctacgtcttcaccgaccggccgcctcgtccgccgccgactggtgcttccgcctgcacggctggcctattatgccgccgttgttgggcgtctacgtcttcaccgaccggcttgccttcgccgccgccgactggtgtttccgcctgcacggctggcctttatgccgccgttgttgggcgtctgcgtcttcaccgaccggcttgccttcgccgccgccgactggtgtttccgcctgcacggctggcctttatgccgacgttgttgggcgtctacgtcttcaccgaccggccgcctcgtccgccgccgactggtgcttccgcctgcacggctggcctattatgccgccgttgttgggcgtctacgtcttcaccgaccggcttgccttcgccgccgccgactggtgtttccgcctgcacggctggcctttatgccgccgttgttgggcgtctacgttttcaccgaccggcttgccttcgccgccgacgactggtgtttccgcctgcacggctggcctctatgccaccgttgttgggcgtctacgtcttcaccgaccgg

SEQ ID NO: 15297 - DNA, 675 bp, Oryza sativa
gacttcaccgccggcccgcctccgtcgccgccgagtggtgcctccgcctgcacggctggcctattatgccgccgctgttaggcgtctacgacttcaccgccggcctgcctcgtccgccgccgactggtgcctccgcctacacggctggcctattatgccgccgctgttgggcgtctacgacttcaccgaccggccgcctcgtccgccgccgactggtgtcctcgccggcacggctggcctattatgccgccgctgttgggcgtctacgacttcaccgccggcgtgcctccgtcgccgccgagtggtgcctccgcctacacggctggcctattatgccgccgctgttgggcgtctacgacttcaccgccggcctgcctccgtcgccgccgattggtgcctccgcctacacggctggcctattatgccgccgctgttgggcgtctacgacttcaccgccggcctgcctccgtcgccgccgagtggtgcctccgcctacacggctggcctattatgccgccgctgttgggcgtctacgacttcaccgccggcctgcctccgtcgccgccgagtggtgcctccgcctacacggctggcctattatgccgccgctgttaggcgtctacgacttcaccgccggcctgcctccgtcgccgccgattggtgcctccgcctaca

SEQ ID NO: 15298 - DNA, 634 bp, Oryza sativa
cacggctggcctttatcaagacgatgttgggcgtctacgtattcaccgaccggacgcattgtcctcagccgaatggtgcttccgcctgcacggctggcctttatgccgccgttgttgggcgtatacgtcttcaccgactggcttgccttcgccgctgccgactggtgtttccgcctgcacggctggcctttatgccgccattgttgggcgtctacgtcttcatcgaccggcttgccttcgccgccaccgactggtgtttccgcctgcacggctggcctttatgccgccgttgttgggcgtctacgtcttcaccgaccggccgcctcgtccgccgccgactggtgcttccgcctgcacggctggcctattatgccgccgttgttgggcgtctacgtcttcaccgaccggcctgccttcgaccgccgccgactggtgtttccgcctgcacggctggcctattatgccgccgttgttgggcgtctacgtcttcaccgaccggccgccgcatccgccgctgactggtgtcaccgcctgcacggctggcctgttatgccgccgttgttgggcgtctacgtcttcaccgaccggcttgccttcgccgccgccgactggtgtttccgcctgcacggctggc

SEQ ID NO: 15299 - DNA, 1398 bp, Oryza sativa
tggtgcgttcgttaggagatgtgataagatggaaaacttgctcgcttctctacgcgcatgattcccaaacggttaagcgatatgttttttattaaatgccgcacttatccagtcgtgttcacctctagatcttgtcgttgctgtttctctctctgtcggtactacattattgccagccacattcatgctattatgactttcttcattaccaacctccaccatctatggacgaagacactattcattcttggtctagcctaactatgctcctgaaccactcatataatattgagacaatagaatatgaatataacaggaaaattctaatttatgtcaataaaatggttacctattcagaaatgatggataggatttgtatttatgggctaaaataagtttttttttaatttctagctaattttagttgtttttccatttacaatattaattttagcactatttgatcgattaaaaattattgtattaaaattattaaataattttgtcagggttatggataccacctacctaatagtagttgactaaatctcggaaggacccaccacataccatgtcctatatggaaacaacctgtggatataggaggagttccggataaggaaagataatcagagttctacatggaaacgacaaggactactcggattatatccatattggtttccctagttcaacttggacaaggggacacctatgggtataaatacaagcccccttaggaggagagtggggacgaggcaatcaacacccaacacaatagacatagaagcctacatacgccaagacacgtcgccggatatcgacttcagggataggcatggctagtcccctacggtgtctctagatactgtcaggagagacgaaagcactatctctgatctcgccaggcacggatttgaggaggaaggctaccctgttgtcgactacgagttatatcatcataccgccatgtcgacaacagttagataggctaccccaaatattatactggtgtgattatcatgaataagagcaataccggcttcggccaacaggatgtagggttattacctgacaattcaggggcccgaacctgtataaaaatccctgtcttcatctcttttacctcggtctcgcgtatatcctagtaccaatgatccccataccatgcaaataccgtagtcgagacatcaaacgtcgacaaatttgaattatcgtttgggccaaagttatttatagtttcatgttgttatttttattattatatttccttcagtcgagttgtgatatatgatttaggattttaatttaagcatatttctttcagtccagttgtgatatgtggttcaaaattttaatttttgtcgatgaatgttatttagaaaaaccgggggatcc

SEQ ID NO: 15300 - DNA, 1118 bp, Oryza sativa
cttcgctgcacctcgttgcccgcgtgccctcttctgtccaacggagggttgactaccactagcctcctcctcctggttcccctccatatccctttccacgtgcccctgctggttcccctccgcatccctctccacgttcccttcctcgttcaagtactggtttggatcctcgttcccctcttcttcattccagtactggctgcttccctccgcgattgtatcgtacaatatctgttcctcatcgcggtcagccatctgttgatacaagaaacatctgctaagtcacgagacatttatgttttaacaatctaagtcatgtatgctaagtgtaaatgtcgtacattagaaccctacacaaccttacgtgctaagtctaattacaaatcgtgatataagctaagtctaggtgacgtatattatacaaccctagctagtaaataattatatactaagtctaattacaaataaaataatcttatattaaaactcaaataatatgacatgctaagactaaaatagtcatgtatatgctaagtgtttcgtgcgtatatgctaagtctaattaagactacaatagtcaattgctacttgtcgcaccaattccgtagtcaataattacatactaagtctaattacaaataaagtaatcttatattaaaactcaaataatattacatgctaagtgtaatatgtcgcaccacttccgtagtcaataattacatactaagtctaattacaaataaagtaatcttatattaaaactcaaataatattacatgctaagactaaaatagccatgtatgctaagtgtttcgtgcgtatatgctaagtctaattaagactacaatagtcaattgctaggagtcgcaccaattccgtagtcaataatgtcatactaagtctaatttgcaataaaataatcttatattaaaactcaaataatattagaacactacacaatcttatatgataagtctaattacaggtctaataatcttaattaattgcattacaaatataacaatcatttatattattacgtcacttgcctgctccaattccttctagggctagctcttccactcaggcttgacggacgactccgacaacatgtattt

SEQ ID NO: 15301 - DNA, 4124 bp, Oryza sativa
tgggacgagctggacccagggtcgggttgccagttcggtctgaatcatcgtaggcctgggttaaggcaggttcgtgagggttcacggccttgtttaataatactgtgtagcgctaggatcgtctttataaaatggctttgggcaactaagtgacttttaaatgctgtttactgcaaaacttaaaccctatattattacccccttgtactcctttgcattaattgtgcatctccggtgtggcttgctgagtactgtggttgtactcattcttgctcaatcttttcccccttcagtaagagaagctttggagaagaagtcttaggtggagtcctggcttataccccagttgagcgcctgtgaagatggagccgtaggcccgctagtccgctgctgtttatttttgattgtcaggcctgatgcgcctttgtaataatgtaaatattatcgatataataaagatgtgtcttttatatcatgtttgtgtggtgtaccccggcttttcctgggacggggattaatacactagcgttcgggaaaaggcaattttcccggtcgcgacaagctggtatcagagccatctcgactgtaggataagccaaatggataaaacctaaggacatattttataaataaaattatttgcgaaagttcctctttttctccttcccctaatgctatttgcaaaagggttactcttttctttcttcggatttcaactaagtactagatggtcagctttgcgaagaagaagatgtcgtcagttgtttgccgaagctccggaagactgcaggatccgccagcgaagcgaaggaagcagtgaagccagctgtgaagcaggagtgaagatcttggagaacccgtcgcagaacctaagccaccctctagggtagagtcgtttgtcgtgtgtttccttgcttgtgtgtgtagcgcgtggtttgcatcggtgggttgtgatgtaaccatgctaggttgtttgcttaatcaacttgcagaataagcaaaacaaacaacacatcaacaaaaagagttagttcctttaaggtcctgtccctagctctggtctattctttccttgtatgcttcccctctcaacctctaccttgtgacagatggataatactggtaacaaaggctatgggaatgatggatccgatgactcaagaacccaagccaatgggaatgagagaagcatcaacgaaacctcaccagagctaatccaagttgtggttaaccaaaccaacatgttggcaacagcctttcaactattacagaattggaacaacccagcagaggcaaccaacgttcaagtacctacagtccaacaacagtgcaagttatcagaatttctcaaaactgagcccccaacctttgccattgccgtcgatcctatggaagccagtgattggttgcgcacagtcgagaagaagctagggttgattcagtgtaccgaccaggagcgggttggcttcgcaactcatcagttggttggaccggcctcagagtggtgggatagctacgaagcatcccggccagaaggacataccatcacctgggacgagttttcatctgtattcaagagatcacatgttcccgcaggaatgatcacactaagaaaacgagagtttcgctacctgaagcaaggagatttgaccgtcacagagtacctgcatgagttctatcgtttggctcactatgcaccagaagatgtggaaacggatgaagacaaacaagagaagtttctccaggggttaaaagatgagctcgcagtgcaactacttctagaggattatgaagattttgagaaacttgtggacaaagccatgcaactcgaaagtgagcataatcggatgacgaactgcaagagaaggatggttaacaacccagtatttccaggtggtaaccaaagacagcgcactgagccacttcagatcaccggatcttctgttgtgtatcaagagttcctgccccaagaagatgaacgcaatgcaggcaacaacaatagcaatactaatgatgatgataccaccaacaaccatggttcttgccccattagtgaccactcgaataaagcgtgccatgtcagtagcattcaccaagatgtcaacaatagtatcaatgatggcacccaaaatgacaaccctagtaattgggactctgggaaagactccaatggtgatagcaataatggtaccactgatgccaatgttagcaaggattcccaaccaccacttccaactccaagtcaaaatgatcgtccccagatggacagctcagtaaagaagacgttgatttgttacaactgcaaagaaccaggtcatttctctagagattgtccacagccgaagcgtaacctgcgccatcactccggccattatgcaagaagaagacaagtcactcgccttgtggtcactggagcaaacgccgtacctgtgaggcctcatgttaattctaacccatagtagatacaatgtaccgatgttaagcaccttccctttttgtttaaagcagtgcctcgtattcatgtaatatgggagaaatttgtaataaaaacaagctctaagaggattcttttggaagatgcggatatgtgatcatgtgtataattgtttactgacaaaggagacctagggtctcgtgccagaggaactatattctaacctcgagctaataaccaacctgaggatggaaaagaaaatcaagtgattaaccaaagagacttttgtttggactaagagtttcagatgtgtcttctttggatcaaaggcaacaaccgtcagtatagcttttggcaaaacactttaaggtttcactgaaaggcagcagaccaaaggaccacatcgtcaccagaagcatccacaactctcggagtgaagagtacttggttgacaaagttccaaagatgactgatagaagataccagcaaaggtgtttattatcgggcaaagaggtaggtcgaaaggtgattgataagagaaatcgggaaagaacacatcaaggtcaaagggtaaaggaatacgttgaatgctaactgaggacaacatgaagtgaatagtggtaagttagaagtaaatgacaagcatgatattctcatgataacaagcatggtatcctagtgatgacaagctgatatcgacgcataacgtgaagtgggtaacttgtatgaggttgacgccaaagatatgaattatgagaagtctggaaccgaagtcccatcttcaagtgccacaatccagtcgaagtcagctagaggtgcaaccagggaaaagtcaggtgaagagaagattccatctgcaacaggagattgagccaagcagtccagagtggagaagttttgctaggcaagtttgttataaaagatgcgacggaagaagtcggacaagaagagaagaccgcccaacctatcttctagctagcctcctcgaatctcggggacgagattcttgtaaggggggtggatttgtcacgtcctgataaattcatcccgaaataaaattcattttctaaaaggaataatagaattaattaaaattcgaaaagaaattggcaaacactaaaaatacgtacaagaaaaattcaaatgtggcccggagaatttttgttaaattccccttggtctaaaaggagccctcaaaatttacttgaattttcagagcaccggaaataattattaagcaacaaaaacaattaacaaagtttattaaaaagaaaaacctaaaaataatctctcttccttctttgggccaagcccagcccaaaagtctccctttcctccctctttttctctccctctccttctctccctccttctcttgggcctcctcccctcccggcccactccctcctccctctctctcccgggctgccttttcccccccctcttccctcccggcctgctcggcccaggccgccttcccctcctctcctcctgggccggccgcccggcccaaccctagccgcgcccccgcccgtgcagcgcgcgtgcgcgcgctgatgccgccgcctgaccggtgggtcccacgcgccaggccgggcgtcgtccccttcctcccgcccggccgtcctctctccctctcccgtgaaccctagctcgtttcctcctctaaatccgctcgattcaagcacgg

SEQ ID NO: 15302 - DNA, 15656 bp, Oryza sativa
agggatgtgcaatgcgtcaccggttgcatggccgccctaagtcggttcatatcgaggctgggagagaaggcgttacccttgtttaagctcctcaaatgctccgggccgtttacttggacggaggaggctgaacgtgccctcactcagttgaaggcgtatctcagctctcccccagtactggtcgccccggagccaaatgaacccttgctactctacttagcggcgaccccgcaagtggttagtgcggcgttggtcgtggagcgcgatgaggacaatcctcattccgcgcacccccaccttgtgcagacttggcccgggagagagaagggaggagaggcccccgagccgaacggtggcccaaggcccccgacgaccggagatggccctctgcccgcttgtcagacggtgctaggagcccccgacccccaggaaggccccgaggccactgcgggaaggccgcacctatcgccctctgaccccgaggctaaccctgtgccaatttggcccgggagagagcagggaggagaggcccccgagccgaacggaggcccaaggctcccgacgaccggagatggccctctgcccgcttgtccgacgacgctaggggcccccgacccccagggcggccccgaggccactgtgggaaggccgcccctgtcgtcctccgaccccgaggtcgtcggcacagaagacgagtgcgccccgcgaggccgctcgggtgaagagcgccccagggatgcggcccctagcgaagaggatcggccccaccgaaaggtgcagcggcccgtctactttgttagtgaggccctccgggatgccaagacccgataccctcaggcccagaaaatgctttacgctgttctgatggcctcgaggaaactgcgccattatttccaggcgcatcgggtcactgttgttacgtcttaccccctcggtcaaatcttgcataatcgagagggtactggacgggtggtgaaatgggcaatcgaactttctgagtttgatttgcactttgaaccacgccacgctatcaagagccaggccctcgccgactttgtggcagaatggaccccggctcccgagctcgtctcggtccccgaaaccggctcgggtccctcgcagctgcctcacaccgctcactgggtgatgcagttcgacggctccctgtctcttcagggcgccggtgcgggggtcacattgacctctccgagtggagccgtcctcaaatacttggtccgcctcgactttcgagcgaccaataatatggcagagtacgagggactccttgccggactcagagtggcagctggactggggatccgccgcctcttggtgttaggcgactcccagctggtcgttaaccaagtctgtaaggagtaccggtgctctgactcgcagatggacgcctacgtgcgccaagtacggcgtatggagcgccattttgacgggattgagcttcggcacgttcccagacgggataacatgatggccgacgagctctcacggctcgcgtcctcgcgagcccagaccccaccgggcgcctttgaagaaaggcttgtccagccatcggcgcgacccgaccccttaggggagacggatgcgcctgaccggcccccgaggcccgtcggagtccaggcctcgggacccgaggggagtgctcccagctcccttagattgattgcttggatcgccgagatccaagcatacctcacagataagactctacccgaggaccgcgaagggagtgagcgcgtccatcgcatctccaaacgctacgtactggtagaagggaccctctatcggcgcgcggctaatggaatcctcctgaagtgcattcctcgggaacaaggcgttgtgcttcttgccgatatccatgaaggcgaatgcggagcacactccgcctcgcgcaccttggttggtaaagcttttcgccaaggtttctattggccgacagctctcaatgatgcggtcgacctggtccgccgatgtagagcgtgtcaattccacgccaagcaaatccatcagccggcccaggccctgcagaccataccactttcgtggccatttgctgtctggggactcgatatcctgggaccgtttaggcgggccccgggcgggtttgagtatctgtatgtcgcgatcaacaagttcactaagtggcccgaggcttatccggtcgtcaagatcgataagcactccgcacttaaattcattaagggcatcacggcccggtttggagtgcctaaccgtattattacggataatggcacccaattcactagtgaactcttcggcgactgctgcgaagacatgggcatcaagctctgcttcgcctcacctgcccacctcagaagcaatggccaagtggagcgctccaatgcggaaatcctcaaaggtcttaaaaccaagaccttcaacttactcaagaagcacggcgtttcatggatcgaggagttgccagcggtgctctgggcaaaccgaactacaccaagccgagcaaccggggaaacgcctttcttcctcgtctacggcacggaagcggttctcccatccgagctcaccctgaggtctcctcgggccaccatgtactgcgaggctaatcaagatcagcttcgcagagatgacctcgactacttggaagagcgaaggcggcgcgaggccctccgagccgcgcgctaccagcagagcctgcggcgctaccatcagcgtcacgtccgggcccgatcactctgcgtcgacgacctcgtcctacgccgcgtccaaacgcgtgctggattgagcaggctctcaccaatgtgggagggtccgtatcgagtggtcggcgtcccccggccgggctccatacggctggccacgggcgacggcactgagctgcctaacccgtggaacatcgaacaccttcgtcgcttctacccctgaggggggagttgggtgtcaggtttcgggctcgggccaaccccgcaccccctcgggcgtgcagggttggccgggggctgccacacatgcactttcttatttctcttatttcagaatttcaataaaagcagtttcaatttcctaaaggttgtatctgtgctgttttttccttttgaagaatcttgacttgaaatagatcacttgcgctcaatcctgccctcgggggctcgggtcggctaaaaatcgccaaacggggcccagaaccgagccgtgcctcggggcgtggtgaactccgggggggaatcggcaaaaacccacaatcgggtcacccataaccctcggtcaccacgttcccggcctggccagtctcgacatgtggatctccctaggcactgtcacgtcctgataaattcatcccgaaataaaattcattttctaaaaggaataatagaattaattaaaattcgaaaagaaattggcaaacactaaaaatacgtacaagaaaaattcaaatgtggcccggagaatttttgttaaattccccttggtctaaaaggagccctcaaaatttacttgaattttcagagcaccggaaataattattaagcaacaaaaacaattaacaaagtttattaaaaagaaaaacctaaaaataatctctcttccttctttgggccaagcccagcccaaaagtctccctttcctccctctttttctctccctctccttctctccctccttctcttgggcctcctcccctcccggcccactccctcctccctctctctcccgggctgccttttcccccccctcttccctcccggcctgctcggcccaggccgccttcccctcctctcctcctgggccggcagcccggcccaaccctagccgcgcccccgcccgtgcagcgcgcgtgcgcgcgctgatgccgccgcctgaccggtgggtcccacgcgccaggccgggcgtcgtccccttcctcccgcccggccgtcctctctccctctcccgtgaaccctagctcgtttcctcctctaaatccgctcgattcaagcacgggattcccaaattaaataggggaaattaatccccattgactcctcttcatttccccctaatttcccccttgaatgccgcccccaatcgccgggaacgcccgcgttttctccggccaccaaccattgccgccggccgtggttctcgccgccgttccgacctcccccgtggccggttccctcccccatcctataaaatgggatcctcatcccccgttctctcgttttagccccatcccgagcctccccgtggtccctagctccctccccaccgtcgccctctctctcccacgttgccggccgcctccagccgcctgtgccgcctcgaccgtgcgccggccggccgcaccgtcgcctcctccagcatcgccgccacctcctcttcgccggcctgccctccgtttcgcgaggtgacccccggagctgccttctccccgtcgccctcctcttttctccgcgccggccgcctccagtcgcctccatctccctgcctgcacgccggtcgacgtcgccaccacctccctcggctccacgacgccgctctcatccccggcatcacctcctcctcgcccgaacatcgccggaacaccgtcgcccgcgccggcctcaccttcctcctcgtcgacatctcctccggctgcccctttcgccatgcccgtgcatcagccgacgctgccgtcccctccctcggcatggtgacgtagccctccacctcgtccactcctcggtttcgccggaacgccatcgccgcgagcctctccatccgcctcgccggagttgttcggccgcccgtccctccacgccgtgcaccggtcggccacacccccatcatcttcggcatcgcagctgcgacgtcgtcctcggcctcgcctcccctccgaccgaacaccgccggtgtccgtcgtcgtcttcaccgttccctctcgccggctcgtcgtctcgcggcgccgcctccgtcatcgtcatcatagcggcgtgttccacgtcatcctcgaccccgtgcagccgctgccggctgtcctcgtcgcctcctcgccggtcccggtcgtcgtcgtcgtcgtcgtcctctcgtcgttcccggtcgtcgtggcgttcgtccctccgtcgagccgttctcgtccgtcgtccgcgttcgtcaagcaagccgctgcagccccgtcctcgtgttcgtcctcggctccgcgtcgtcaagcctcgtgccggccgcgtctcgccttcgtccaaggatcgccgccgaagccgtcccctcgccgttcgtctccgttgtgcccgtctgtctccgccgcgcccgttcgtcgttgtcgttcccacgcctcgtcgcgtggtggtaaggttccctctccctcgctgccctgtcctcgtcctttcagtgtcgcccgtgcccgttgtgcggttgtcggccccggtacccgtgtatcggcgtcggcagtcgttcgcttgtgcgcgtggtgaccgtgttagtgtgtccgctcggtagccgcgtggtttccacgtgtgcagtccgtgtggtgtctagtggagtccgtttgtcggccactcgcctcggttgacacacgggatccgcttccatcgacccgtggaccgtctctgtgtactcggtctaccgtggtcctttttgttgacatgtggggtccgcatgtcaacggcgcagccttcctgtcttttcccaggctagcgcttacacatgttttataattgcaaagcttaattataataatccgcaaatctccatataacagcattaaacttcggatgatcatatcttggtcatacgaactccgaatcgacccgttcaagtctcttaatgtttgttataacctaaagaacccggtgctttctttttatgtactgttattgcttctttataggcttgtagctttgcttgtgtgcttcgcgtagcttctgtcgttccggaggttcccgaagcgtggttcgcggtcgtcgccgaaggttcggaagtccgttctctctgagcaaggcaagtcacatcatccttgagcatattgaatcccagtttataaaattatgttgatttaaattaatgcattaccgctttatttaaattcccgcgttatcactgttttatttagccatgcctatttacctttgttatgaccttattattgctattgttattattattcccttgttcaccctagattaaacaaaacctcaactagtgggtactctattcatggttccactagtatgaatttaggtagatgcttcgctgtttgaattagacaacattaggtggtttcacaactttagacttgggaaattctcatatcatttggacactatggaatggttggcttatgttggaattggacacacacctctcttcctctttcaaaacccctaaaacctgttttcggtggggtttgggtgcatgccagttgtgggaagtagcaccccggccactataaggattaagctcgggcctctgttgcaaagcactaccgtacttccacatgtctaatgggtaaggcttagtttgtggctcagtctagtcataaacaaaagtacacggattggagatggatgaagtcgggtgtcgatggacattctccagggcaaatgaaggctacacgagctgcggcccggtagtcgagatgtcatatggcagagggttggtgccctgctgctaggggctcagttctgcctgcctgtcccgggtatcccggccgtaggtgggattgggtcggtactcttgtctaaggctaggatgggttggaaactatgtcacgtcttccgtccgtataccgtggtggtatgtggcgcgtggttacacgtgaggaagatgtgtcttgtgggtaaagatgtacacctctgatcagagtaaatctattcgaatagccgagccctcggttatgggcaagccgagcaatgtacccaagtcagtgttttaattcttaaaatttgctcagcaactaaaatgtggaatggttggcctgggttggcttgggacgagctgggacccagggtcgggttgccagttcggtctgaatcatcgtaggccttgggttaaggcaggttcgtgagggttcacggccttgtttaataatactgtgtagcgctaggatcgtctttataaaatggctttgggcaactaagtgacttttaaatgctgtttactgcaaaacttaaaccctatattattacccccttgtactcctttgcattaattgtgcatctccggtgtggcttgctgagtactgtggttgtactcattcttgctcaatcttttcccccttcagtaagagaagctttggagaagaagtcttaggtggagtcctggcttataccccagttgagcgcctgtgaagatggagccgtaggcccgctagtccgctgctgtttatttttgattgtcaggcctgatgcgcctttgtaataatgtaaatattatcgatataataaagatgtgtcttttatatcatgtttgtgtggtgtaccccggcttttcctgggacggggattaatacactagcgttcgggaaaaggcaattttcccggtcgcgacaggcactagccccgacccgcgccttttgaggaccagaacctgggcacgagcccttattcaagctaagacacaaaagggccacggcacagatcatcctcatctcatacacatagcaagataaaattaacacaaaaatttcttcatttttgattacagattaagttgatctatacaaaaaagaggcccgaaggccttagaagaaagaaaagaagaaaagactgaagaatggcgggggtctgggggctcattccgatgcgcccggatcgccggcctcgacgtcactgtcgtctgcaccaccggcattgccctcctcgtcggagttgggggcaaacgcaagccgaggggccgagccctcgaagctgtcgacgatatagtcggcggcatcccggacttgcgcgcgcgcgcggtcctcggtcccaggagggaactcatccagcgccatccatggagagaagttggggtccctggcctggtaactcgccaggacgagctccaccgctccttgggcgaggtccctcgaggatgacttaattgtcttctcgagctcctcgggaagccgttggagagccccggccatcttcgagaggtgctgggcgaggcctccctggttgtcggcgtactttgcggtctgccctctccagaggcccacctgccgaccggcgcgatctaggcgggagacggcgtcccaaagcatgccgggcccgacctcgcctgccaaacggagggcttcgacctccccggcggatgagtccagcgcgctctgcagaccggcgatggtgtgttcagcatctgcgaggcgggcggctaagtcgctttcgcccgcggccgccccgccgctgcgcgccctcgcgtccagctccttcgcccgcgcctcgagctcagcggcccgctggttcagtgcggccctctcggcgcgggcaccttccagattgcggcgcgcctgctcctcctgcgctgcctcgcggagggacaggctgtccgccagctgttgcgccgcggcctcggccccctcgagagctcgctcccgctcggtgagcgcgtcctcgcggaggcggagcgcgagctcttcttcggcgcaggcagcctcgtgcgccgccagtgtcgcttcccggatggtgacagcggcctcgcggtccgccagatccctctccacgacgcaggcgcgctcttccagcgccatggcgcgcgcctcgagggtctcttgacgccgccgggacaccgcttcggtctccgccgcccgctgttctcgggcagcggcagcgtcaagcaccccctgggcggcgtcgagcttcttccctagctccgcctcccagctcccgtattgaaggcggagggtgtcctgcgcctcgttcattacggtggtggcaatgagggcagccccccgctcctcctccacttccttggcgatctccgccaacaccttcttacgggtttcaagctccgagacatgccggcggtgagccttacggcccacctccaccatggcctccaccgagcgtcgcccctcttcgacgcgcgcccacgcggtgtcgagctccgcccgctctgcctgcagggcctccacctgggcacttaacccgtccaacaccgtggtgtttgcggcggccaaggcttgcagaaggggctctgcgctcagtagggcagcagaaggcgtggggaaaagtcgcctcggagaagatgccgcgcggctcggcccgccgatggacgtgccagacgcagggatgtcctccggacctggttgagcctgagcgtcgcccgagggagtgggcccaagcgacgtgcccgctgccacgtcgccagctgccccggaagttgtcgcctgagcgtcgcccgagggagtgggcccaagcgacgcacccgcggcctcgtcgcgagctgcctcggaagtcgccatcgcctcgtcctggcgaaatccagcctcctcccgagcggcttcctcggcatggtgggctcgggcggcctcctcccgagcagcttcctcggcctggcaggctcgggcagcctcctcccgagcagtttcctcggcctggcgagcccgggcggcctcctgggcggcctcctcggcttcccgtaggcgatccgcggcctctcgccggtcagcttcccgcctgcgggcctctgcggccgccggatcctcggcctcaggctggccggacttggaatgatgggagggacgcgacgggatctcgctgaaacaaaagaaaagaccagaagacgaacaagatgggcgagtgaaaactcatgttgagagaatgaatacagccacgatgggtgagagacgaacctgcgagggggtcggttaaacgaccactttggaggggaaatgaggtttccccgagatggttctgtctcctccatcttgcggggccgcttcttcttgcgctccccctcgagctgcgatgctggcgcggccccctccgggcgcttgctgctggcacgcgccgccccgccccctcggggaggagatgggggaggtgttcctccctgcttcctcttcccccgggcgtcggcagggcggctgctccccgggcccctgacacgggacccagaagcacgaccccctctcggggtagattgctccccccggcggctccctcctgcgccgtcatggccctttggagctcgctcctcagaggccccgacccccatcataatggtcaggatcgaggcgcggtctggatcgctgcagagggggaggattccttggggaatgagggccgcctccacggagttgagattcagcacccgttggaccaatatcttgaagtcctcaggagcccagtcccatctcactccctggtgggtcctcatgtagtcttcggacccggtgtactcccaggcgccccgagcgcgccgctggagcggcgcaatccgacgacggaggtagtcaccatacaccatggcccctgtgagcccctgggatcgcaggcccgccaggcggtcgaggacggcgtcatagccatcccccagatctaccggcgcccgccagctggaggcctgcgccgggggctggctcggaagtcggaggcgcgcttcgtcggcgagggcagtgtagaaccaatcgctcttccagtcgtcccacttcttgcggagggcgcaggggatgtagcggttcagcgccggcccccgtggctggaagtagcagccaccgactaccgatggcggcgacaccgactgcacggtgaagaaccaccggaacagccgaagagatgggcgcaccccaatgaacatctcgcacagatgcgcgaagatggccaatgtcatcaccgcgttgggggtgaggtgcgccatctggagatcgtagaactccagaacatccatgaagaaagaagaaaatggcggaaccagccctgccattgcaaaagggagaaagaagacggaccgccccgggtagtctggcgccgggcgtccctcgcccagcgtgactatctcccggccggcggcagattccggcatgaagcggcgcggcagcccagcctgcctctcactcacgatgcgggagggcggcagcacgctaccatcgagcagagcggagccccgtgccatggcgccggaggaagagaagattaagagcgagcgcgtgtggctagggtagggcgcaggaaagaaggagttagggcgcaagcggcaaagacaaggggaataatggcgaaaggaaggaagcaaatcccttcctcagtgcctttatacccttgccaacgctgtgcccggctcctcgtttctcgcgcccactatttcgccccctcgtttctcgcgcccacgcttccactaatcccattcgcccgcttgcggcgcatgaggtggatatgcggttgtggcggtcgaggtagatcatatcatgcgcgcgttaattacgctcgccaaccgaagcgacgttaccatatcttcagatgaaacgaatcgccatgtccagattcgtgtgctactcgagtaatgtggcagtcttgaagagaccgctcattattgacaaccgagttaccattgccgatgtgcgtgatttttgaccgttggttttctgcccaattgtggagaccgatcccacctgtcaccgggccttaggagtggcgtcacgcccgaccatttcccttgaggagggcgatcgccctggcataacgccgggggctactgttggtgacatgggatcgggagtatcatgactagaggtttgaggcagacacaatcgcccacgtggcctggcaccctcgggggacgtcaggcccgaaggtggtgtgttcgccctcctcttagtccccccgagggggtcgggctgcacccccctcggccccgagggccgaggcgccccgacccctcgtgggatttcgctccgcgtgtatggggtaggtgagcacagtggggctcacctaaccacatttattgcggcttggctgagcgtgtcacgacgcatgtaatgtagtgcattgcactcatttatccggtctgtgaccagtcacagaccggtcagatcgcgggattaggtggcgacaggcggtctgacgcacgcctcgccccatcccgtcaggacgagggcttctaggcgctcgtccccagctggagctagcgtgttacctcccagagatggcacgttagtcctgatcagatatatgccaggcttcatcctaaccattacaggcaaaatgtagtgtgaaggagggccaacatgcagattgctaagctgacacgaggtggacaagaatgaccgatttgtgaccattctgacaccggtcatgtcgccagcagacagccatgattctacgtcgcgcctgctcccggcgaaagtggaggtaggtgcaggccgtcccatcagaaggtgactcgaacggcaaccatgcagatctccgtccatttatgaaaaggtagggtaagtccccataaaaaagggggggatggtgcatgtggtatccccttaagatataaaaggaggaccttgcccacggagagagggggatagattttagagagagctttttcttggactggacctttccagattaggggcccagaacaagggagaggcgggctgatactttgtagctctttgatacacagatctcccaaaaacacaggagtagggtattacgcttctcagcggcccgaacctgtatacatcgccggtgtcttctgtgcttccggtctcgcgaaccttccacatacagattgggagtttagagtctcacccagggtccccggccgaaccggcaaaggggggccagcgcggtctcccggtgaggagccccacgctccgtcagcgtgggatgcattacatatgaaacacttagcaagttcgtacgggaatgaaaattggtatgtaggaagacagtaaaattaaactaactctgtgttgtacggtaacagtatgaacgtcttgtaatgctgcgccttcaggagatggacgagattgtcctctgtttcctgcggatattggtcgagcattgcaacgtttactctccgagggtcgatgaatccagtatcgaaaaccctccgccgtcgggccctttgaatctccattctacaacgataaaagggagtattttattttatatagtctacttatatacaaggacctaattaattaaaggagacgtagtaattaagaattataattgaacgatatacttacaaagtccagcaactcataatagagacgtcgagggcgtccagctggtatacttcgtagattcccttgaaattgatccagagaatatcatctccttgcaagaagtccgggtccctgatcctcgctccgatcatctctctaccggtggcgctcatctccacgtacagctgatggaacttgtacatttgtgtgggtagggactgcaccagctcggacttgacaagcggtttaccgagttcgtacatgtatttcaattccgccttttctattggttcaactcctagcaattgatccgtagatagaccggtgtcaataataaattcttctatcgtcatgtctttcccggttaccaacggctcgatctcctggtttggttgctctccaagctgagggactggtttggactttccagaagatgctttcttcagcgttcgctcagagtccgatagcttgatggcctccttgacaggtgcagacatacccctgaagaagttcatgacactggggtctataggaatattcttttctggacttcgaggcttgaattgtctcttgacttctgatgcaacgtaagcgtcaagctcctcttgcgtgcaatcgtaccccgggtccttgttcttggcggcgtcaactttcgccttcttcgttgcccttgtgtgggtaggcggtggagctgggggggcccttgactttgaaggtgccggaagaggagcttgcggaggagtaggtgtaggagcacgaggaggagtcggtgcaggatcctgaggaggagtcgatgctggagcctgaggtggagacggtgctggcggagcatgaggaggagacggtgcaggatcctgaggaggagatggcggagccggaggagatggtgcacgagacgccgtttgtcgcccagggaggatgatgtaccgcctgcgccatagaataatggcatggcttgtgtctcgtaaatgcgtctcaccgtctcctccagggtaatccagctcgaggtcctcgtacgcgccttcgaccaactcaactttgaccttcgagtatcctgctggaatcggcctgcagtggtaagtacctgaagggtccgttgggatggccatgcccgacgccaccttcatgttgtgagagattatttattagtaatcaacatatataagcagcaactagcggaatggctaaatcttacctttattgataagttcttgaaaggaatatgcagctcacatggtgtccgctgagtgatgtcatcaacgggacaggtcgattcgtcctgtgtttgcatggcgtccatactctgtgatcctacctgccccgttgaggcgcagctgctacggtttcctgacgggctcaccattgcaggaggaatggtcggctggggatcatgggaccgatgtgcggccatgcgttcatcaaccttccttgccacctcctcttgcatgttgagttcgtagctcgatacccggaactctaggtctgcaatcttcgcctcggtatctctcttgctcctcatccgactcctgtacgtgtggatgtcctccttgaaaccaatcttccaaggaatcacccctttcccttgtattcgtcctggatgctctggagtctgcagggcgagtgtcagctcgtccctatctctgtctggtcggaacgtgccctgagaggaggcttccactgcatctgttagtcgtcgcgcagcctctcgtatctgatcgccgaagaccagtgagccatcagctgggttgagcgttccaccgtgagcatagtaccagaacttcgatcgttccggccaattggctgttgccggttcgatacccctctcaatcaagctagcctccatctcctcccacttcggcatcgcgacgctatagcctcctgaccccaagtggtgatggtacttcttcttggcggcattttctttgtttctttccatcatcgcctgcccttgttcacctgtcttatatgcaacgaactcgtcccagtgatcccttagctttgagaatgtgtcgaagttcggtgtctgccccttcagtatatacttctggtacagatctcccttgaagctctgaaactgttctgccattttcttcagagtccaccttttcactttgtcctctgtacccgcaggaagggtgaatgtctcgagcattgtggtccacagcatctctttctccgaatctgggacaaagctctcatgatctccgcgtgcccttgttcttcgccagtacaccgtactgacaggcacgttatcccgcacaacccaaccgctgtgacgtacatagttcttggcggcttcggccggggcactaggacgtccatcttcttccacttccgttatgatgtgccgaccctcaagcttcttcgctgcacctcgttgcccgcgtgccctcttctgttcaacggagggttgactaccactagcctcctcctcctggttcccctccacatccctttccacgtgcccctgctggttcctcctccgcatccctctccacgttcccttcctccttcaagtactggtttggatcctcgttcctttcttcttcattccagtactggc

SEQ ID NO: 15303 - DNA, 4069 bp, Oryza sativa
tagtcatgtatgctaagtgtttcgtgcgtatatgctaagtctaattaagactacaatagtcaattgctacttgtcgcaccacttccgtagtcaataattacatactaagtctaattacaaataaagtaatcttatattaaaactcaaataatattacatgctaagactaaaatagtcatgtatgctaagtgtttcgtgcgtatatgctaagtctaattaagactaaatagtcaattgctaggagtcgcaccaattccgtagtcaataatgtcatactaagtctaatttgcaataaaataatcttatattaaaactcaaataatattagaacactacacaatcttatatgataagtctaattacaggtctaataatcttaattaattgcattacaaatataacaatcatttatattattacgtcacttgcctgctccaattccttctagggctagctcttccactcaggcttgacggacgactccgacaacacgtcttttctgcaagatacaaaaagatgtattaggataaatgcgaagtaacatatatatatatacatatatatatatatatatatatattgcatttcacgttaacgttcgtcctcgttcgttcgctcgttctcgttcacgttcgttcgcttgttctcattcacgttcgttccctcgttctcgcttgtcttcgttcgatcgttctcgttctcgctctcgttcgttcgatcgttctcgttctcgttcacgttctcgcggcaacgtacgttgacgtgttcgttctcgctctcgttcgttcgatcgttctcgttctcgttcacgttctcgtggcaatgtacgttgacgtgttcgttctcgttcggcgaaggcggcggcggcgtggcgacggcggcggcggcgtggcgttggcatgcggcggcggcgttgcgcggcggcgaaggcggcggcgtggcgtgccggcggcggcattgcgcgcgcgccggagaatgcggcggcgtggcgtgccggcggcggcattgcgcgcgcagcggcgaagacggcggcgtggcgtgccggcggcggcttggcgcggcgtcggcgtggcgcgtcgtcgtcgtggcgcggcgtctcgtggcgggcggcgcgacggagagagatcgagatcggagagatcgagatgaagggagatctggcggcggcggctctcaccccagagatgcggcggcatcggaggaggcggaggcggcggcgaggacgacgagctcgagacgacggcgagatacggcggcgtcggcgcggggatttgccctaggcagtggcggcgaaggagagaggccgagagagatcgatcggccgaaaacgtctaagtgttggtgaagaagacgagggcgcaccggaaatatatatacccccggatctttagtcccggttgttctcaacaaccgggagtaaatatcttttcccgctatttcgaaattctttttaaacccggttagggttaagaaccgggactaaagattatagcactgcatatgattttcgcttacatatgtgtttataaaatagaagttaatgcattaacattatttaagagtacaaagattaatgataattacttcgaaaaattatttttgtctgtaataaattaagtggataaatcgtaataagcaaatatatgacttataattaataaaaattccaatatatatatatacttagcatatatatgaatgatattattatatgggtaaaaactctaattaagatatgtatgtacatactgcatgatttaaaattaataaaaattgtaatcatcatatatacttagcgtaggaattatattaaattaaatgctaaaaactctaattaacatatgtaaatgccacatgcatgatttaaaccttttaaaaattcgaatagtcatatataagtagcatatgaaagatagtaaattaaattgtgaaaaactctaatatatgaatgatagttttaaaaatatattaaatttaatacttttaaaaattctccagtcaattataattagcatatgaatgatagtaaattaaatgttaaaaactctaattaacatatgaaattgccacttgcgtgatttaaaacttttaaaaatcctctagtcaattataattagcatatgaatgctagtaaattaaatgtttaaaactctaattaacatacatatgaaattgacacctgtgtgatttaaaacttttaaaaattgtaagtatcacatataactagcatatacatgatttaaacttgttgaaacctctaataatcgtgcgtaattaacatatgccatacatcaattgatttatatggataatcaatacatccaaaatagtttacatcgtgtacacaataattacggcattacatcggcggtgacggttgaccgcacgtactttctcctcactattgttccctccttgtgatcgctgcgtgagtaaggggtgtcttcatttgataggaggatgctagggtcaatcgtcaccgtgaaagggggttgcccatccaactgatcgtaatcctcgtcagtcttgtcctcaactctgacgatttttcttttgcctgggagaaccacttgacgcttaggctcatcaggccctctgcccttctttcctttgctagacatgtccttcacgaaaaagacttgcgttacatcattggcaaggacaaaaggttcgtccgagtatccaaccttgttaaggtcaacagttgtcatcccactgtcatcaatcattacgcctccaccagtcaacctaacccattggcaccggaacagaggaaccttgagaggaccatagtcaagttcccatatgtcctcgatggcaccgtaatatgtggcagttgttccatcgtgtcccatggcatcgacacgaacagcgctgttttggttcgtgtcttcatgtcttgggctctcgtgtagaatgtgtacccattgatctcatatccctggaatgtcgcgatcgacccagacggtcccctcgccaggaaggcaagttgttggttgatcgactcgttacccatgagatgttgtcgtagccacgcggggaaagtatcaatgtgatgccgtgtaatccatgtatcggacttaccgatgttcctggcgcgaactagagccaagtgctcctcgatgtaaggagctaccaatgaagagtgttgcagaacagtgaaatgggctttacggaataaattgttgtctaccgtcattattgctttccttccgagagttccctttccccgtagtctcccttcatggcgtgattcaggtaccccgattgggcgaaggtcttcgataaattctacgcaaaattcggatgacctcttctgttcccataccccttggcgatgtttgcctctggacgagcacggttacgaacatacttcttcagaacgcccatgtacctctcgaaaggaaacatgttgtgtaggtacataggcccgagaatacggatctctttcacaaggtgacaaagcagatgcgtcattatattgaaaatgaaggtggaaataccaactcaaaactgacgagacattgcaccacttcattctgaagggcttctaatctatccggatcgatgaccttctgcgaaattgcgttcatgaatgcacatagctttgttattgttgcccggacattgtctggaaggataccccttattacaactggtagcagatgtgtcatcaacacgtgacagtcatgagactttaggtttgtgaacttcttctccttcgtgcttattattcgcttgatattcgtggagtatccagacggatattcgtggagtatccagacggtacctttatgctctccaagcattcaaacatactttccttctctgccttgctaagagtgtagctggctggactcaagtaatggcttcctttctcctttggttccgggtgaaggtcgccgcgttgttccatatgcttcagatcattacgtgcttccagtgtatctttcgactttccgtatacacctaggaagccaagaaggtttacgcaaaggttcttagtgaggtgcattacgtcgattgcgtggcgtacgtccaagaattcccaatatggtaactcccaaaa

SEQ ID NO: 15304 - DNA, 2000 bp, Oryza sativa
acgtggcagttgttccatcgtgtcccatggcatcgacacgaacagcgctgttttggttcgtgctcttcatgtcttgggctcttgtgtagaatgtgtacccattgatctcatatcccaggaatgtcgcgatcgacccagacggtcccctcgccaggaaggcaagttgttggttgattgactcgttacccatgagatattgtcgtagccacgcggggaaagtatcaatgtgatgccgtgtaatccatgcatcggacataccgatgttcctagcgcgaactagagccaagtgctcctcgatgtaaggagctaccaatgaagagtgttgcagaacagtgaaatgggctttacggaataaattgttgtctaccgtcattattgctttccttccgagagttccctttccccgtagtctcccttcatggcgtgattcaggtaccccgattgggcgaaggtcttcgataaattctacgcaaaattcgatgacctcctctgttccataacccttggcgatgcttgcctctggacgagcacggttacgaacatacttcttcagaacgcccatgtacctctcgaaaggaaacatgttgtgtaggtacataggcccgagaatacagatctctttcacaaggtgacaaagcagatgcgtcattatattgaaaaatgaaggtggaaatatcaactcaaaactgacgagacattgcaccacttcattctgaagggcttctaatctatccggatcgatgaccttctgcgaaattgcgttcatgaatgcacatagctttgttattgttgcccggacattgtctggaaggataccccttattacaactggtagcagttgtgtcatcaacacgtgacagtcatgagactttaggtttgtgaacttcttctccttcgtgcttattattcgcttgatattcgtggagtatccagacggtacctttatgctctccaagcattcaaacatactttccttctctgccttgctaagagtgtagctggctggactcaagtaatggcttcctttctcctttggttccgggtgaaggtcgccgcgttgttccatatgcttcagatcattacgtgcttccagtgtatctttcgactttccgtatacacctaggaagccaagaaggtttacgcaaaggttcttagtgaggtgcatcacgtcgattgcgtggcgtacgtccaagaattcccaatatggtaactcccaaaatatagagttctttttccacatcgccgcgtgaccatcttcgctctctatatgctggcttccaggcccctttccgaacactactttaagatctttaaccatagcaaacactgttttcccgctgcgatgtttaggcttcgtacggtggtcggccttatgttcgaagtgcttgcctttcttccgtaccgggtggtttgctgcaaggaatcgacgatgacccatgtatacaaccttcctacagtgcttaagatatgtactttctgtttcatccatacagtgagggcaagccttgtaccccttgttgaactgtccggataggttgctaagtgcaggccaatcgttgatggttacgaacagcagcgctcgtaggttaaactcctcctgtttgtcctcgtcccacacggggacaccttccttcttccacaactgtttaagatcttcgaccagtggtcttaggtacacgtcgatgtcgttaccaggttgcttggggccttgaataataatcggcatcattatgtacttcctcttcatgcatagccagggggggaggttgtagatacacatcgtaacgggccaagtgctatggccgctgctcatctctccaaaaggattcatgccatccgtactgtcacgtcctgataaattcatcccgaaataaaaatcattttctaaaaggaataatagaattaattaaaattcggaaagaaattggcaaacactaaaatacgtacaagaaaaattcgaatgtggcccggagaatttttgttaaattctccttggtcta

SEQ ID NO: 15305 - DNA, 8119 bp, Oryza sativa
ttcggtctgaatcatcgtaggccttgggttaaggcaggttcgtgtgggttcacggccttgattaataatactgtgtagctctaggattgtctttataaaatggctttgggcaactaagtgacttttaaatgctgtttactgcaaaacttaacccctatattattatccccttgtactcccttgcattaattatgcatctgccggtgtggcttgctgagtactgtggttgtactcattcttgctcaatctttcccctcttcagtaagagaagcgttggagaagatgtcttaggtggagtcctggcttataccccagttgagcgcctgtgaagatggagccgtaggcccgctagtccgctgctgtttatttttgattgccaggcctgaagcgcctttgtaataatgtaaatattatcgatataataaaaatatgtcttttatatcatgtttgtgtggtgtaccccggcttttcctgggacggggattaatacactagcgttcgggaaaaggcaattttcccggtcgcgacaagctggtatcagagccatctcgactgtaggataagccaagtggataaaacctaaggacatattttataaatgaaactatttgcgaaagttccttttcctcctttcccgtgtgctatttgcaaaatgtttactctttcttccgtcttcaaatttcaactagtactagatggttagttttgcgagagaagaagatgtcgccaattgtctgccgaagctccggaaggctgcaggattcgctagcgaagtggaggaagcagtgaagccagctgtgaagccgaagctaagatcttggagaacctgtcgctgaacctaagccaccctctagggtagagtcgttagtcgtgtgttccttgcttgtgtgtgtagtgcgtggtttgcatcggtgggttgtgatgtgaccatgctaggttgtttgtttaatcaacttgcagaataagcaaaacaaacaacacatcaacaaaaagagttagttcctttaaggtcttgtccctagctctggtctattctttccttgtatgcttcctctctcaacccctaccttgtgacagatggataacactggtaacaaaggctatgggaatgatggatccgatgactcaagaacccaagccaatgggaatgagaaaagcatcaacgaaacctcaccagagctaatccaaattgtggttaaccaaaccaacatgttggcaacagcctttcaactattacagaattggaacaacccagcaggggcaaccaacgttcaagtacctacagtccagcaacagtgcaagttatcagaatttctcaaaactgagcctccaacctttgccattgccgtcgatcctatggaagccagtgattggttgcgcacaatcgagaagaagctagggttgattcagtgcaccgaccaggagcgggttggcttcgcaactcatcagctggttggaccggcttcagaatagtgggaagtgaaccaaatgtaaagaaagtgaatccgagttgcttgttcatgagagctattcccagttatgaaccaagtgatatgttcgaagatagtctatggaggtcagattaaaatcgcatctaacaacgaagcttcagatttggcaggataacgatcagaccataacaagtccagcagcaaagtcatttggggagacgtcaaagcatgtcaagtgggataagttggttctttttagaaacataattcaaaggcaaagttaccgacccttgcatcgaatagcagaagtagctagcacctggagagcaggaaagctaatatgaggcagttggtggcaagttagaagtaaatgacaagcatggtatcctagtaatgacgagctgatctcgacgcatgacatgaagtgggtaacttgtatgaggttgactccaaagatatgaactatgcgaagttctggaactgaagccccatcttcaagcgccgcaacccagtcgaagtcagctaaaggttcaaccagggacaagtcaggcgaagagaagattccatctgcaacaagggatcgagccaagcagcctagagtggcgaagttttgctaggcaagtttgttataaaagacgcgacggaagaagtcagacaagaagagaagaccgcccaacctatcttcttgctagcctcctcgaatctcggggacgagattcttgtaaggggggtggatttgtcacgtcctcataaattcatcccgaaataaaaatcattttctaaaaggaataatagaattaattaaaattcggaaagaaattggcaaacactaaaatacgtacaagaaaaattcgaatgtggcccggagaatttttgttaaattctccttggtctaaaaagagcccttaaattttacttgaattttcagagcaccggaaataattattaagcaacaaaaacaattatcaaagtttattaaaaagaaaaacctaaaaaataatcctcttcctcctttgggccaagcccagcccaaagtctccctctcctccctctctttctctccctctccttctctccctcctcctcttgggcctcctcccctcccggcccactccctcctccctctctctcccgggctgcctctccctcctctcctcctgggccggccgctcggcccaagccgcgccccctgcccgagccgcccctccctcccgcgcacgtgcgttgcacgcgcgctgagcgcgcgccccgcgtgggacccgcctgccaggcgtttcttcctcctcccgcacagcttctctctcccccgtgcgaaccctagctcgctccctcctccaaatccgcttgattcacttggttaattccaaaattgattagggggttttaatccccattgattcctcttcaatttcccccaatttcccccttgaatggcgcccccaatcgtcgggaacgcccgcgttttctccggccaccaaccatggccgccggccgcctttaccgccgccgttccgacctcccccgtggccgtctccctcttctctcctataaaatgcaaccccctcgctccgttctatcgctttagccccctcccgcggtctcccatggtccctagccacctccccaccgtcgccctctctctcccgtgccgctggacgcctccagccgcccctaccgccttgcccgtgcgccggccggccgcgccgtcgcctcctccagcgtcgccgccacctcctccaccccggcctgccctccgtttcccgcggagacccccggagctgccttcccgccgtcgcccttctctttcctccgtgctggccacctccagccgcacctcccgcctcgcccgtgcaccctccggctgcgccgccacctctcccggcgtcgcagctgcctcctctttcccggcttcgcctccgtttcgcggggaaatcaccggagacgcgtcctcaccgacgactagtggtgtcgccaccactccaccatctccagccatccctgccgcctcgcctgagcgtcggccgacgtcgccgtctcctccctcggcgtcgccgcatcgccctccaccccggctgctcctcggtttcgccggaacgccgtcgccgcgccggcctctccatcctcttcgtcgccggcgtcctttcggccgccccttcctcctccccggctcgtcggcttgctgcaccactaccacctccggcatcgcagccgcaaggtcgtcctcggcatcgtttcccctccatccaaacccctccgcggtccatcatcgtcgtctccgatcgttctcgtcgtcgacgtcccgtcggtcgcccggctcgtcgtctcgcggcgccgcctccgtcatcgtcatcgcagcggcgtgttccacgtcgtcctcgtccccgtgcagccgctgccggctgtcctcgtcgcctcctcgccggtcccggtcgtcgtcgtcgtcgtcgtcctctcgtcgttcccggtcgtcgtggcgttcgtccctccgtcgagccgttctcgtccgtcgtccgcgttcgtcaagtgagccgccgcagccccgtcatcgtcttcgtcctcggctccgcatcgtcaagcctcgtgccggccgcgtctcgccttcgtccaaggatcgccgccgaagtcgttccctcgcctcgccgcgtagtggtaaggacctctccctcgctgccccgtcctcgtcctttcggtgtcgccccgtacccgttgtgcggtcgtcgaccccggtacccgtgtaccggtgtcggtagtcgttcacgtgtgcgggtggtgaccgtgtagtgtccgtgttagtgtgttcgctcggtagccgcgtggtttccacgtgtgcagcccgcgtggtgtctagtggagtccgtttgtcggctactcgcctcggttgacacacggggtccgcttccgttgacccgtggaccgtctctgtgtacccggtctaccgcggtcctttaggttgacatgtggggtccgcatgtcaacagcgcagccttcctgtctcttccaggctagcgcttacacctgttttataattgcaaagcttaattataataatccgcaaatctccatataacagcattaaacctcggatgatcatatcttggtcatacgaactctgaatcgacccgttcaagtctcctaatgtttgttataacctaaagaaccctgtgctttctttttatgtattgttattgcttctttataggcttgtagctttgcttgtgtgcttcgcgtagctttcgtcgttccggaggttcccgaagcgtggttcgtggtcgtcgccgaaggttcggaaggccgttctctctgagtaaggcaagtcacgtcatccttgaacatattgaatcccagtttataaaattatgttgctttaaattattgcattatcgctttatttaaattcccgcgttatcactgttttatctagccatgcctatttacctttgttatgaccttattattgttgttgttattatttccttgttcaccctagaataaacaaaaccccaactagtgggtactctatttatggttccactagtatgaacttaggtagatgcttcgctggttaattaggcaacattaggtggttttataactttagactttgggaagtctcatatcattcggacactatggaattgttggtttatggtggaattggacatacacctctcttcctctttcaaaacccctaaaacctgttttcggtggggtttgggtgcatgccagttgtgggaagtagcaccccggccactataaggattaagctcgggcctctgttgcaaagcactaccgtacttccacatgtcttgtgggtaaggcttagtttgtggctcagtctggttataaacaaaagtacacggatggaggtggatgaagtcgggggtcgatggacattctccagggcaaatgaaggctacacgagctgcggcccggtagtcgagatgtcatggcacagggttggtgccctgctgctaggggctcagtcctgcctgcctgtcccggaggttccggccgtaggtgggattgggtcggtactcttgtctatggctaggatgggttggaaactatgtcacgtcttccgtccgtataccgtggtggtatgtggcacgtggttacacgtgaggaagatgtgtcttgtgggtaaagatgtacacctctgattagagtataatctattcgaatagccgcgccctcggttatgggcaagccgagcaatgtacccaagtcagtgttctaattcttaaaatttgcttaacaactaaaatgtggaatggttggcctgggttggcttgggacgagctgggacccagggtcgggttgccagttcggtctgaatcatcgtaggccttgggttaaggcaggttcgtgtgggttcacggccttgattaataatactgtgtagctctaggattgtctttataaaatggctttgggcaactaagtgacttttaaatgctgtttactgcaaaacttaacccctatattattatccccttgtactcccttgcattaattatgcatctgccggtgtggcttgctgagtactgtggttgtactcattcttgctcaatctttcccctcttcagtaagagaagcgttggagaagatgtcttaggtggagtcctggcttataccccagttgagcgcctgtgaagatggagccgtaggcccgctagtccgctgctgtttatttttgattgccaggcctgaagcgcctttgtaataatgtaaatattatcgatataataaaaatgtgtcttttatatcatgtttgtgtggtgtaccccggcttttcctgggacggggattaatacactagcgttcgggaaaaggcaattttcccggtcgcgacacgtactcaaaccaaaccgtatgtttcatgcgtcctttccaaattctttaaattttctgtcgatgtttcgccactgcgaaccatcggcggggtgtctcagcatcccgtcctgttgacgctcttcagcgtgccatcgcaacattctagcattccccttgttcctgaacaaacgccttagccgtggtattatagggaaataccacatcaccttagcaggaattctcttctttgttagctgcccgtcaacttctcctggatcgtcccgtctaatcttgtatcgtagtgctttgcaaacagggcatgcttctaggttctcatactcctcaccgcgatataggatacaatcgttcggacatgcgtgaatcttatgaacttcctgtcctaacgggcagactatcttcttagcctcgtacgttgtctcgggcaatttgtttccccccggaagaatgttcttgacgagtttcaataaatcgccaaatgccttgtcactaaccccattttttgccttccattgcaacaactccagagtggtatccaactttttgtgcccctgctcgcaacctgggtacaacgaagttctgtggtcctccaacatcttgtccaatttatgggcctccttttcactttcgcagtcctccctggcgtcctgcaacatctgaccaagatcatccgcaacatcgttaccatcagcagctatttcctccttgcccgtttgatttgcttcaaatccaacatactgagcaaagtccggaatattgtcgtcttccacttcatcttcttccatttcaacaccttgctctccgtgggatgtccaacaattatagcttggcatgaaccccgactcaaacaagtggaaatgaatagtcctggatgcagaatactccttctgattcttacacttattgcatggacaacaaataaaacccctttgcctgttagcttcggccactctcaaaaaatagtgcacgccgtcaataaactctttggaccgccggtcagcgtacatccattgccgatccatctacatgagtcaaaaaaaccgtacacaaataattattcttacaataatgacagtcatacaataattataagatatctttattcatacaaaaatcataaaatattacaccaaataattcttaaaaactatttgtaaagttttaaactaattttaatgtgtttcacttcttttaattttcattttagtttgttttctattatttaagattaactttcactagagttttccttctcaactattttataaaaccttgtttagcaaatgaactaaatttctatatattctttcttccccacacacattttctctctcatcaacttacaactaaattttggagacaaaaaaagtgtgcaaaacataggtgcaaatgtagtatgacaaaaaaaaacattggaggatgaagttgcaaaccttttaggcacctccgatttgtatgtaatcaccaaaataaattcaatagaaattttggcataacctcccctcttttttgaagaaattttgaagcttgctcgggcagctggaggaggaagaagacatatatataggggtgggactttagtcccggttggtagcaccaaccggggctaaagatcaccgggatctttagccccggttggtgctaccaaccgggactaaagtcccacccctatatatatgtcttcttcctcctccagctgcccgagcaagcttcaaaatttcttcaaaaaagaggggaggttatgccaaaatttctattgaatttattttggtgattacatacaaatcggtaggtgcctaaaaggtttgcaacttcat

SEQ ID NO: 15306 - DNA, 4060 bp, Oryza sativa
accgggatctttagccccggttggtataccaaccgggactaaagttacggttggtataccaaccgggactaaagatcccggtggggcctgacatgacctgacagcattcgaaccgggactaaagatgatctttagtcccggttggtaacacaaaccgggactaaagatcaaatatgcccgttacccttttgaaccgggactaaagatcatctttagccccagtttttattgcatccgggattattgtggaaatcggccgaccgacgaaagatggtttctccaccagtgttgcctacttcaatccctacgagcagaacaccatctccgattatatcgacgacaacgagacgaagttgggtcggaacgagctgtacctgggcagcaaatgcatggaaggggcccacaagctcaatgccaagctcggcgacaacggcgacacccagttcagtttggacgagaagcaggaggtcgtcgacagcttccgcggcacccgcatgtggtggaaactgtccaaggcttccgatgactattccttgtatggacgtaagatccaacggcgcaactacatgctggtatttcacaagcgccaccgtcagctcgtgcaagactcatatctccctgaaatcctccagcaagggcgcgcgctcaccgccaagaacaggcagaggcgactgtacacccaccacgagaaccatatgagcacgtggacccacgtcccgtggaagcacccggcgacgttcgacacgctcgccatggaccccggcaagaaggatgagctcatagaagatctcaagatgttccagaagggaaaggagtaccactccaaggtcggcaaggcgtggaagcgaggatacctgctatacggtccgtccggaacaggcaagtccagcacgatctcagcaatggccaactttctcaaatatgacgtctatgacctcgacctaacgaccgtcacgaacaacaccgacctgcggaacctcttcctccagacaacagagcaatccatcatcgtcattgaggacattcatgcgatggaattggaggataaacgcatgagcacagacttccagtggtactatgaaagaaagaaaataacgctgtcggggctgctcaactttattgatgggctgtggtcagcatgtggcggtgagcggatcatcgtgctcacaaccaaccacgttgataagctcgatccgggactgatccgccgggggaggatggacaagcacatcgagatgtcctactgccggtttgaggccttcaaggtgctcgccaacaactacctagacatcaccgagcacccattgttcaccaaaatccaacgactgctcgacgagactgatatgacgccggcggatgttgcccataacctcatgcctcagggcaagaggaagaggaacacgaacaaatgcttgacaggattaatacaaaagctgaagaaggccaaactggaatctggaacgcgcctctcccgaggccgagtcctaccgacaggccatcaaggtataatctaaggcagaagagagctacaccggggaatatatgttgagtgggatcgatgctggctcttgtgtggtggggaattgcctagcaagctagctagctgcatctttctgtgtttttctgttacaatgcattttcgtgtttgtttagtcggttaaactctgcagagtcatagcctaaataaacccactttaattaccacttaccagtaatatgtactgcaggtctccatcctttttaatttgcgtgtgttaggagacgcacaagtgtggtgtgtgataaataaactggcgagtcatacataactactcagtgtaaaactacttatgtaccttatacttcacgttctagaatttgtgttctcaaccttattttgtaaaaaaactgcattgacggacgcttttgtaatattgttattttattgtaacacctaattaacaaaatgtagttggagtttaatcttacttaattacttaagatcttagcctaaacatgatcacctttgtttaatgcgaaaattgatctaactgaccttatttgtgaagccattgaagccggtatttggtttgttgttcgtccttttgctttttctccttcttcttcttcttcttctctgtactgattttctattgatgaaaaggaaacaaagagaaacctcatgaacccctttcagtgtcaaatcgatccggcgattgatttagggcttagggttagagagagagttcaaactcgatcagttgcctcttctcatctttcttatacaacgacactggtggggcttgattagttttgaattatgttttgcaccgatcacacaaaaacaagatcttatctctttttttttctttcttgattgggaaggaaactggtggttgttgattgataaatttaacaaccctttatccatgatcttatttaatactttaattacacatgtattgtccagaacattatcttaattaaactcaatttatgagcctttcgagtatggatccatgagtagatgctcagcttaataattcgattatgggacatatcttttacaaccatatcaatgagttaggtagaagacacacaacatgttgttaccataattgaaaattgtgttttattggtgcacatctgtagacccccgtttttataacaggaatcaatcgtgtaaacagtaccatttccctggatcaagtagtctggtacacacgagttcatagccggaataccaaatgctcatacacgagagtctaataccaaatgctcatacacgagagtctagtacgaattattacaacatgagcccgcaggcattgtcttaaatcatcggaccgagcggtccggaatacaaccaaaagcagagtttagataaggcagcggaatttaggcagcggcatgccattgccacaggcaacgaccgtactaagacctattgggcaccgtcgtcttcatctctctcctggtagtaggcatagggatcctccatagcttcatctcccgtttctgattaattttatatttgcaagggtgagtaccaaccgtactccgcaagccaccacagcaacaatacatatgaaaggggtatttcaaaggatggctatggttcttttgcgcaaagccaattttgtaattcttttcacaagcctaagacctagcatcaactgatcaaattttagtaccagtgtttgtatttaaacaatgacggttatgtccaccatccattgtgatcccaaggatagcttcccgccattgagtcgttatggttttctgaggacgtccactttcccccatctcaggaagtgactccaacagcataaaaattcatcatgcgataacccatcccacacaagttaagaattcagagtctagccaagtgtaatacatgtcccggtgctcaataaccgcgagcacggctattcgaatagatttggtttactcactgtcacgaccggaaataacccaacgggcattccttacgtgcgtgcattaatccttgtcccaggaggcaaggtacaccaaaagttgatacaattcagagtttaacaagcggaagcgtatataaaattattacacgggcagcgaaggcccaacacacgaagacaaacgaggaacagcggaagactagggcgacgaccacaggcgcttgacggcaggcacgagctagacaccgaagccttcatcttccaggaactcctcatctgggcttgggaaaaattgagcaagactgagtacaaccaccgtactcaacaagacacacccacaaatgcagaataaatgcaagggagtacaagggaattataacataaagggttagggttgcagtaaacagcatttaaagacatttagttgctcagggctattttgtaaacacgatcttagaactatgcaaagttgttaatcaaggccgtgaacccacacgaacctgccttaacccaaggcctacgatgattcagaccgaactggcaacccgaccctgggtcccagctcgtcctaagccaacccaggccaaccattccacattttagttgttaagcaagttttaagaattaaaacactaacttgggta

SEQ ID NO: 15307 - DNA, 7042 bp, Oryza sativa
gacccgacaggtgggccccacctgtcggcgacccgagagaggaggcgggcggcggctgccaggctgggccctcggcctgcggccggcccagcaaggaggagggggaggaaggaggggaatgggccggcggcccatccgaaaagagaaaggaggaaaaagggagggaaaagaaaaagaaaaaggaaaaggattttccctggaattaaaaattgcactttagtgatttttaattggttaaaattatttctagagctctgaaaattccactaaaaatcctgttaatgaatttcgacatgtagaattcaagaaaaattccacatgtcaaacccgattattgtttgcattgttttcttagggttttatcctgatttcctctgcattttcttggggtcatttgtaatttacaatttggcttgggaggaaaacttcggggtgtgacaaacctaccccccttaaacggaatctcggccccgagattcggaggagctggtgaagaggtacggatgggcggctttcaactcctcttccctttcccaggtcgcttcctcttccgaatgatgactccactgaactcggcaaaaccgggtgaccttgtttctggttctcctttcactggtatcaagtatgcgaaccggcttctccacatatgtcaggtcctcctggatatcgatgtgttccgaatcagcctgctcttcaggtacccttaagcacttctttaactgggaaacgtggaacacgtcatggatgccgatcatattggatggaagttctagctgataagcaacttctccccttcgttccaaaattttgtatggtcccacgaagcgtggtgccaacttgcctttcgtctggaaacggtgtactccccggagcggagtgacacgaagatacacgtagtctccgacctcaaaagttagctcccttcgacggttatccgcgtagctcttctgtcgagactgagcaaccctcaatctctccctgatgattctgactttctcttctgcttccgctaatacttctgttccgaacagttgacgttcgcctgtctgatcccagaaaagaggtgtgcggcacttccggccgtatagagcttcaaacggtgccatctgtagactggcctggtagctgttgttgtacgagaattccgcatatggtaagcttttgtcccaggctccaccaaaatcaagagcgcaagctctcaacatatcctccaagatttgattgacacgctcggtctgaccatcagtttgcgggtgataggccgtgctgaagtttaaacgggtccccaattcttcctgcagcttctgccagaactttgaggtgaactgactacctcggtcggatactatcttcttgggtaccccatgcaaacacatgatccttgcgaggtacaattctgccaatctctttcccgtataggtggtatgtactggtataaagtgagccaccttggtgagtcgatccacgactacccagattgaatcatgtcccgatgatgtccggggcagtcctgttataaagtccattccaatctcctcccatttccattccgggatttggagaggttggagtaaacctgctggtctttggtgctctgctttcactcgttggcaaacatcgcagagtgcgacgaattcagctatttctctcctcatgctgacccaccaaaatttctctttgaggtcttgatacattttagtgctgcctggatgaatggagtactgggtctgatgagcttcggtgagtatcagatccttcaattccttgtcgtccggtacacacaatctttctcccatccagattgtgccatgctcatcctcaaggaaatcccgagcctttccgactctcatgttctttttcagttctgctatttccggatcatttacttgagcggctctaacttgatccacgagcgtaggccgtgcctccagagcggctacgaacccgtgttcaacaattcccatgttgagatgttcaagctcctgtcgcaattcctcacacatgccctcgatgcatagagcagtgcagtaacttttccggcttaatgcgtctgccaccacattggctttacccgggtggtagtgaatactcatgtcatagtctttgattagttccaaccatcttcgttgtcgaaggtttaggtctggttgggtgaagatgtatttcagacttttatggtccgtatatacttcgcagcggttgccgatcagatagtgcctccagatcttcaaagcatggaccactgctgccaattccaagtcatgagttggataatttccttcgtgtggacgcaactgccgcgaggcatatgcaaccactctgccctcttgcattaggacacatccaagtccgtgacgggatgcatcgcaatagacttggaagtctttcgtctggtcgggcaggatcaaaaccggtgcggatactaatttccttttgagctcctcaaagctcttgtcgcactcagctgtccatttaaacttctcgtctttcttaagcaactgagtcatgggtcgggcgattcttgagaagttttcgatgaaacgacggtaataaccagccagtcctagaaaacttcgaatctgcgacactgtcttcggtggggtccacttggtaactgactccacgttcgatggatcaactgctacaccctgagctgtaatgacatggcccagaaatttaacttccgtcaaccagaagtcacacttgctgaacttggcgtatagctggtgctccttcaacttctcgagtactagacggagatgttgttcatgttcttcctcggactttgaatagataagaatgtcgtcgatgaataccacaacaaacttgtccagaaattccatgaacactttgttcatcagattcataaagaatgcgggtgcgttagtaagtccgaaggacataaccgtgcactcatatagcccgtaccgagtggtgaaggccgtcttcggaatatcctcttcccggattctcaactggtggtagcctgatcgcaggtctatcttagagaacactttagctcctttcagttgatcaaataaatcgtcgattcgcggcaaaggatatttattcttgattgtgacctcgttaagtgcgcgataatcgacgcacatcctctttgtcttatcctttttctccacaaaaatgaccggagcgccccaaggtgaagtgcttggtcgtatgtaccctttctgcagctgttcatcaacttgcttcttgacctccgctaattcgttggccgccattctgtacggtctcttatagattggagcggttcctggtgccaaatcaatccggaattcaatctccctcttgggtggcatggtggtgaggtcttcggggaacacctctggatactcgcagactatgggtatgtcctccaattttctcaagttcttctcttcggcgtccattgggatttccgtctcaatctgattcaacgaggctcctttctttggcgagactagagatttgtacaccacggtttctcctttctcattggtcagggtgactgtgcgattcgcacaatcaatgacccccttaaacttggtcagccaatccatcccaagaatgacatctaggtctttggattcgagaagaatgaggttggctagaaacggtgacctttgaatttctattgttatagaagggctgaattgaaccgaagtggagctattccctggggtatgaacccgcatcggtgtgctaagttcctctcttattaacccatgcatcccgacaaatttcttggagatgaaagaatgcgttgcaccagaatcaaaaagtactgttgcagggattgagttaacaggaaacgtacccagtacgacctctggtgctgcttgtgcctcctccgcagatgcgtggttgacacgagcctggataaaccttggtccggcacgcctgggcttcgggcatttgtcagcgaagtggccaagctcgccacagttgaagcaggaccctggttttgctcccgtctccttcttggcttgtgcgggctggcctgactgtgccggtgccatcggtgggcgtggagctgtaccgcggttgggctgacttccatggtggttctgactgccactagtgccctggtggaagttgctggggttgaatgggcggtgttgacgaacaatcatggtggtaggtccaccctgctgtccgggagtgaggcgcggtcggtgctgactaccttggttggaccggaactgcgccgcctttcttttcctgtccattttgttgcgctgatcctcctgacggattgccttgtcaaccagcctctcaaagtcggcgtagtccccagatatcagttggttggtcagctcgtcatccagacccgccatgaacttctcctgcttctcggcgtcggtgcggacatcctctggtgcatatcgcgcgaggcgattgaactcatggaggtactctgtcacagtcctgttgccctgatggagcgcccggaattccctcttcttttgtgccacgaccccgtctggcacctgtgccttcctgaagctacggcagaactctgcccatgtaacttcagtacccggtgggcgggtggccatgtggttgtcccaccaagctgacgcaggaccctgaagctggtgtgtggcgaaagcgaccttctcctgttcattgcactgcaggagattcagcttcttctctatcgcatggatccagtcatttgcctccatggggttggtggtgctggagaaggtgggtggcctgacacgtagaaactccggcaacttggactgagggggagggggaccaaactgctggtgctgctgttcggcgtgctgcatcatcctctggtgcatctgctggtgctgctgttgcatctgctgcatcatggctgccatcatctgagtctggtgtgccataacttgggcaagcgtcggattctcgggaagtggtggcggaccattgccagaatcactgttggggtgcacaccatccacgcgttcttcgccgttgctgccctcgcctgtcgtgcggttgccagtcctggtgtagaccatctggagggaaaagcagacggggggaaaaggagaaaaacagatgctcaagaactaagctttattatataggaattaaaactgcaattgttctgatctgaattaaaacacttaaaaagagcaaacaaaaatccttattaagacagccatatcataggcacatgatatcgaccgtcgactgaccccaaacaagcaacctaaacacacaaactaacaagcagaaactagacaatcgataaactaatgggaaaacgagcctaatgctcggaacggctcctgcggtcggtggagtcgaaagcgtcctcctgctcgtcacctggtccctctgaacgactcctggagcctgacagatcagtctcgccgctgccactgggagtagcggacaaccaacctccggtaccactggctggacctctggcggctgatgctggagcgaaggagagagtgaacgcgggagctggagctggagctggaggaactgcgggaactgccggagctgcgggcggaactggaggtgctgcgggagctgctggtggaggtgggttcctgggcgcaagctggatgcgcacgggtgcagtcgtcctcttacggggcgtagtgcggatccggactcctcctggtgctggaagacccttcaactgagcattctccttcttcaggcgcgctatctcgtccttcagagcgacgatcctcatgagcttcccatcattcaaggccttggtcgccttgtgcaggtccgagtgcatccggtccaatcccctcatcacagcacacatgtgaccgaaggtggtgtcgttctcgccagctgtcggacggaaggagctgacgccatcaccatgggctcgacgggggtggtagcggtacgccgtgtcgtggaagatgtagtcgtggcgctcccgtagtctggccatcatcaagtaggctgcctcctgacaggcgtgatctgctgtgcctccagatgcctcgaccgccatgttagcgaggcaagtccccacgtaaccatggacctccaagcggacacggtgaggaagctcgccactgagcggcggaatcgtcgtgtactccggcgcgtcggggtagcccaccaccagggtcatgcgtgccaactctgccacgaaatcaatcatgccttctccgcggtggttgggtgggtgaccggccatctagagaagacaaaggagtaggatcaatgcatgctcaaatccaaatttaaataaagcaataaagactcaaataaaggaatcaaataagagcaaaattttatgcatagatcattttacatgagcgcgaataaataagacagactcacataacgataaaataatgagaaattagatacatattaataataacgaacaaagcataaataccttgcaacccatgataccgagctaggaccgagtgcatttcacccatcaaatcccaactgactgacgaataaatcccaataattttactaaaaccctagactgactcgttttgaaaaactcactttaaacgagcgaccaagatttttcccttgaaccataagaacagatccccattttcccggaacaaaatccaattgcaaagaacatatgcaatgaaaaggattcagagggctcttaggtctttccatttggcttgtcctacggtcaaggtcggctctgataccaacttgtcacgcccagaaattcccgaatagaattccaagcagaatgtgtattaaaacccccgtccaggaccagccggggtacacaaacgacaatgttgacatacagatccacgtcttacaaacattataaaggtcttacagaaatgcagcggaaaacaaaagataactggagctaagccttgacttgaactgcagcgggaacaccactccacaggcatcctcgacggcacggacgaagcctactcctcggagaacccgccatcggacacatactcgagctctgaggttgggggggaaaagtagagcaagactgagtactacccactgtactcagcaagtcataccggaatagaggtatgatgcagggatttaa

SEQ ID NO: 15308 - DNA, 15984 bp, Oryza sativa
gaaaaagaacttcttttaggattttctttttataaacctttttaactttgttcatttcttttcaattattatttgtgctctgaaaattccactaaaatttgtttaagcattttaggcttttaggaaatatacaaaaatcctccaagcctcatttgacttttatctttgcacattttaattgttggaggctttcacattgaattttaattattctttgcacaatttcgaggatagatttttgtcacgcccagaaattcccgaatagaattccaagcagaatgtgtattaaaacccccgtccaggaccagccggggtacacaaacgacaatgttgacatacagatccacgtcttacaaacattataaaggtcttacagaaatgcagcggaaaacaaaagataactggagctaagccttgacttgaactgcagcgggaacaccactccacaggcatcctcgacggcacggacgaagcctactcctcggagaacccgccatcggacacatactcgagctctgaggttgggggggaaaagtagagcaagactgagtactacccactgtactcagcaagtcataccggaatagaggtatgatgcagggatttaacaagggatagctaagcaggttcatttgcataaatactggcatttataaacaggaattgaatgcgaaaacagttgtaataattaagcagtattaaacatccgctgtccaacgctaacccacgttgcgacaggcccaaccatccacctaaactatccaaattcaacagattacactagggtgagactaatcacggtgaatctggttgaccgcccataaccgcgggcacggctattcgaatagttttactctgatcagaggtgtacaactgtacccacaagacacagccccacgacacgtttccgtgcgccgacatgccaccacgacataccggaaagaggccgtgacaggacccttcgcataaccccctctagccaagcacaccacacctcaggtttcactcccgtccccagcgggcgacgggcagtcccctctcgtgcctaggtgaatccggaagcgacagaggccgtcgcagggcccgccccgctccatcacgcccacccttgcctggatgcgtcgactagaggaaagctacactacaagcccagccgttgcccacgctggcttgtggtaagtacgataaattcttccagggcatcccgcgaaccggtccttaactgccatgggtgcgactagcaaaaccatgcacccacagcccaccatgtggttcattttatttaaccaacaccagagcggtggtattaaaccaacattatcatataaacctatagtctaggttttaaatgagatccccaatgtgtgctagttgaactaagcatggctaagcaattcctagtccaaagtctaatcatgttataacccaagctaacaaaggagcatgatatccaaaagcatggctgtaacaataggtatccatcccatagtgatattataaaacaatgcaatatttgaaagaaaacagtagagcatttgcaatataggatcaacatgttcaagtgacaggcatgacttgccttgctctgctgctggagggacctcggcgactatctcgaagtacaccggagcgtcggagggatcggaatctagcgacatacaaagcaaacattgcaaacaggctataagactactgaaacagagaacaaaaccatttttaatggattctacacatttttcttgatttactgagacttgaatgggattaaacggagctcggatgaattagatatgaattttagaagattcactgtgtttattactataaaagaaatccttaaataatttattgcgcaatattaaccagggctgacgtcagcgagggggcgcggcgccgacatgcggggcccaccggtcagcggcacggggaggagagaggaggtggcggcgcgcgggcccacgggtcagcggcacgggggaaaggaggggcggcggcgccacgtggcggccgaaccgacggccccgatctacccaagggtagatcggacggcggcgggacctcgcggccggggcgcgcgggcgcggcgcgagacggcggcgaccatggcgccggcggcgcggcgctcacacggcggcggcgcgcatgcggcagcggcgcaaggcggcgaccgaaggcgaccgaccggcggcggggagcggcggctagaggaggagcggcggctacgcggctaagcggcgcgcacgcggctacacggtacggggaaaaggagaaagaggagggggaagcctcaccgacaacggtcgacgacggcggccgacggaggacgacgacgacggcgggacgagctccggaacctcctaacgaacaaaaggagagggattagagagagaggaaagagcgtgggagggcgagagcgccggccgaaggcggcggccatggtgccacttgccggcacacgacggggatgggtctccggcggcgaacctcgacggggaaggggcggccgaggtagatctcgaccccgcgaagctaacggcggcgacggcgcgagacggcgacgagcctagcggcggctagcggcggccggagtagcaaaagcggcggcggcgggtggttgcacggcgtggaggcgatggggagctcgggagagatcggcgaaatggggaaaaagcgagagagggggacggcgatgcttaaaaagggggagagggagccggacgtggccgggagcggcgggattcgacggccgacgtgggggagtggggaggagagagaggcgggattcggttttcgaatcccggccatctcgggcgcgggcgcgaacgggagggagaggggaaagggcgcgggagacgcggcgcacgcgcgggcgtggccgacgtggcccgggagagacggaggcgtgggcgcggcggcggtttcggcgcggcggcgcgccggggatcggcgggaggtgggggaaggacccgacaggtgggccccacctgtcggcgaccccgagagaggaggcgggcggcggctgccaggctgggccctcggcctgcggccggcccagcaaggaggagggggaggaaggaggggaatgggccggcggcccatccgaaaagagaaaggaggaaaaagggagggaaaagaaaaagaaaaaggaaaaggattttccctggaattaaaaattgcactttagtgatttttaattggttaaaattatttctagagctctgaaaattccactaaaaatcctgttaatgaatttcgacatgtagaattcaagaaaaattccacatgtcaaacccgattattgtttgcattgttttcttagggttttatcctgatttcctctgcattttcttggggtcatttgtaatttacaatttggcttgggaggaaaacttcggggtgtgacaattttagagtcgttttgggacgcgacaaacctaccccccttaaacggaatctcgaccccgagattcggaagaactggcgaagagatcgggatgggctgccttcagttcgtcttcgcgctcccaagtagcttcttcttcggcgtggttgctccactggaccttgcaaaaacggattactcggttcctggtcctgcgctccatggtgtccaggattttcactggcctctccacataggtcaggtcttcgcgaacttcaatttgctctgagttggcctgctcggatggcactcggagacttttcttgagttgcgacacatggaacacatcatgcacgttacccaaggaggcgggcaactccagctggtaggcgacttctccgcgtcgagcagtgatacgaaagggacccacataccgaggtgcgagcttccctttcgtctgaaacctgtgtacacctcgcaatggcgtgacccgaagatacacaaagtcatccactgcgaattccaggtcacggcgacggttatccgcataacttttctgccgggactgtgccacctttagattatcccgaatgattctgactttagcttcagcttctctcaggatatcagtcccgaacacttgactttctccaacttggtcccacaatagcggtgtccggcatttgcgcccgtacaacgcttcatatggtgccatttgtatgctggcttgatagctgttattgtaggagaactcggcataggggagactcttatcccaagtcttcccgaaatctaggacacatgcgcggagcatatcttctaggatctgatttagacgctcggtctgtccatctgtctgcgggtgataggcggtgctgaaattcaatcgggtacccagctcttcttggagcttcttccaaaagcgagaggtgaattggcttcccctatcagatacgattttcttgggaataccatggagactcacgatcctagcgaagtagagttccgctagtttattccctccataggtggtcttcacaggaatgaatcgagctaccttggttaatcgatccactattacccatatagagtcatatccaccttgggtttttggaagaccggtgatgaaatccatcccaatttcatcccatttccattccggcacttggagaggttggagaagtccggccggtcgttggtgttctgccttgacacgctggcacacatcacatagagccacaaattctgcaatttcccgcttcatgctaacccaccagtatttctccttcaagtctaagtacatcttggtactgcccgggtgaatggaataaggactttcgtgagcttcctgaagtatcagctgtttaagttctcggttatctggaacgcatacccgctttccgttccatagggttccgtgttcatcctctgtgaaaccagcggctttaccctgtttcatattcttgaggagtccatgcatgtccggatcattcttctgagcctcgcggatttgatcgagcaaggtaggcttggcttccaacgcagccaagaatccgcgaccaactatgcttaggttcagggcttccatctgttgattaagctcgggcggaatgctacggacgttaagagtattgcaatggctcttccgacttagagcgtcggcaaccacgttagccttaccaggatgatagtgaattcccacatcataatccttgatgagttctaaccatctcctttgccgaaggttcagatctgactgagtgaagatgtatttcaaactcttatgatcagtatatatttcacagcggttcccaatgagatagtgccgccagatttttagagcatgaaccaccgctgctaactccaagtcatgtgtagggtagttgccttcatgaggacgtagctgacgtgaagcataggctaccacatgaccgtcctgcatgagtacgcaccccaatccttggcgcgaagcatcacaatacaccatgaaatccttgcgagtatccggcaagattaacactggcgaggaaaccagcttttccttgagagtttggaacgccttctcgcactgcgggctccacacaaatttctcttctttcttcaacaactgtgtcatgggtcgagcgattttggagaagttctcgatgaatctccggtaatatcctgccaaacccaagaaactgcgaatctgagtgactgtcttgggttgcttccaatcggtgacggcggtcactgtttcggggtccacagcaactcctttagcagatatcacgtgccccaagaatttgacttcggacaaccagaactcacacttgctaagcttggcatacaattgatgttcccgcaactttcccaacaccagacggagatggtgctgatggtcttcctctgattgtgagtatatcagaatgtcatcgatgaaaaccacaacgaacttatccaagtattccatgaacactttgttcatcaagttcatgaagaaggcaggagcattggttaagccgaacgacatcaccgtgaattcatataacccgtatcgcgtggtgaatgcggtcttcggaatatcttcttcacgaatacgtaactggtgatatccggaacgaagatcaatcttggagaatacagtggcacctttaagctgatcgaacagatcatctatccggggaagagggtacttgttttttatggtgacttcattgagagctctgtagtcgacgcacatcctcttcgtcttgtctttcttctctacaaaaatcacaggagcaccctatggggaagtactcggacgtatgtaccccttttctttcaactcttccaactgtttcttaacttcggccagctcatttgctgccatacggtagggtcgcttgtacagaggagtggttcctggagcaagatctattcggaactcaatctctcgcttgggcggcataccaggtagttcttccggaaacacgtctccgaactctctgactatggggatttctgacagttctatctgatgaagttccgaacttctgacagaggttgagggtgcaaagaaaacaaccggttgttccggtcctcggtacagagtgacagtgcgcctcgcgcaatccactaccccttggaattgggccaaccaattcatcccaaggatcacatccaagttctttgtgtctagaagaatcagatccgagggaaaaggaatcccctgaatttctataggaacggcagggctataatactttgctgtcataacccctccaggggtggtgatgagcagagggtttctaagcctttctacccccaactgatttctccccacgaatggcacagatataaacgagtgggaagctccagagtcgaacaaaattgtagcagggatggaatgaacgaggaacgtaccaacgatgacgtctggagttgtcagcacgtcctcggccgtcacgtgattcacacgaccccgaatgacatccttcccgccgttgttggagcggggaggtgcttggccttgctgacgccttggcttcgggcatttatccgcaaagtgcccgggctcgaagcagttgaagcacagacgctgctgaccttgagcgtccctgcggccttgaacgggctgcacagctggcgtaggaggacggggtgcacgagtcccttgctgattctgctgctgctgtggctgtgggacgcgcaccacgaattgaggtcggggcgctgggcgaggttgctgctgctgctgctgctgcgaggaggatccccctgggtagggattggtgtagcggaccctctggttagcaccctgttgattgcggaaattcgccaagcggcgcttgtgcgattccagctccttgtgcttggcttccaagcggatgctcttgtccaccagtcgttgaaaatcaggatagtccccagagactagacgaacggacagctcagggtccattcctgccaagaacttctcctgcttctcctcgtcttcccgcacatcctccggggcataacgggctagattgttgaactcatgcaaatactccatcacggagcggttgccttgcttcaactcccggaattccctcttcttgagagccacgactccggcgggcacatgggttctccggaaagcggcggtgaagcgagcccaagtaatcggttgcccctctggctgcgtagcctggaaatggtcccaccatagagatgcgggtccctgcagctgatgggcggcgaagacgactttctcctcatcgctgcactgcaccgtgtctaacttcttccccacggcatgcaaccaatccaaagcatccacggggttgttggagctggagaaggtaggtgggcggatgcggaggaactcggcgagtttagagtgttgtgggggtggtggtggagcattctgttgtggcgggttttggaggtggtggaggaaagcggtcatcatgttggcttgctgggcgaggatttgggtgagaatggcgttggtgtctggcggtggtggcggaggtggattgccttggtggttggggttgctgccttcgggttggttgccttcaccggtgttaacatttctcctggtcgtcaccatctgaaaaccccacacggaaccagcaaacagagaaggagctgacgattaaaactaaccacccacgactaccattattcttaaatttatcactgctattaaattggttcattaatgttcaagttgcttaggcaaataaaataagacaggctccgacatagatacaccacacaccggtgtaaccatgccccacacaactcaaaaagacaaacgaggaaaaacacacgcgcaagcctactaactgctcgtctaccgctgcgacgggccaggacggaaggtgagcaacagcgcaccctccgagctaccaacgccggaggcttccccctcctggggaaccacgggcgcaggctcggcacgaggggtctcgacgaagcaagtccacgccagggactgacgaacaagctcgggcctggaggtgctcttgcgggcggtgatcttctggctgcggcagacgcggcgacgcttgggacggctgatctctccctgggcgatcttgagctggtgcagctgcgcctccaacgcgtcgaggtccttcttgagctgcaggttctcctgacgcagctccaggatcttcaggttgttctccaccatgccacggcgcaccatctgatggaagtcgatacgagccgcgtcgtacgcctccaccatgcgtgccagatgcacgacggtagcgtcatcctccgagctggcgtctcggaaggtggcgtagtcgcgggctcctccgcgacgagggtggtagcggtagggcgagtgctgcaactcgtccgggtagcgctggtgaagagtgccgatggcgaggagagcggcgttctggcaagcggcggggaaggagtctccacccgcggtgactgccagcgaagtccgctcgggagagccggagaggatcactgcagtgacctcccaaccagcgtgaggctctgcatcctcaccctcctgctccgggagcggcctggcctggtaatccactccatgtggataccccaagaccacgcacatgcctcgcagctccaagacgaagccagtcatgtccaaaccacgacgggtaacgctgccggccatctacaaacaaaaacaaaaagagaaacaacattttaaaggccagattttgatgataagtgaagcagcaagacagagagagactagacagttttcacaaataacaaaggatttttatttttgaaaatattgctaaggcttgggatctacggctcgtcctagggtcaaggaaggctctgataccaacttgtcacgaccggaaataacccaacgggcattccttacgtgcgtgcattaatccttgtcccaggaggcaaggtacaccaaaagttgatacaattcagagtttaacaagcggaagcgtatataaaattattacacgggcagcgaaggcccaacacacgaagacaaacgaggaacagcggaagactagggcgacgaccacaggcgcttgacggcaggcacgagctagacaccgaagccttcatcttccaggaactcctcatctgggcttgggaaaaattgagcaagactgagtacaaccaccgtactcaacaagacacacccacaaatgcagaataaatgcaagggagtacaagggaattataacataaagggttagggttgcagtaaacagcatttaaagacatttagttgctcagggctattttgtaaacacgatcttagaactatgcaaagttgttaatcaaggccgtgaacccacacgaacctgccttaacccaaggcctacgatgattcagaccgaactggcaacccgaccctgggtcccagctcgtcctaagccaacccaggccaaccattccacattttagttgttaagcaagttttaagaattaaaacactaacttgggtacattgctcggcttgcccataaccgagggctcggctattcgaatagattatactctgatcagaggtgtacaactttacccacaagacacatctttctcacgtgcaaccacgtgccacataccaccacggtatacagacgaaagacatgacatagtttccaacccatcctagccttagacaagagtaccgacccaatcctgcctacggccggaacccccgggacaggcaggcaagactgagcccctagcagcagggcaccaaccctctgccgtatgacatctcgactaccgggccgcagctcgtgtagccttcatttgccctggagaatgtccatcgacccccgacttcatccatctccaatccgtgtacttttgtttatgactagactgagccacaaactaagccttacccattagacatgtggaagtacggtagtgctttgcaacagaggcccgaagaccggtccttaaacggccgaggtgctactatcaaaaccatgcaccccgagcccagcctaaaaccattttaggggattttgaatagagggggcggtgtgaagccaattccacaataatccaacaattccagagtatccaggtgatatgaaataattcccaagtctaaagttgtaaaaccacctaaggttacctaattaaattgcgaagcatctacctaaaattatactagggataccatgagtagagtgtccactagttgaggttttgtttgtctagggtgaacaaggtagtaataataacaataacaataataatatggtcataacaaaggtaaataggcatggctaaataaaacagtgataacgcgggaatttaaataaagcgataatgccataatttaaatcaacataattttataaactgggattcaatatgatcaagatgatgtgtcttgccttgctcgttttcccaatcgacggcttcgacttccacgaagagcggatcttccgaagctgcagcgtctacacgaccaacggaaaagaaaaaggctttaacactaaataactccacataacagcagaaacaaagcacaaaaatgggttctttacatcttaaggaaaaattagagacttgaacggtccaattccgagttcaaatggccaagatatggccatttgaagtttatatgctctttaaatggatatttgcgaatttcttcatttaattttcaattaaaaaaaacccatttattgcgtcggccgagggaaggggcgcgcggaccgggtccacgggaagtggggcccacgcgtcagccgctcggtccacggtggaccgggcgcacgcggctggcggcggtcggcgccgtgggtcccgcgcgtcagccgcacccgcgggcgcgggcggctgacggccgggcccacttggcagccgcgagggcgcgcccgagggcggcctcgccggcgcggccgacgggagcggcgcgcccgcgccccgatggtcaccgccggcgaccaccggcgcggcggagcggcgcccgagagagcggagagaagggggaaagcgaacggcggtcttcggctcaccccgggacaacgacgacgacgagaacggcggccggagtggaggaaagcggcggcgcggctcgggatgacgatggcgacggcgctccgacggtcggcggacggagcggagcggcggacggggtcggcggcaacacggcgaagcggacggaggtgtcgccgagtaaggaggaagtccggagcggcggcggcggcggaacggagctcggcggcgatggcggagagagcggagcacggcgcgagcacgaatccgacggcgagagcgagcggcgagcggcggaaacggaagagcggagctcgggcaacggttttatagcgtcgggagggagagaaggcggccggggaggaaggaaaccgaccgcggagatttcggccgccatagatgcgccggcgatgaatgcgggaaggaaatcggacgaatccgagggagagagagaggggaaaacgggggaaacgggagagggaatcacggggagtgattcccctctctttaatgcgcgcggggacggcgggatgcggcgcaatccgcggcggcggcggcgctagggcacgggcgcggcggcgggcgcggcgggaggaaggcgatgacaggtgggccccacccgtcagcgagagtggcgggcgggcccgcctgtcagcggcgcgcgcgcgcggggaggccgatgggccgcgggggaggagagagagagagagagggagaagtgggccgagccggcccaagagggaagggggggaaaaagaacttcttttaggattttctttttataaacctttttaactttgttcatttcttttcaattattatttgtgctctgaaaattccactaaaatttgtttaagcattttaggcttttaggaaatatacaaaaatcctccaagcctcatttgacttttatctttgcacattttaattgttggaggctttcacattgaattttaattattctttgcacaatttcgaggatagattttagagtcgttttgggacgcgacactcacactgcagtggatgtacactttacccacattctgcgactgcccaacacatgagccttgtctcaacacatgagacgcgtcacggcaaagcctttcgataacctcgcattggcagtacccgctccatgaacttttcatcctcatgcactctaggcgtacacggtttctagcagtgagaggagttctggcgcacccaggaagggaagttttacacccatgcaattaagttataactaagttcaactcaacacacgacagtcctaacaatggcgacaccattgtagagcccctgccttacacatgagaaaccactatgcatggatactgcttccgctcggctattaactccgctaggtctatccccattcgagaaatccggggtcgtttcatgcttaacttcatggctcggtccttaattgaccagggacggtactagcctttcccggataccacccaaatccaccatccgccccggtctaaaacataggtttttaattcctttcatgtcaccattatcatggcaatgtggtgctcatgcctccacatgccgcatctcaattaccttcccaaaggtaattgcccaagcatatagcatttgataaatatgaacatgcaagattctagaatagcattttctaagcaagtgtcataattgactagggactcatacgtaattatggttacaaggatttgaaggaaaacaataacaaggcatggcataaccacaagtgggatgttgatcattgcatgcaatcttgtttgtaaacaaaattaatttcgcaattgggatcaacgtgatcaaggaatagtgatgacttgccttgctcgaggtcttgtgggtcttgaccttcgcccggatccgcggctccctcggtctctgtagttacgtgcgtaagaacaatttgaattcgattagaattcaaataaaaatccaagtaaatccaaatggaagtcgaatgcgaaaatcaattctcttatattatctttactattcgcgaattagggcgaaccccattttgatttaaactattttgcgtgtataaatattttgttgtcataagtttttaatttaatcaacccgatcaatataccaatataataggctagaaatttctattgcgagctaaacatcggacgaaatcctagaaatattatacgacttaatttagtctatgattaaatataatacacggctaaaatccctagtaattaaatacgaattgctaccgttaatcgattacttatagagattacccaaaaataatccataataatttacgagaattcatacatttgtttagttattaattacatctaaattactaccgcgaattgatttcttatagagattactaagaataatctataattaaattttgcaattctacgactataactaatctataatcatactctaattattttaaattttctaaacttcccaatctccctctaattccctatttacttctttttttcctttttcttttcttccctttctttttcttttctttttctctttttctctcttctctcttttctttcttttctttttctctctcctttcctttctcctcccggcttccttctctcttcctctcttcttttctctctctctctcggcttcttcctcccgggcggcgatgacgatggacgcagggggggggggggcggcggcttaccgacagcgacggtcggcggcgacgacagcgacggcggcgcacggcgcggcggctccgaggcgacggcgcggcggcttcgaaggcggcggcgcgatggcatggcaacagcggcgcggcggcacaacgacggcggcgcgtggagaagagaaagaaggaggggaaagatggggatgggtgtggagaggcttggggatggaggggaggggtttttgtagggcgtggagaggaagaaagggaggggaaggaagagaggggaagggggagacgagacggcggtgcggggctcggggtgagggcgcactgcatggggctcggggcgggacgcgacgggcggcgacgcgacgggcgacgcaacgggcgacggtgacgagacggccgacagtgacggcgcgcggcgcgacagcggcgacgcgacgggcaggcggcagcggcgtcgcgcggcgcgaggtgcggacgcgatgggcgagcggcgcacgggcgagcggcgcgcggggcgcggggcgcgaggcggcgacgcgacgctggcgcggcgcggcagcagcgatggcgacggtgcgcggcgacaggtgacgatggcgcggcggcgcggggcgcgaggaggggggacgcacggcgcgaggcgcggcagcggcgcggcaggcggcgagggtgacggcgcacggcgacaggcgacggcgtgcggcacggcgcgggctcggcgcggctagggcagcggtggggagaggggaggaaggctaggggacatcgtcgaacacgtgtggcggccgatgaacagtggttttttctattaaaccgatttttgtgtatttcccatataaatttaattccacaattcctaatttttgcatatatgcattttactcaataattgtgttatctcaactaatgaactcaccctagattaatatcacacatttattattattattattattatttatataatttatttgaagttttttaattagggttaattattattccatcgtatttaaatttaattgatccaaatatggtcgcgacaatattttatttacttctatccacacctaatctttattttaatttatatttattttaccaatttatttttaaggtttatttctaattaactattctttactcacgattaataaacttcgagatcaaatccaaaaataggcgaataagatcagcatgatgcaattgatttaaaaagtttttgaaaatccgtatttttagagttttggttttatcggtcgaattttcagggtgttacaacatcttataagggaacctgtatggctcgggcgcccgatcatttcgagaaattcggtgacgtcagcgcccgatttacgtgcaaaaactcctttcaactgttttttctcttaaattacttatccaaattatgatccaattgcaccattaaattcattgcaattaaatcttcaaaacaagaccacacatggatatattccgacgaaaaatttttttagcttatttttgaattatttttaaatgttacacgatgttccacctggtatatcgaaattatttcactaagtagatcgaaaatgtttcactcgtttaaatcgagtgttgtttcaccttatataaaaacaatgtttcagcaaatagcgaaagattgtttcagttcactgcaacatttaatctatatatagtgaaacattataagtacaataggtgaaatatttttcggtggaacaaaaaataaaacgaattcccttaataggggtttccaaaatatgtaggtttttttgttgcaatgaaagatttcagttcactgcaacattagatctatacatagtgaaacattgtgagtacactcggtgaaacattttttgtggatcaaaaaataaaccaaatttctttaatagatggtttccaaaatatgtggttgatttgttgcaggtgggggcagatattatggtggggcctaacgacatcaccgcgcactgag

SEQ ID NO: 15309 - DNA, 10528 bp, Oryza sativa
cccccgcccggtagcccgaagacaagtattctcgatcttataacgcaatataattatgagtggttggacaagaaccagcaggtcatcgacagcttccccggcgccaacacgtggtggaaccagctcaaggacaagcgggaattgaaagcacaagctggtgttcgtgttccacaagcgccaccgtgagctcatgcagagcccctacctgcgcgacataatcctgcgggggcacgagccaggaaccaagagccggctcagctgagagataggtggctcttcaccaactgtggcagtggtggtaatacgatgtggtcctgtggagccacatcccgtggaaacatgcacccagccacgttcgttccacactcgccatggaccccgccaagaaggatgagatcaagcacgtacgttgtttcgggaggggaagaaatagcacttcgacgttggaagcgtggcttcctgctgtacggtccatccggcagaaagtgcagcatgatctcggctgtatcccactccctcggctacgacgtctgtagcatgtttagttctaaaacaaaacattttcacgctgtcatatcgaatatttagacatatgtacagagtattaaatatataaaataaaaaaataattacacagattacgtgtaaattgcgagacgaatcttttaagcataattgcgccatgatttgacaatgtggtgctacggtaaacatttactaataacggattaattaggcttaataaattcgtatcacagtttcctggcggaatctgtaatttattttgttattatactacgtttaatactttaaatgtgtatccgtatatccgatgtgataactaaacccaaaaaattttcccaactaagggggtgttaagatccaagggtgtgtaaagttttgtcgtgccacatcgggtattatataaagtgttgcatagggtgttcgggcacttataaaaaaaaactaattgctgtaggatcacattgtcaaatcatggagcaattaatccgtcattagcaaataaatttattaagcctaattaatccgtcattagcaaatgtttactgtaggaccacattcgcaaattattcgcaaattagtcgcaacctatgcagatagttattttttagcttatatttaatacttcatacaggtgttcaaacaagaaccgggaataaagaggtttttttgtcccagtttattactccaacgggattaagtgatctttagggctggttttccctctgacagggcgtgtcagactcctgtcggggggctggggaactaaccccatccgggactaaagatcatctctttagtcccggagatctttagtcccggttggtgacccaactatatatatcctttcttcctcctccagcccaagtcattgctgcaaaatggagctttgagggagggaggtgctgccaaaatttttaataaatttttttgttgataatatacaaatcggaggaatcgagaaggttagcaacttcattatctaatgatgtgtgtttagcatgttacatttatggctttgtttgtattcaatattttctccaacaaggtatatgggtgggaaatgatgagagagaaaacttgttgagggaaaattaggttaaaataatttggataaatatgttatagaaaagttgactgttatcgaaacgacaaccgcatacgttgaaagacgtggttactaaacagtggatggaaaagaagtaaagtgtattaatttgagaatttttacttgagatccccctattacatggccctacgggggctatttatagcccccattacaggtcttactactagggctttagttatacaggggaatttacatggttgcccttatgaaagggacatttacatgggtacatagcgtaattgcggtccatgggcccttagcgagccgacaggttattgtcgacccaattaacccttgggcttgatgggccaggacagattcttcggccctcccggggccgaacctgctacggcgaagtcgtcccccttcggcatatgctcttcgccttgcgcaattcgcccaggaggcctctagcttggctgctctttgctccatagtttttgacatggggagggttcgcctcgactaaccctgacgtctcgggcttgaatcctcatcggtcgcatgttttcggcaggtttggtcgaagggtctcatgccatatcgccaacattgacaaaggaaaaaatataaacaactattgaaaaacaatgaaggtatgtttggaaatttaaaaataatgaaaaaatggatactttgtggaattattgtataattattatatgattatttgtacaaaataattgaaaactaagttaattggaaaatagtttaaattattgtatgattatttaatgattttaaggatgatgttttaaattattgtatgattatttaatgagtttgtctttcgtggatttttttttaagatttcaggtagatggatcggcaatggatgtacgcggactggcagtcgaaagagtttattaacgacgtgcattactttttgagtgtggccaatgataacaagcgtaacggttttatatgttgtccatgcgataagtgaaaaaaccagaaggagtattccactgcacgaactattcattcccacctgtttcagtgggggttcatgcgtagctacaattgttgaaccttgcacggagagctaggggttgcaatggaagaagatgaagtagaagacgagaacattccggacggggctttgtactagggatttgaagaaaacacaatgggcgaggcagacgtagatgttgaagataatgacggtgcagatgatcttggtcaaatgttgcgggacatacctgaggactgcgaaagtgaaaaggaggtgcaataactagagctcatgttagcggaccacagaacgtcgttgtacccaggttgtgagcagggccacaaaaatttgggtaccacgctgtaattcttgcaatggaaggctaaaaatggtatgagtgacaaggcattttctgagttattggagctcgtaaagaacattcttccggaggggaacgaattgcccgaaacaacgtacgaagctatgaaggccatctgccctctaggactggaagttcagaagatacacatgtccgaacgattgtatcctctatcgcggtgaggtgcacgaaaacctgaaagcatgccctgtttgcaaagcactacgatacaagattagacgagatgatcgaggcgatgttgaaggacagcctttgaagaagagagtttctgctaaggtgatgtggtatttccctataataccatggctgaagcggttttttgggtataaatcacatgctagaatgatgcggtggcacgtagaagaatgtaaacaagacgggatgctgagacaccccgtcgacgggtcgcagtggctaaatatcgacagaacatttaacgacttcggagagaatgcatgaaacgtgaggttcggtttaagtacggaaggaatgaatccgtttggagagatgagcagcggccatagcacttggccggtcactgtgtgcatctactatctcccaccttggctatgcatgaagcggaagtacatcataatgtcgattattattcaaggcctgaaacaacctggtaacgacattgatgtgtaccttagaccattggttgaagatctgaaagtgttgtgcaggaaagagggcgtcctcgtgtgggataaggacaaataggagcaatttaacctacgagcgttgctatttattaccattaatgattggcctgcacttagtaacctatccggacagtcaaacaaggggtacaaggtttgcactcactgtatggatgaaaccgaaaatacgtatctgaagcattgctggaaggttgtgtacatgggccatcgtcgattccttgttgcaaaccaccgtgtacggaagaaaggcaggcacttcgaacagaaggcaaaccaccgtactaagcctaaacatcacaacatgaaagcagtgtttgatatggtgaaagatctgtaagtaatatttggaacggggcctagaagccaacctatatagagcgaagatggtcacgcggtgatgtggaagaagaactctattttttgggagttaccctattgggatgtcttagacgtctgccacgcaatcgacatgatgcacctcactgagaacctttgcgtaaacctgctgggctacttaggtgtatatgggaaatccaaagatacacttgaagcacgtaatgatcttaagcatatggaacaacgcgagagccttcatccggaaccaactgagaaaggaccatagccctcaattgttgcgtggctgcgggctgaagggtcaaacgacccgagaccctcacggtcgtggttgtaggatcacacaggaccaaacaaacctaccagaggggttgaatagtagggaaaaccaaaaacccaaaaatcttatgtggaattaaagattaccctcaaacggagttgataacgaagccctgtcgccgtcggtcgaaccacccactcgccgccggtcagaccgtcgtatcgtagccccgccggtcacaacgctgctatcccaccggtcagaccacacacacacctgcggttagaccgtcgggacccagaaacactggtagatgacaaactcgaagatgtagattgaaactttttgactttattgcatcaactagtgtttacaaagtgcaccaacagcactccttaccaaaatctcgaattaaactcgaaaccctaactttctcgcaactctaatatctgtaaaaccgatactgggaggcctcaccctccctatctttttatacatgaggtaggctgtgcaaagcccacgaatctaacacaacttacgactcctaactcacgtaggaaaccctctcttgcaagtatccaacttatctcttgccttatctcaaacaatcttcccgaattcggactcccttccaaattcgactcctctttccatatgtacacaaatcctcttgtataccatatggatttcttcatcaccacatgcattgtcctctagcctttagtatcccgcatgatctcttaatccctggacatcaacttctcccaatttgactccgatctatcaccggtaacactctcccgaggtctcaagcaacaactgcacatgcaacaaccaagaaaccatattccgagcccaagttagtcccaacttgactcacattagtataacaacaatattcatatgcatagaaaccatttagaagccaaatccccgaaggaaacatccaaatccaacaaaacaacccgaaaccgaacatgatcaggatcctgccggtcagaccgtcgggccggccggtctgaccgccgcaacacctgtggtctgaccggcggcacacgaccggtctgaccgccaaggtcaaccgaaactgcacacttcataaaatcaatcgtcttataaaatctctaaattaacattagcaaaccatcaatattttcttcacaaaatctaaattaactcctttattttatagtggtgtcctcgatgcatatgtgtctcgtccaggcacgcggttgacgcgcaccatcggtggtgccggggctctcaacgcacgccggaaaagacggagccatctcccgaaacgagcgtcgcgccagggcacgtcaattcgcgcgccaatccatctctcgaaccgaccgttgtgccaaggttccccggtgccgcatcacgtgcgccgtgcgttagggccccacctgccgtcgatggtgagggcaaagatagcagccgccgccgtccctcagactaggacaccccactaatccaaaggaaaccctaaaaaatccctcaatgtcgagctggaccacaaatgaattagatgggcctcaccatcacgcggtgactggtggctgtgtgtgagatggtttgggctctgtttaatcagactatgttgtgtttcattatcagctcggaataagtacacttgagatcccttaacttatcaacaaatccgattttcgtccttcaaccgaaaaaccagatacaacgggtccctcaactatcaaaaccggtgcaaagcaggtccctcagcggttttgatagtggttttggccgatgtggcatctacgtgtcctgtttgcgtcctacgtggcggtgacgtggcactggaaggaaaatataaaaattaaaaacaaaaacaaaaatatgaggtccacatatcagttagacaaaaggaaaaaagagtggacccacctgtcagtgggtcctaccatcctctctatccacaaacgattggacgacgggagactgggagagggagcgaccgacgcctcttgtctctccctcccggcatccatcctcgccggccggcgagcgcgcacggagagggaaaaaggcgccggccggcgagtggggcggagacggcagctggcccccgcccactgcgcacttcttcggcggtctgcgacacggagctagggttgcgggagtcggagggtggcggcgccatcatcctgctcgaacaatcggagagacggcaacgacgaacagtgttcatgcaacagtgtgattacctggccggcgacgaactcagtgacgatgcggctgccgccgaggacgagggtattggagacgttgacgccatgctcggcggtggcgtccgtggactggtcatgtccgatgacgcccatctcctcgttacgactcgccgcggactccatggcggcggccgggccgcccttgaccgtcttccccaacacgaggttctccgcgcgccgactgcaagtcgccgcgtcccgcggcgcgatgggcttggccgcgaggcttctggtcaccggaaacacgtcgccataccagatcccttgctggctcatcctactacactctcaaagtagctagtactagtgtggtgagatcgtgtgtgcactgtgctgtgcatgagagagagatcttcaaggtcatatgcggcgcgcctcgctgcatgggtcgaacgggggacacgcagggtggccggcaatggcggggcgccgtgggtggggcactggggctcgacggcgacgggcggtcgcagcccgccgaagaggcgcgcagcaggcgggggccagctgccgtctccgccccactcgccggccggcgcctttttccctctccgtgcgcgctcgccggccggcgaggaaggatgcgggagggagagagaagaggcgtcggtcgctccctctcccagtctcccgtcgtccaatcgtccgtggatagagaggatggtgggacccactaacggtgggttcacttttttctttttgtctgactgacatgtgggccccacattttgtttttattttttagttttatattttccttccagtgccacgtcagcgccacgtaggacgaggaccaagtcaaaccggccacgtaggcgccacattagccaaaaccaccatcaaaaccgctgagggacctgctttgcaccggtttgatagttgagggacccattgtatctggttttccggttgaaggacgaaaatcggattcgttgacaagttaagggaccacaagtgaacttattccttatcagctcagaagtgatataatgcactgatccatcgtcttacaactaatgatgatatagaagcgtgaggtttgagctttaggttttgatttcagttagtggccattagcataaagacagagatacagataaatataaaaaatttccccatgtgaccatgtcaaagcatctagaataatggttgctgactaggaggaagaagcccaaagtttcctgtttggctgtttgccggatgctaggaattgggccatgctttcctagcctggtccaaggcggtggtcaggcacagcccgatttcaggccgtacataggccacgctcgtgcttgggactttggcgtgataggtcgccgcatagcacgttgttagcctaatcctaatagcccgccgagtcatgtaggccagctagagacatcgggcccgtttactttgatgtcattttcaactttaccaagttttggtaaagttataaaaaaaaaaattagctacatttagtttgttgtcaaattttggtaactatataaaaaatcctgctaaaatttagtaaggttttttttcgttagagtgaacagccccatcatatatatccgagttatgaggctcctggcccagattggggtgagtctagtacgcgactgctcgtgtcgagcaaacgcgtggacgctacctatttcttccgtgcgtatctgaacctgctcacaaaactctactccagcccacaacatagtccacgtatatgcaaaattttcatgggcccactagcatatcccagccttttcctttctcatttagactaaaatccaacataaacaattctatttcatacatgtaactttatctgtataaactttacatatactagctttatgcatagtagttttatgtcttgttatatataaactttgcatatgcaaactttcaacatagattttttttcaaaaaagtatgagtgaattttaaacaataaaaaaaataagtccagcgaaaaaatatttaataaaacttctattgtacttaaatgggccaaagtagaataataatctttctacctataactttattaataaataatatactttccacatgataagtttatataagatataaaattctttctctaaataatagaaaaaaaattcaaacataatttttgctgatatgtttgaaaaatgagtacatattttgtgatcacaaaataaataacaaactagaagaaaaaataatttcacaaaagaaacaaaaaattaaaaataagataaagatctcaacttaaactatggcccacaaggcccatgtcgtatatctccagaatctaatcagttggtgatttgaaattaccacgacctggctagggttagtacacatatgtgatccggaaaagcggcattcgcgtgaacttgttccgggaacgttcacgcaatagctttttcgctcagattgtatatcggtctaagtacgagatgctacctctgagttttttatatttctttaaacaattatagaaacatatacatttgttttaaaatttatagaggtttattccgctctctagtacatagtgactacaacgctggaaggtggagggcccggcaggtatgagtttaggggaaccggatcctctgactttgcttgcaaagtcacggacgtgcagtcggggtccaaatcatagtagaaaaaaccggaccggaccggcggttcaacaggaaaaaaccggaaccagctccctgaccggctcggttccctcaaaggatcgttcacgcaatcgacccggtgtgaaccggctgaaccgggtggttttcgcgcgaaaccgctgaaccgggtgaccctaaaccggctggcttgtatatttcttatgagccttgtaagactggaggcccaacttgatttttatgcgagaaaaaatatggtgcaaaggtgggattctaccccaggctgttaggatagatgcaaaccttgccaaccactaggctaagttagctgttttgactagaagacaacacagaatatacttagccaataaaccgtggttcaaccagtgacccaccggttgaaccgatagaccggtgaaccaaacactccaccggatcaatgaccggtccggttttttctactatggtccaaatccaccgtctgttgcatctgacggtcctggcttgcatagcgagtcgcagcacgcatggccgtgcggactaccagtcacgaagcggcctagcggatgaactagctcgatcaacacaacacgtgaactagcagagggaaaataacaaaatcttcacaaattttgcgacataacagaacacaactgttctatcgtatccttgcttgttcgttccaaaagaaattgaagcatacgcgatcaggcaaaaaaaaaaaaagcaatcaattgtaatggagattcaatttctatcaccgatcaaataccgaaagaacttccaagctgcttaaccaagagaccacggtcaattggaagacgaggctggaattgatatgcctcatgccatacatgtacgcgcgcgtgtgtggatgtgtagaaggagaaggtgaaggtgaaggtgaaggtggaggcgacagaaaagggaacgagcacgatacgccagcatcggaggaaagagccgccacggcgccagcggcgctgcccttgccggaggactggaggaatagatcatcgtgcatttgtgctattgggccgaattaggtcgcagcccgcatggtagtgcatggcagaaccgttggatgcaacgaacggtggatttaaacccaactgcacgcttgtgactttgcaagcaaagtcagaggatccggttccgagtttggggctagcatgtcttatctctataaggtcttgtttggtttggagtctggagggaattgaataggatttgagggattgagagagaataattccataccacaataggtgtggaataaatcccttccaacccctccctcatggggattaaacgaacaaggcctaacggaagaga

SEQ ID NO: 15310 - DNA, 3691 bp, Oryza sativa
ttattttttttactaaactttgataaatatataaagaatcctgctaaaacttagcaatattactaatttagtaaggtttattttgactatagtctgtatagtccataagggagtaggtggctctaggtggagagtgatacaaacgccaacggtgaaggaaaggtcaattaatgcttatcgaagcctaattaagcgtcacggcagagcggtcaatgcttatggaatcctggatggcgtgcgtggtaatttttatacatatatgagtatatatacctggagcttcgtagaacttttctcttcggcaagaagtggtgataacctcgtataaaaaataaatgggtcaaacaaatgatttatgtgtatagaaatgggaaggataagattaattacagggtcaaatggattgttacatcaacggctacctttacttaatctattttagtttttcctaatcttcaagatgtggggcctattcactttgatgtcatcgtcttcaaccataccattttttttataaagttaccaatattttggctaagcttagtttgttgtcaaattttagtaaatcaaaatttggttttggcaaccttaccaaaatttggcaatgtcaaaacttgataaggttaaaaatggtagcaaagtgaacaagcccgtgacttccactagtatttttacaaatctcactactacaaaaacaaccattagtgtcggccacaaaggtaccggttagctaaaaaagacacctataagacacttcccgccaatatagtgaaaaactggcacctataacggttaattggtgtcggtttttgttgggagggacattggtggcacaaaaaatcctcccaccaactatcctaaaatacaacaggtggcggccgtgcgaaaaaaccggcacatatatcaatggtgccggttatttaaccaaactgacacctatagtttgcatcatataggccagcgaggagaatagacgccggttcggctaaaaaatcggcacctgtaatattataggtgttggttacaataatataggtgtcggttctgggtgtacaaccggcacctatagtgccatataggtgttggtttttggtgtagaaccggcacccataatattataggtgctgattttaaatttgaatttgaattatatcctattcaaatttgaatttaaaatttaaatattttttatatatagtatttctgtgcatctaaagtttatacacctaaagtttttagacccaaactttataagtcaaaagtttacatacccgattcaaatttgaatttgaattcaaatattagtttatagatctaaagtttataagtcaaaagtttacatacccgtttcaaatttaaatttgaattcaaatattagtttatagaccgaaaatttataagtctaaagcagggccggtcctgactttttagggccccggtgcgaaactaaatatagaggcccttatcatataattagtatatacatatactttatatataaattattgtataaatattaaaattttattaaaaaatatttatatagaaaacattatagtacatgttacctcaaatatttcttcaaacatttgtgccttcgtcggtttgtccaattatcggaacaattaaattaacctaacataggaccatacatcaatacacagcaaaaaccaacacatgagattacatgttaacaaataaaatcacaatgttacaaaaatttcaatttttcacttggcgatggcgatgtattggtgttacactcaccttaatagaatgattgttgattgatcactgatcagacaaatacagtattcagattcactaacccccgtcggcggtcggcccatccttctcgagtcctcgtcaagacatccagtgctctaggggctagggcagccggcggcaagcatcaagccatcaagcaagcaagcagcggctgccgccgtgcccgtgcagcgcctggccggtagccacctacacctgacacaaggcctgactcctgagcacctcgtgtcctcgtcgatcgtcggcagtcggctcgtcctcgactcctcgtgcggattgcggaacgagcggtgcacggtgggcgtgaggagaagagaggagacgacgtggaaggcaggcggcgccaatctcgcgagtcgcgtattcggcgtctgttcgccttcgccctaacgccacatcgtcgcgccgcgcgcgccggaggggggggggtggggttggcgcggggccctgcgatttgggggccagagcgaccgcaccgctcgcctccctaggaccggctctggtcaaaagtttatatacacgttttaaatttaaatttgaattcaaatattttttatatatagtatttttatacataatttttttcaactttttttaaatttttttatagtttactgtagtaggaagagaatgagggaaggaggaagggggagatccgtacgtatagggggtaggggcgtgcgggtgatcgcgtatagggggtaggggcgtgcgggtgatcgctcccgcattagccacaccctatgcgggcgagaccgcgggagttgagacccatcatcacgttcttaaaaaaaaaatcacacacacacatagagagagacccatattttatcacccatcctagctagctagctagctaacgatttgttttggttcagaattgctcgaacttttactagggacgtacccaagtgttgtaatgggattaaagaaaagaaaaatgggccaataattttacaagttcaggatcacttttgaacgcatgattatcaaatcatgggaataggaaaaatataaaaatagaatatcatatttattggattcctaggggatttgaaaacacaggaacactttaaaactaatgtttgatagtcacacagaaaaaatagaattcaagacattgaaagaagaaaacataatgtaagacctcatgctaattctctttcgaaattcctatacaataatcattccgtaggaatttctcgaaattactatgttatagccttttctgtacattcaatgtactctacggatagaggaatacataaagttgaacataataaaataagaaattgaaagattcgttgaaattgttcgtttggaaatttcccgaaaagctaatttcgaagtaatcgatagaaatcaatcatttcttttagaggtcttgtactattatctcccatagatataccttagatttctatggaacataatggttttacggtttcagttatctttggacttattgacttgttgttagagaaatttatcggtaacgttccctgtgtatcaatttttttttaaaaaaataaaacgagtgaaatggggaacaacatttcgcaattgactcttctacactcaacccaacttgcagcctcagttgattaattaacacctcagcctaaccaaacccatttgaatctccttccctaatcgagcagctgcaatgatgacggcatctgaggtttggcaacccgagaacggaagctgctggcacatgttcagaaacgcttggagacaaagatcgctcttccttaaaaattgccaaagaaaacagaaatgaatcataggaaagaaacatcgcgataaaataaacatatggaacggccggccaacaaaggtgagaaaaaatagaagattaattgctgtaattaattaagcaactaggcaaaaagggggatcc

SEQ ID NO: 15311 - DNA, 6550 bp, Oryza sativa
aatatatacaggtacaagaatacccaaatatgcagaaaaaccctttacaaataaaggaatataaaatctaaatatacatctaacacaccccctctcaaacttatggtgaatcaacaacactgagtttggagagatagaacgtgtgttgagctctagtttgtgccttggtaaagaaatcagctatctgcaactcggaaggcacatactgaagagcaatcacctgatcatgtacctaggtgcgtgtgtaagaagcatccacaccaatatgcttattaagctcatgcttgataggatcatgagcaatactaattagcacctgtactgtccgacaacaaagaggtcgaggaagtcacagaaacaccaagatcctcaagtaaccaatgtaaccaagtaacatctgctgggctatagctcgtaactcagcctctgcactagaatgagaaactgttgtttgtttcttagtcttccaagcaatgagggaaccaccaagaaaaacacaataagcagaaagagatttgcgattaaaggaatcactagcccatgcagcatcataatacacttgaagttgtaaagatgtggaccgagtaaagaaaagacaacgagagatagtcccacgaagataacgaagaacacgaagaagatgactatagtgaagttgggtgggagcataaacaaactgactcagaatatgcacagcataggaaatatcaggacgagtgacagcaagataaacaagactccctacgaaatggcgatagcgagtgggatcagctaatggcacaccagtagtggcagaaagatgaagattaagttccataggagtgtcaaccgtgcgttggtcagtaagagaagccctatccagaagatcctgaatatacttcgcttaggaaagataaaaacccttaggggtagaggaaacctcaatccctagaaaatagcgaagagaaccaagatcatacatcagaaaattgagcattgagacgtgccttaaccaaagcaataaaatcagcattatcgccagtgataatcatatcatcaacatagagaaaaagaatggtacgaccacgaggcgaagtatggacaaaaagtgcaggatcataagcactggccgagaaaccagctgcactgactacagaaggaaaccgttgaaaccaagcacgaggagcttgcttgagcccataaagagagcggcgaagacgacaaaccatacccttaggaaccgaatatcctaggggtggtcgcatgtaaacctcctcatgcaattcctcattgagaaaagcatttttaatatcaagctaggagatattccaatgacgagcagaggctactgcaagaagagttcgaacaatggtcatgtgagccacaggagcaaaagtctcatgatgaccatgctcttgttgaaaaccacgcgctacaagatgaactttatagcgttcaagagttccatcagagcgagtcttgaccttatagatccatttacaagtgataggacgaacatgagatggcaatggtacaagatcccaagtaccagtacgctcaagtgcagcaagctcttctgccatcacatgttgccattcttgatgaatatcaacatcttgatgagaactaggttcagcgagaatagtagcaacataagcatagcgaccatagcgatcctctggacaaatcgtaactaaattacgatcccgaagattgtatctcggaggagcaataggagaagcatcaacataaggctccataacacgagggcgacgactatagacttgagtaagaggaggcacataggaagatgcaagagtctcattagaagggtccactggaagaggctccactggagaggaagatactgaaagagggatgctagtacaaataggggcatcaggacaagtgaggaatgagagagaggtctcatgagaagatgtggaactaggacgcgaaaagaaaggacaagactcatcaaacgtaacatcccgagaaatcaacatccgacgccctacaggatcccaataatgataacccgtatgttccgcactttagccaagaaacacacactcaacagactgagcagtcaatttcgtatgctcacggggtgcaagaagcacatagcaagaactccgaaacatacgcaaattagagtagtcaggaggttgaccacaaagatgctcaagaggaagcctaccctaaagagcagaagaaggttggatgttgtcaagtatgtagctgtggaaacagcctcagcccaaaaatgaggaggaacagaagaagcaatcataagagctcgagcagtctcaaggagatgacgatgcttacgttccaccacaccatactgtgcatgagcaccagggcaagagagctgtggaagtgtaccctactcagaaagaaaactacgcagctcacgagaaaggtgctcaccagccgaatcagcacgaaacgttaggatgggtgtatcaaaatgagtatgaaccatgcgagcaaatgatttgtaaatagccaaaacctcggtgcgatgagacatgaaataaatccaagtatgatgagaaaaatcatctataaaaatgatatagtagcgattaccccctttcgaaacaaaaggggcaggtccccaaacatcagaatgaacaagatcaaaaggacgcttagatacagactcactagtaggatagggaagttggatctgttttccatgtttacaaccttgacattgatttaaggacacatcacccgacacagaccctaagagacctcgacgaactaaagacaatagacgagagccacaaagatggcccaaactatgatgacactgagtgaaggtccctgtagaggaggcagcagaagcaagaagactggaaagcgcagcggaaggaagacgaagccagtcaagctcccaaagacgctgagaatcatggtggcgagggccagtaccaactaggagacccgtgtgtcgatcctgaacacaacaagagtcagaatcaaaaataacacgacaaccatgatcagcaagctgtccagcagacatgagctgtatggtcaaatttggaacataggaaacagaacgaccactaaaagaagaaaatgaaagagttccacgaccaacaacagaaagaggggtaccatcggcaatttgaacagtaataaggactaaaggatgatatatagatgaaagacaagacttatcaggggtcatatggaaagaaacacaagaatcaagaatccacggaaaagtaccagaagcagatgaggatccctcattggaagtctgagaaccaggaacaatagaaccagtttgtgtagagggcaaagcaactgaaccagctgaacgtgtcgaagcagaagcagtgaggcgacgcaataatataaggatctcctgtgtattagaattgctagtactcttcttcttagaagagaaccacaagtatgcaatggccagcaatcttagaagccaattcctcggtaattttattttttttaaaaaaacttaatgtagataacatatctcaggttttgctcttactataattttcaactacgatgtcatcatcttccatgaatattacgttactgataaaattattatattgactatgtatatattaaggtctgagtacgtgttgatagtatgaataacagtaacccatgttaatagtatgaataacagtaacccatgcaacacatgttgatagtatgaataacaataaccgacgcatggagtgatgaggccgtagacatggattgcaatttcggatgaaaaatttcggttttgctagtggggtccggcaaaagtcaatgccggtcaaaaatttggacaaaaaatttttaaaaaaatttgctaataaggccctcactacccccacaaccctaaccctaacccattttttccccgacagcgccgctgagagacgaaaaccttaacctccggcgccaaatcctcctacgtgacgctgccacctccacacctcaatcacggtggcgctcgtcctacaggtggccgcggtggctcagctgctccctcgtagagtccacgtcatcagcgcattagccatccctgcccctcgggctcctggcggcggtgctcctcctgtagagggtggcattcagttgctcctggatccggtaacttggcgagagggttgtcgacgacgaggaggcagcggtatgtatcttggaatttcttgcctctccatccccattcttactgattcggtgtctcaactctcaattttcgacttcgccactgtctgattagttactctgctcttgtcctgttcttgaagtagtgtgcactgtgggcatgggagaagaaggtcctgcatatgctggcagtaggagatgcaggggtcatggttgccctggtccatcagccgccgccgcagctattagtgttggaatataaagtgaattgcctacctttcctcatcagcttaagcttttgggttaaactagtcagtgcatgcaacccacttctattccacgctagaggcttgagggggcctcgcgtgagggggagtgttggaatataaagtgaattgcccgcattttcctcatcagcttaagcttttgggttgaactggtcagtgcatgcaactcaataattggagctgatttcagcaggggaatgggaaggggagcagcagcagttgttggaagacgagcggaagatggaaggggaaggggatcagcagcagcagctgttggaagtggaacggagggcggcaatcctgagactggtattgggcgagggagaaacatagccccaccaggaggtaaatactttagtcattggacaattaatgagtatttggcaattattgattgatcgaatgttcaattatccttctgttgattgcaaaatgatttgtccccgaattttcggaattttcggctatatttcggatttttcggacaaaattttcaaatttaattcaaaaaatttcggatgaaaatttttgaaatttctgaaattttgtcgattgcagttatttcgcctcccctggcaaaatacacactttcgaaactgcaaaccctggccgtagatgcattgtcagcgcccacgtacatatccaccatcttcaccaatattcatcatgcatgcaaaacgtgaagcgaatatgaagagacaaccacaagcagcttaatcggaggtgttctgttgacctaggcctgcggaggtaattaactgggagactttcgagacctcagaaaccagaggaccacttcttcaagttcagatctatccaacgacaagctatagagtgcacatacatacatacatacatacatattaccttgggaatttgtatttatgaaccttgagattaatgaagcacatgttccctatgttttttgtttattttatgtacttagttatactggcaccccacacatatcgttgttatttttctgtgctaaacatttgtatattgtgtcattttagggtatgacttatgcaagcgtaagtgactaaacaaacacgaaaatcaggtaaaatagcaacacacaaaaaggagcctagctgaccattttccaccacacacaaaagcccagtcaccatgacatatatatccgaccggggcccttgtctagctttcttctgcgttaggttgttcctctttggcctcttccataggagatgttgcggaattcatcttggccctcttcatgatcagtgtttccactaaactttccaagcgttcatcagcatgtctcttccggttgtagcgcagcatgatgctatcacgatcgactggttcctcgtcgatctcgtcgagcagtggaccgatttcaccgttcctcggcatgagtttatcggccacgtctgccggagtggtgttggtctcgctcagcagtccctcaatttcactgaatagtgagtgctcggtgatgtttaggtagttcttggcgagcatcttgaaggcctcgaaccggcagtaggacatctcgatgtccatatccatccttccacgccgggtcagcgccgggtcgaggtggtcaacgtggttcgttgtaaacacgaagattcgttcactgccgcacgccgaccacagcccgtcgatgaagttgagcagccctgacagtgtcactttacttttgtcgtgattcttgtcggacagccctatcaccacatgtttgtcgtcgccgttggctgccttcttgcccttgcggttggttgtgagctcgacctcaatcgcatcgatgtcctcgataacgatgatggatttgtcggtcgtatcaaggaagagcttccgcaagtcggcattgtttaggacggatattaagtcgaggtcgtagacgtcgtagtcgaggaagttggccatagccccgatcatggtggtcttgcccgtgcccggtggcccgtgtagaaggtatccccgcttccacgccttgccgaccttggagtggtactccttccccttctggaatgctctgagatcgtccatgatctcaaccttcttggcaggttccatggcgagcaagtcgaatgtcgacgggggattgtacgggacattgctccacatgctcttaccgtatttgacgtggttggtgaacaatagct

SEQ ID NO: 15312 - DNA, 7298 bp, Oryza sativa
tccattcgtcgcacctacatcttttatccatctcatatgctttaatttctagttctattaccgattactctcccctcaagaaacgttttcaagtcttattttatttccaaacacggcccgtgatacctagatttttccatgagcaaataatctcatcaaccattgagaaaatggttgagcctaattaatcttctatgtatatgaactggtcgtgtataaacctatgctgcaaaacccataccatatgcaatctgcagcgtcacctgcacaacatccacatccatcaacagacgccgtcatgcccaaacaactttgccttacctccaactgcatggtccagatgcattgctccattacaatgtgcttgggttttcaagctgcctaggaaaacacaagtcgtcgacccacaccaacaatgtcatccatgggacccttccctcagcacacggaagcctaaaagcaacaatgaagtcaccacctagccacaatgatagaatcttggttgtgccgaggcagttgtttggcttgcaagatggcgttgtgagacctaaaatcaatcaaataatagcaaatcggtttctacttgaagagagaaagagcacatgaacaagaggaaattgaggataacaatgagcctaaaaaaagagctaatccagtcgaggacacaacttcagtttgtttttcgtcacattatatcgtcttcaaactaaacctctagaataggtgagtagacggttatttaacacgttttattcgtttgccattgtcgcaatcaccttttttacaccgttacaacttacaagtaggtcgtaagtatcttgctggcctacttaaaaatagtgtattttgctgatccatacaagtcatttccatctgtcatttgcgtactgcatggcccattcaagcgaaacgaacagtacaatgcgagcttgtcatctttctccaatgtgcagtgcaatatgtcaaaatgcacacgaggcttcacgcgtaaatatcaatgcgtccggtggttatggagacagacctgtgcattgcacgcactgattcgaaccctttcatcgatgtcaatttttcatacaattttacctttacaaccccattggggaattgtaatatgcatattcgctaggtcaaaaaaaatgcatattctgaatatgtagagtctaaagtagacacgggagaccaaaaaacaacaccgacccaggctaaggctgtcaatgatgctaccatgggagcgacagtgccacccctcccctctttctctccatctcccccctcttttctttctccttccatttttcccttttcctctctcttgattctctagatccggttgtgccttttcaaatccacctcgtcggtgatggtgatgagtctggtcggcggtggcactgcttcgtgcgtaggggtggatgtcgagctagctcagctcggctcagctcggtttagctcgttaggataacaagctagcttggctcggctcgttatcctaacgagctagaaaccaagctcggcttggttcgtctgcaagcttgagctagctcgtatagctcgtgagctttgggaacaagagagaaagcgaacaaggggaggagaggcgccgggggagcgacgacatccacagcggcgtcgggcgctggggaagagcggcgcgggcgacggcgtcggtcgttgcctcgctgggagagagcggtgcgggcagcagcgtccatggcggcgtcggtcgctgcctcgctgggggagagcggcgcggacggcgacatccacggtggcaccgggcgccgaggaagagcggcgcgagcgtcggcatccacggtggcgccgggcgccgaggaagagcggcgcgagcgtcggcatccacggtggcgccgggtgccggggaagagcagcgttcgcggctgcgtcgggcactgagggagagtggcacgggcggcggcggcgatcgctcggggagaacggcctgggtgggcagtgagcggctggcacgacgcgatggtgcctggtggtggaggcggactggcggcggagagatggagagtttgagacacagagtgaggactagggtttgctctaatgggcctactatccttgtgggctttgtgggttgcctgttgttgctgggttatgaaagctcgttaaggctcgcgagcagctcgcgagccggctcgagctggctcgtaatctctaataagctaaaatgccagctcggctcgttaagaaattcaaacgagccgagccgagcctgtcacgagccaagcgagctaacgagccacgagcttcctgtccacacctattcgtgcgagaaccaaacaagggctggagaggcgctcgggcgccgtgatgtgttgcgaatgtgatggaaggctggaagcatcagtacaggtgctgagcttgaaggtgatcgatctgccccgtctcaagcctgacttccttagggaccatgaatggtttggtggcaaggcaggatgccgcaacaagtgttggtgatgacggtagtaatggtggcctttctaccctctagaaggaggtcagctctgttgtgccgcatcggacggtctaccctacgtcctcagcaatgaaatggcgccttggcagcgacaacaaggtggtgtgtcgaagcggcaatgaaggctgtgggagtcagcggtggcgggttctcaatgttggctccttgaacacatgccgacaacacggtggatggatctggcctaatggccaaatcaccctctaggtgacaaaaggttgttgcaccaagatggcctaatagccaggattacgataggtaggttgtcaatgctggctacaaatggggcataacactagatctggggcctaagtgccactagatttgagatgtctatgctcaaacccattcatgtgcggcaagctgcgttggacgggcttcttctctagctgttaatagtgaaatttggtaagcccggagtagtcatcggcttagagtcagcatcggctttgaagtcctgagattagccgatgagagttgccaagtcgtcagttgtcggattcttgctatattcggttaaggaaattgatctactaaaggaatcttatccagaagagaccaagttcaaagagaatgcggcatggcaagttatgtattaattaggaatagtttgttagtttcctgttatctttagaaaagtgtgtttagtgtcctataaggactttatcttttccttttatctttaagaaagtttctttcttgtccgacaaggacttgtatcaactcatgggtataaatatgtatacccggggtctatgtaatctatcgttacgatcaatacaattcggcgcatcaccaccctttttacttctacttttgtttttacgttccggcggaacttggcatccgacgcggggctgcatcgtcttcgatctctggcgaagggataaatccaatgttccgccggtccaagcaattgtatcgtctacgtcggtgttgttcaaggttgcatcaggacattcaacctcttggattactctggtttggataatatatttgcttggctatttattatatgtctatgttaatctagtcctaacatctcaatttagctctatcggctgtttctcgctttagggtttctgccggtatcagctaattcgccttgctagattagattagcctaggcatctaccaccctgaaaatcagtcaacggcttaattgtctagatattatatttcttttcatacttagtgctgcatcagttaagttcgatctactaagtcatgcttagaactataatctctaacctgcttcttgattgccaataagagtttcatcggggtttcaaccgatgagttatctagacgttgcatcggcttacaaggattgcatacatattggatttagccgatcgcagtaaaatttaattgtttaatataatcttgtggattttatgacatcagacctccagtcgatgtatgctttaaccttcggatcagtgtttattatatattgtttctagtcgattggtttctactcgattatattgttattttattacatcagccgattgcctttatatcatcatctatattggacatatagccgatttcttaaaccctatcgctatcggctggtatcggcatcggctggaatcactacatcggcttgtcagccgatcggctgttttatctgctgtttatatatcttgtcagttgcaggatcaaactgactggcacgcccgtatctcatcaatctttggacctgcacaggagttaagcagatcttccaggccggtgtttttgattttttcgtcaacactagctctactggatggcatgggcaaggaaggcactagggatagaaattgttagatttggatcaattggattcgcccaatgacaggggcaaggtgacgaaagagctagtcagatgtgaatagaacatggatgaggggggtccaagagttcggactacatatcaatgtcgactcggtgcaatttttggtgtggtaggattcattaggcaacgaaaggtatgagccttcgagtattttcattttcctttttcttttgttgtttcttatttatgagatttaaaatataagtatttatttatcctttgtttgttctcgtggatatagatgctagatttttatctattagctaaacttgaaaataagtaatgagtatgaacaatagaagaaatacggtagtgcaatcatgttatgtactccctccgtttcacaatgtaagtcattctagtattttccacattcatattaatattaataaatctaatagatatatatgtctaaattcattaacatcaatataaatgtgaaaaatactagaatgacttacattatgaaacggaggaagtaggaagtaatatggtagaggacggcttatatttgagtaacatacggcatgcatttccttggtaaaatcaaataatactgaaacgccaagcgcgttttatttgtgagacctactattttttaaattttgtgactgtaatggttaagtatgttctaaacaccttaagttttttttaaaaaataaaatagttctcgaaaggatctttaattgataccggcacacagagctcctgattttgtaacaacttgttatttaaaaaaaatagatttcaaaggaaaaaatatataagagaagataaatttacgtgaaattctcgtaatttacgtgaaatactcgtattcgttgagaaaatattttgggtgtgtacggaagatgcaattaggaccttgcacgcaaaaagaaatagctcattagcatagattaattaagtattagatataaacattttaaaaaatattaatataactttttaaaaacaaatttcttataattttttttttaagaaaacaccggttatcatacagaaaacaagaaaacaagggaatagaagttgaaaaatgagagatcgtataaatttttctactattatatcgtgcatagctagcatagcaaattaaccagctgatttggcatgtatctaagctatttattatataccgttcaaaatcatttccttgtaaccggcaacgaccggtcttaggttggttacgttgtgtaacaaaaatactctatttcttctaattactgacgtgcaatctttttatttgtttatgaaagaaaattagaaaacaatttagtttaaaatctgaagcagttcggaatatatgagtgggaaatcactaaaggaagttttttttaatgaaacttgtacaacctactttctgcagagtactccaaatcataagaaggggtgggaccggattgggaggggagagagatcaggctcctctaccttcgaagatgtgtggacccgataaaccatggacccgcttgtccgtgacatagacacggtgtctttgaaggcagagaatctcagttcggatagtttttttcagacctttttatttttttaattttatttttccgaaaagtatttgcaaatctgaaccttttggccacaccagatcgtgactaaatcactttgtcacgtcacgcatagctggcgtggcaaaacaatcgttggttcaatttttagaaatatttttcggaatgtatattaataaaaataaaaagaattaggagggggaggagccctaatctgtggcgccgggctggccctgggcctaggcgagttgtgcgaccgcctaaggccagagtggagggggggccatcaccacctccaacccaacaggcccagtcacttggcaggaatcgagtattgagatcgagggcaacgcgcgatgtggcggtttgtgggtcctggcgctctctcttttctccctgaccgcgacggccgcaaccctcgatctgtcccttctctttgcagcgagacgacgagagaagacaagtcaagcataagtgcaaaaccagcagccaggtagtctccgcttcttgatcttgtttgcaaaaaaggctcactgcatctataatctatttactccaaaatttaggttatgattttcttcttcttttgatttacttacatggcaagtccactattttaggtgttagtacaatattacttgacaagcatttgtcgattaatttgctaaagaaactaaagaactttattgatttgcaaagaaagagaactagaagttcttttttacaatacacatcggatcttgttgtcttcaatttctatttatataagttattcagactactttatttctgtggtttttttattgtctaatatactatcaacattgtttatcaagaataaaatattatataacaatttacaactagttgatttattatttactatgttagtaatattgtttttgtcactttagagattagaccacagttacatattacaaataaaaaatatttaaccttaagggcctatgtcaccgagttcacgtagggcccttgaaattatagagctagccctacgaacgggcggcggagggggaaaaattggagtcggtgagaaagatggtgagcagcatgaagcttcctttggtggatggggaggagcagtcgtcctatgaccccatgggggaaaagttgaagatgatgagcggcaagattatttcggaggagcagcgtctagtggagttggagttggagttggaagatgaagaggaggtggaagatgaggagttggccgagctgataacggcgcgagacttccgtgtcagctgggaacatcgctttacccctcgctattccttcaacgacaccagtaagtaataaatcctcctccgccccgccgttttattctgcttccgtttctttctttacttcaacgcaatcaagattatttctgcgaatctatcta

SEQ ID NO: 15313 - DNA, 3944 bp, Oryza sativa
cagatccttttttctcccattctgaatccaagtaaatttcataaaactacaggtattttgcacaatttatcacaaaactacatatttaagagcttgtttcacaaaactacagatttaatgtctctgtttatcacaaaactacaggtactttgtataatctatcataaaactatatatttaagaactgtttcacaaaactatagatttattgtattcgtttatcacagaactacacatttagtgtcttcatttatcataaaactacggatttagtgtctccattattacaaaactacatattttgacaatgctaatacctgtagttttgtgataatgaagacactaaacttgtagttttgtgataaatgaatatattaaatctgtagttttgtgaaataaattcttaaatatgtagttttgtgaaatattgtgcaaagtgcatgtagttttgtgataaatgaatatattgaatttgtagttttatgaaacaagctcttaaatagatcatgcaaagtatatgtggttttatgaaatttactcatccaattatcgttccagaaggtagctttactcccgtcacccaacgtgatggtagctgccgccgcaaaaggttctttgttgattgtatcacaaggaacctccatttggcgaagggccctggcgaactcctgcagctccaaaaatgggtccacccaaatttcttggtttggctggcatacagtcgcccaatttaccaaactgtgtccaggggtgatattttctgggtcttaccctttccacaaaaaggctctcctaattctgtcaattttcttgatcaaccatttttgtacgtagaactgtgagatggtatgttgggattgagctcagagcagtcttgatatgttgttcatcttactcctcattctcatcaaggttaatgtctagtactccatatatgtgcttatccacattgtcacatcaatcatttaactaaaacttggatttttgagtcaaaaatgggacacaacaatagcatccacaatgctattatttgataataaatattactgctacttgactgcagcaaccgtatgtcccatgcgctatacggagggacctatcccaagatatgcttgctgtggtgataccttgcagatcttctctctccaagtgaaagaagcaaaaggtggtcttgactggccgctgcatgtgtatggcttggttgccaccagggactctgtagatcaaaggcgcaaccttcttttcaggtgcacaagggataattgtcaaattctcactccacaggtatctatcttgtaatttccttatacctttattgttttctcatttttcttttgcagcttgaagtgctcaacctatcatactagtagattactactgttctgtacacttgtttgtataaatatgttgtctttttggagttattagtgcattataggctggctgcacctaaactgtcaattgaaggcatgtttgcaatttttttccttaccactcttttttcacataattcattggtaaaaactaaaaactgagcatttgtttagttcccaaattttttttactcaaacgtctcatcgaatctttggatatatgcatggagcattaaatatagataaaaaaaactaattgcacggtttgcacggaaatcgcgagacgaatcttgtgagcctaattaatccatgattagccataagtgctcagtaacccacatgtgctaatgacggattaattaggcttaataaatcgtctcgcggtttctaggcgagttatgaaattagttttgtcattcatgtccgaaccccttccgacatccggtcaaacgtccaatgtgacacctaaaaattttcttttcgcgaactaaacacactgtgagttgatagaattggcaccactatgacctatacctatactccttttgaaataatccactcgtggtgttggcattgaatctgctgtgtcaactcttcctaccacagttttctataaatcaacctgtgatgatagttaatattatcaacagccaaacatagcagtattgccacatgtataaccaagatgagcactcactgttgcaaataaatgaatagcatattgcatgcaaaacataaattaggtttgtttattttaggcaatattatggcatactttcttttattggtagcaaagctattgcatttaccttgtctatggaaatagaagttttgtgatggaccgtctttaacatgggctcgtaggaaataactgcatggattggttgcatactggatccttattatacggagggaaccaagttttagtaataatcaattggttgtgatgcctgcaggattcacacctgctgttaacaggcccatctcgtgcagttgtggtaattgatccagtaacgtttgaagttgaactaaaggtaaaaggaaaaacagaggctgaggataaggtgttgagcctaagggtctttatgcaccacactgtgcatgctccgcagatgtttgtccagcaaacatggggagcttgagttgacatgtgctggacttgtagagcagttgaggccacaatggtgagtatccaagttagagaggggtcatggccagatcatatacgagggttggtcgtttgtcgtacgggcagcgtagagggaggggattttgtgctgcttgattctggagatggaagaatgcctattaacagctacgatggtggcattgagctttcaaggcgtcgtcgcacaacctcaatgtcgtcgttgcaagaggcagtgctgttttcaagcctcgccgtgccgggagtactagtcttgtatgggaccttgggttttgtaaggtggaagctactgtttgttggtcgctccacgcgaccttgaggcaaatgctctcgggcatgccttgatccatactaatcactttagcttgttttgatttttgagttaacgtacagctcggctgcatatgcttgcgtaattgtgtttttggcgtcatggtctgctcaaccccagccgtgttcaggactagtaccatgtaacatatatatgcttcaatgtcagaatccaacctttttaactttctgctgttttcttaatgaaggttagctgcctattcacttcactgaacgtacatgaagcgcagcagcagtttattaaccaaacacgtatagttagccagcagctacgttgaatcaaacaacagatcgaagaggaatcatccgttccgttccaccgccaaatccaatgtcatccaatcacttcaatttgcatctctcacatcaccatctcttacccttattcagaccgcaacacccttacatatatagcgtcaagtaatggaagcaaccacatacatacatcgttgcatacacatgcaggcctgcaggctgcagctaatccaatcccgaccaagaagcaaccggttcaattcattaacaccaattaacatatggatggatgcaatcagcaagatgcaaaatgaacaagatattttccccacaagcatctgggactggaagggacatgacatgcccacccttgttatcgtcaaatatcaatcttgacattatatcaagccttcatcttcaagttccactatttcgcaaaggaaaaaatatgaattacccccctaaactatcgtcgtcggccgaagttccctctgaaccaaaaaatcagacatcactcaccctaaacttttaataccggacgaattacccccctcgacccaatccggagcagttttgtcctacgtggcgcacacgtggcaacccagtcagcatttctttttttaaacacggtggggcctgcttgtcattctctcacctcgttttcctcttcccctcctacccctctccctctcgtgtcgttaggagagcggtgggcggtggctcgtcgtcaggagcggccgtgcggccggtcggcgcacacggcggcgggcgtgcgagggcgggcggtggacgcgcga

SEQ ID NO: 15314 - DNA, 5361 bp, Oryza sativa
agggaaggggaggaacggctgcggcgaggagatggcgtcgccgccagcggctcgccacccagccgcgcccgctgtcgccgctcgcgtgccaaccgcccatcgcccgccctcgcgcgccaccgccgccgccgccgctcgcgtgccgaccacccaccgcccgccctcgtgcgcccgctgtccaccgcccgccctcgtgcacccgccgcccacacttgtccgccgccgtgtgcgccgaccggccgcgcggccgctcctgatgacgagccaccgcccaccgctcgcctgacgacacgagagagagacagagagaggggtaggaggggaagaggaaaaggaggtgagagacaatgacaagtaggcccaaccatgtttaaaaaaaaagaaatgctgactaggttgccacgtatacgccacgtaggacaaaactgctccggattgggtcggggggggggggtaattcgtccggtattaaaagtttagggtgagtgacgtctggtttttgggtttagagggaaaattcagccgacggcgatagttcaggggggtaattcgtactttttcctttcgcaaaatcaaatatcatcccctcatactgagataaaaacagtaagtatgaggggaacttttagaggttaattaaagcacatttatacaaacaagtgtacagagcagtgaattgcctactggaattgtgcacacattatcgtcccctcgtactgagataaaaacagtaagcatgaggggaatttttagaggttaattaaagcacatttatacaaacaagtgtacagagcagtgaattgcctactggaattgtgcacacattatcgtcccctcgtactgagataaaaacagtaagcatgaggggaatttttagaggttaattaaaatacaaaccacctcattccaaatatgtgaatgcaccatggcaggttgcccatttcatatttgaatgaaaccataaggattactagataaaaactctatccaaatatatgccttaagatagacaacaacatgtgaataactcaggtagcaattagatacgatgatgcttgtagatcaactattattctaaggtaaaaatatagtacagacgattattgcatcacagaatagctactaaatactaaagctcctacacaaagcattgtgaatgctcaaccaaaaaatacatggagcacaaatacttcagcaccatcctctaaatgattcattcatataagctattagccaggtttatggtcatgtgacaaggaaggaatacctggtcttctcggttttaacttgtagttagaccatatgcatgttgatatgatcagcatgcagttattagatgaaagaacagcagcctggctacaatttctaaatcattacaacaataggtgaaaagaagtaaactgcaagatagagtatataggttatacaatcgtagatagaggaagaactctagtacaagagcaaagcctgatgtacaattatgagataggggatttctctagaattattatgaagccaatcagaagatagggacacccaattactcaattaaatgatgcaacctaatagcatacagatgcagtaagtaataataaatgtaagatgagctagtaagatgcactcatcaatgaaagtagtggtagaattgagaagcatcctcaagaagaaaagtgtagtaacactagcaatcaatcccaaagagacaaattttgcgagcccaagtaattaattagcaacaaatgtttgaaagaaggtaagaagaaacagtaagggaaccataaacttgcactagggtatattgcttcacaaatcagttcaaatttgaatggaaccataaggattagtggaaaagaactctatccaaacatgcattaagatagataacacaacttgtgaattactacaaattagcattcagatgtactagcagcaatagatgaggttgcaagaggagtagtagtagaattgagaagcatcttcagtaacagtaactacactgtaacaatcaaaattcccaagaggcacattttgcaagcacaagtaggagtaattagccacaattgttcgtctgaaacaaggtaaacaagagtaaagttgaactagggtagggtacaattggttggcagatctagcaagaactcagcaagcagatccatatccctactactccactaagcttaggtttgtctttcttcatacacaaaaaaaaacatgtcatctgatccgatccgatccgatccgatctgatctgatgagagagaaagtaggggaacaagagaaagggggatggatcaggcggaggcggaggcggcggtgcgggagcggtagagcttgccgaagacgtggagggcagtgacgaagcctatgaagcagagcgacatgacgagcaccatggtgggcgagaggcggaggccgggcgcctcgtcggtgtagaatcgcagcatgttgctcccgccgccaccggagaagcccccggagccgccggcggtggaggcgcggcggcggcgcatgccggcggccgcagcggccgtgccgcgggggccaacggtggcagggcgggcggccccggcggcggcgccgacggaggactgggactgggaggaggagcgagccatggcgattcgggtggaagacagggagacgagacgacgaatagtctactctctgggcttgggtttggatctcacatgatatactagtactgtacatacacccgcccgcccatataggtgtccaaacgggcggcacggcccggcccggcacgggcacggttccggcacggcccgtttcggcacggcccgttaggcacggctgatgaaacgggccgtgccgtgccggcccacgtgccgagccgccggcccaagcacggcccgtggatggccgggccgtgcccgtgccggcacggcacgcccgcggcccacgggccgttcggggcacggcggcccgtgaaggcaggccgccagcccgccagcctgcagtgcacagtgtttttttttaaaaaaaaagcaaaggaaatgtataaggaaaaaaaattaaaaatggaaataaaatgtttaaaaaaaagtaatgatttactaatgttaaaaaatgaaaaaatggtatttaaaaaatggaaataaaagttttttaaaaaagtaatgatttgctaatgttaaaaaaaagaaaaaatggtatttttttgttgtgttgaaaaatttaaaaatatagattgtgattcattattttgaaataatttaaagataaatccacacttgcgaaaatattgcaaaagaatttgttaaaaatagtaatgacctttattgatgtttatatcattacaggatacaatgatacatgctgcctcgttaaaaactttgtcatgtaaaaactcataggggaaaatgagaaaatcatgacaaagaaaagagtacagctcaaaggtcagaactacttctaacaaaattctactggggttggtctggatccaggtagagttgctcgaactgggcggccaattcttggttgtccgcagtgtattgggcatgttgtcgagcaagctcccagtctttaacgcttagtagcatttcgacgtggtcgctgcgcagagtcgtcctccggtcttcgatgattcggccgcatagactgaaggccgattcggaggacaccgtcgacacgggcaccgtcaacacatcccgtgctagttttgaaagcacaagatatgttatcttgtggtcattccaccacccgaggacgttgaaatcttgtgcttcatggtggatggcgtcgctgtccaaataaccggacaactcttcggccacaacatgcgaagaggcgtctccacttgtagccgacgaactgccaccaccttggattgaacttgaagacgatccaccccaaatcctaccccactgtatcttcttcttacctgtagtggggataggagggggtctctgctggcgaacttcctgaaactttacttcatatcttccaaaaacctcatataatttacgtctaacctcagtataaaaagaactataatctacacctatagtatctccaacaagtgataaaatagcagacaatccccttaatttacacctaggatctaaaacaaaagcaagagcatacaacataggtatatttttccaatatttcaaatatttttgtttcatgtgaaagacaggttcagttagaacgtcatcattttcgtattctttaaataaagtagcaatttcaagaaggttgtgcaaaattatattagcagttggataataaacttgtgacaaagttagagtacaatcataaaaagtttctagaaattggtaaaatttttggacaattgcccaaacatgctcgttcagtactgaagacccgtcactgtttcttgggccaccacgtgactgaacaaaatcagaaagtaaactactataaggtaaaacaacttttaacattaaatacgttgcattccaccgatgctctgcatcggtggcaaacttacgagctttcacaccggccgcattgcaaaacctcttccatgcagcaatccgcgggttagaagcagttaaccacgcgattgcttgacgaacagcatcgatgtggtcacctaccctcttcatgccagtcttaacaatcaaattaattatatgacatgcacaacgctgatggagtagaaaagattgagcatacacacaaaataaaggttgcaatatttcaatagccctagaattagcagatgcattatctagggtgacagcaaatattttatcagcaagattaaattcattaattacttccctaattctttcagctatgttttctcctgtatgtgagacatctattaacctaagccctaaaactctcttttgtaattgccaatcatcatcaacaaaatgaacaactacgctaagataatcctctctagctctactactccatatatctgaagtaacactaacagagaaagtacatgtactaaacagttccttaagtgcagttgcttccttgtgataaacattctctaaatctctagttgatgtttgcctactcacagctttaaacctagggttatgagattgctgaatgtaatgttcaaaagcaggggactccccaaagttcaggggtaaatcttgcctggcgattaaccggacaagagattcccgagcaaccatgggatcgtactcccaactgtgtaccgtaccgtctgggtttaccataagttgctgctgccggagttgtattccttgcttcttggcacacgactccgcatggcgcttgaggtgacctgtaccaccagaagaacgagcagataaaatttgcctacatattctacaacgggctttcgatacctcccttccgtcggggcatgtttcctttatctcgtcg

SEQ ID NO: 15315 - DNA, 6028 bp, Oryza sativa
agcaagggagaacctggggagtgtgtagatgcaacagaattcagaagcttgattgggagtcttcgctacttggtaaataccagaccagatttgtgctattcagttggatacgtcagccgttttatggagaatcccacttctaaacactgggctgcgatgaagcatgtactgcagtatgtggctggtacacagaattttggaattcagtttagcaggaagaaacaagaaattcctcagcttattggctatagtgatagtgatatggctggggatatcaatgataggaagagtacatcgggtgtgctgttcaaattgggtgaaagtttactcagctggcagtcacagaagcaaaaaattgtagccctgtcttcatgtgaagcagagtatgtggcagccacaactggagcctgtcagggtgtgtggctagcacggctaattggcgagctgcgagcttgtgatcctcagtgtgtaattctgaaggttgacaataaatctgctatcaatctttgtaaaaatcctgtgcttcttgatcgtagcaagcacattgacacaaggtttcacttcattcgggaatgtgtagatcagaaacggattgaagtggattacatcagaactgaggagcagattgcagatgtgctgacaaaacctctcggcaagaatcgttttctagaactgagaaggaagttgggaatggttgaagtatgaatgcatcaagattagggggtgatttgttagcctgaagataatcttgtgcatttgcaataatttgtttgcttcagttagtaagtttgaattcttaggcataggatgctgcatgcattgtaacggctgtcccaggaagtttcagtcttgggcagctgagcttttcccctttttctgttagtagcgatggaactggatctggagcgtgggatggcgcgttcagtcgtttggatccggtgaaatcaatgtttgttatgcatgtaacaacctcacaagatgagggaataaaattgaagagaaatcagaaaagctgcaggtggttacgcagcaccaaaaaaaaaaaaactctgttcttcgtttcagttcttcagttactgttcacgtctgaaaaatattcagagattgtaggttagccactgatcgagagctaagcgaggggtttttgctgacaccactacctagtgtatattatttgatagaaaaacctcctaatatatatctcagataattgtggacctttagattgctttaagattcgtgccaacaccttaaaccctaacccttcttccttcctcctcactcccactgccgccgccattgccattcctcctccaatcctcccccatctcctccactcaactcgatggcgccggttgaacctcccctcctccccgcctcttctttttctcaagctgctggtggtaaggtgtccccatctcgtcatctttcccgttttcggtggcttcccgctatatgaaacaccaccaccgtccccgtcttctaatgacttgctccactttgtcctcactagcaacattattggcccaccgcccgccaccgattctagggcttcagcggtgccatcgccgccttgtcaacgagttgccacttggtacctcccacagtcatccctctaagaccggatcagatttttatccctctttgccctccctccacccctaacctcatctagaaacctaaaccctaactcgttgggttagtgttagtcgttgaagttcgttgcttgaccaggccccgcctatgcctaagaggaggaggcctggcacgaaatgtgaagcatatcagaaggttagaaatgtgcaagattttggtcccaatttttattataacatgatttaggaattccgtaattagtactgcattaagtattcttaattgtaacattgcaaagctgatcatgtgtacgtgcattaatatttggtattcattgatcagtacgcttgccggaagaggcttgcggacgagagggcgagggtgaagggccgcttcgtctccagctccggcggcaacgataataatgcacctgcacatgagctgccgccgtcgcttgtcaatctcagcgatggtgctgctgctgctgcaatcatcccaacaagaagtgtgccggagtggtggccagaaatgcaggcgtcattggccagggatgagatgtgtggcggcgcgggcatgaatctccacctgtgcgacgccaacgagatggagcaggttgctgcctacgttggcgtctcctccatggacctctgcgcctacctgcactgctcatggccgcccgtttagctaattagctagctaaatcgcatcgattgattttggttcgttgttataaattcctcaatgatctagatcggcacccgacttgcaaaattgatctgtagatcaagcagcaaaggaacattttgaagaaacaagcaaagcattcattcgttcccttatttttgtcttgttatactattttgttagtccaacgtgttgaatagtgtcgggtgagaagaatatataaatattagacacgttatattaaacctcagggtagaggaggtatataaggaaacgagtctattcaaatcaattctatcataagatatattttactaccatatactctaacatcccccacaatacaagcgtgagcaacacagacgcttatattagagaaaaatcctaggagagtgctcaacacagatgatagccttttgtgttgtaatcgatgtagctaaagtgaagggtaaaacgtagccatggtcgatgaagccatgcatagagtagctgcggtcgatgtagctgaagtcggtggtgctgatgacgaggtagccgagccacaggacgcacaaggggcatcgtagagtggtcgtgcgtgcgcaggatggctccaaggaccaaggtgtaaaatgatgtgctgaagacaaagatggtgacactggagaacaaggtatcacaccaggtttgccaagcctagggacaactcgggaagatgcacacaatggtgctgccaataccgtgcgcgcgaggttgtcgaccaacttgagtattgcactagtgtcgaaggggactagcaaagaaagcctcagagacggtcgcagtgcatagagcggcatagaggaagtagtgtcggtgcatcttgctgttgttagagtcgaacgaacatgtttgaagaagagacaacgctggtaacgttcgtaataaataacaagaaggtcccgaactagtataaatccttatcatttgtctgctaggtacaatctagcgtacaccataggatcagccgattaggtcatggccctacaatttgcacgcattcagcttggctagcgcactcaaccaggtaacttcccaatggggcctccaaatatgtgagtggacgtgagtaagccaaaactcacatgtacactccaccttatcctcttccacaacaaaaccctcctcctatcctctacacgtgatgtaccccatgtaccccattgcatgcgccactgttggttgacgcccgtttcccgctgtgttgaccctgcccatcgccttttcccgaccacagctagcagtgccactgccatctcaccatcactcagttcccagtaagacactttcacaaccatctctctaaacacagcctccccccttccctgttcctctggctgcccctccaacccccactggtccaccctggtagggaaccctaatccatctaggcttgggcaataatggttgtgccgcattggtgctcatgcgcgtcctagctgtaacgccccaattttcattcagaattaaaaatcattaaataatacattttgtagaaattaaataaaagttaaagcaatttaatcaagtgaaattatagaggaaattaaaaattcctttaaaaatcttatccgggaatattttgtaatattctctgtgccctaataaactctctgaaatttcccgtgaattttcagagctcaagaagtaattataataatacaaacaccatttaatcaattaaattaaattgtaaaacaaattaaaacttccccttcctcctttttgggccgcttttggcccaatcccccttcacctcccgcagccgcgcaccccctctctctccctcaggccggcctatccctctccctcggcccggcccttttgcctccccgcgcaaagcctattttgcctccctcctcctccttcctcccctcgctgacaagtgggaccggcggtcccacccgtcagctcttcccctacctctggcctcccaagccaaaaccgccatggccgccttctccccatgtcgtcgcctcccccgcgcccactacgctcccctcccccgcgtcgcccgtgaccgccacccacctcctccactccgcccgcgcgccgcgcccgcaaatcggcacggatttgaatttcgaatccgccgccctctctctctcttcccccgcgttgctagccggttgccgcccctctcggccacgatctctcctccccgagcctatcaaaaatactccccggggcagcctctccccttctccccatttgcccgagctccccacaccacctcccgtgctccccacgctaccctccatctctgccaccctccgctgagcttcgaccgcacgccaccgccgctctagccgccgccaccactagctccgccgcgcctcgccgcatgccggcctttgctccatttccccaatccgccaccgaatcaccacctccactgcgaacccgaggccgccgccgcattcgccgcctcccgctcgccatggctgcctgatccccctttggggcaatctgggccatccacgtggcccctcggtgccgccccgtgtcagctcccacgtgacgccacgtcggtgccacctccgcctacctgtccgccatggccaccacgtggtgcacccgcagatggtgtgcgcgtgaactcggtccaccgtgcgccctccccctcaccgacaggtggggctgcgtgtcggcgccacctaatcccctcggctgacgccataaatagctttaattgcgcaataaattcggtttaacttctagaaatccatttaaatggctcaaaacttctaaaattgagttgttcaacttgcaaaattcatctaaaattgagctctgcatgtttgtttacttttcatgtattgttaacttgatttttattagagtttttcctcgttttgcatgccagcacgtagattccgccgtttcggaagtccgtggtcgcgaggaaagagtttagaagattatattgaagaagcaaggcaagtcacacattccccttgagaatgttgattctagtttataaatgttttatcgttttcaaataaaattgcatgtcttgctaattacgtgggatcatggttttacctatatgttcatttgtgccatattactttatgtctgtcctttgtcaaacttgggtaataattcgactagcttgtgttacttaagttgacctagctagaactataggattagccatgcttaactaccactagctcacataatgggataatcacatcattagacatctcgtatcttgatgagctgcgtgctcaagacatccgatcatgtttcattggtcgtaattatccaaataaaacacgacttaatggtgggttgtgggtgcatggttttgctagtcgcgcccatggcaattaaggtccggttcacgggatgaactggaatacttactgcgcgtaccacaagcgggaatgggtaactacttgatctgtagctttcctctagctgacgtacccaggctagagtgggcatgatggagtatggatgggccctgcgacggcctttgctgcttccggattcaccgtggcacgggggggggggggggggcggggggggggggggggggggggggggggggggggggggggggggggggggggggggggggcgggggggggggggggggggggggggggggggggggggggggggggggggggggggggggggggggggggggggggggggggggggggggggggggggggggggggggggggggggggggggggggggggggggggggggg

SEQ ID NO: 15316 - DNA, 10529 bp, Oryza sativa
ctgcctgttagggcaggggcgaaacctgaggtgtggcatctattggtccgaggaagttatataaagggtattgtcataatcactcgacatggtgacgtgtctggccgagcatggtgacacgctggtggattgtgtcttgtgggtacagttgtgcacctctggccagagtaaaactatttgaatagccgtgctggttatgggtgatcgaccagattcaccgtgattagtcccatccttaataattggttaatgaactagtgtaattcaggtggtttggttgggtctgttcaacgtggtgtagcgttgatcagtggagatttaatattaccttaattaaacaactgttttaccgttttcaactataaatgctttacaactgtctttatgcaaatagccacaaacctccctttgtgccccattgcatgagtgcatcattggtgtggcttgctaagtatggtggttgcactcagccatgctattgttccctcttttcagaagtgtagagcttctgagctgaagacgaagttagaggatcaaggctcagaccccagttgagttttgtctgtggagtggagctgaagcctcgctaggatcgcctttttctgctgctgttactttcatttcgatgtgaggactaagtgcctcttatgtaagtattttacgctttatttacgtttggatatgtatatttacttattgttttgtgtaccctggctgattcctggatagaaatttaatatacaaaatagtctgaaaattagcaaatcagaagtttatcataatccatttataggtaatgagcgtgcacttggtatgcctgtctcttgggtagccaaataaaatttctacttcccaagtctctaaatatagtttattttggattgcggactatattaagaaagtatgtgaaatagaattagagatggtacgtgaattacttaaaatgaggaagtacatggagaaatttaactgggatggctgtgatttgttgaaaggagggaatagatagagaagttatgttatgttttgggatcgataaacttttgaagttaaaagttactattattcgagtaacttcagactttcataatgtaatcaacataatgatggcattattatcaaggagtactacactagctctagtggccgagtagactcctttgatcccatgcgcctgactctctctctctcgaactgtcactcatctgactggggtggcgtttgtctccctagcagagtggcgctgctgatcgatttcaagcgaattcgggtggtgggtggttatttgggtgtaaagtttttaaagtatagggacacacatttgcggtattaaatataaattaataacaaattccgcttgtaaactgcgagacgaatttattaagcctaattaatctattattagtaaatgtttactatagcatcacattgtcaaatcatggcaaaatttgggtcaaaaatttgtctcgcaatttacatacaaactatgcgattggttttttctatatttagtgctccatgcatgtgtccaaatatttgatgtgacttttttaccaaattttttgaaatctaaacagttgggcaaacatgcacaatcaattaatgtacctgcagacatggaaaacccttaacttgttcacctgtaaagcgagcgagctaattcatggaatgtgtactgcgtactccagctatatactagtagcatgcatgttgctagactgtgtcagtgtatactagctagagatccagatcatccagcccatgcatgaacaggttaagatcttgagtaatttataagtccagatgtacgtctaatatttaggctttatttagattcaaacttttttcttcaaacttttaatttttccacgtccatcaaatgtttgaacatatgcataaagcattaaatatggacaaaaaaaaattaattgcacagtttgcatataaatcgcgagacaaattttttaagcctaattacaccatgatttgacaatgtggtgctacagtaaatatttgctaatgatggattaattagacttaatagattcgtctcgcagtttacaggtggaatctgtaatttgttttgttattagtctacatttaatatttcaaatgtgtgtccgcatacttaaaaaaattttggcacacgaaataaacacagccttagttaagaaaggcctaattttatcatatatatatatatataatattaaacgatgttcattgtatatgtattactactccatccgtcccaaaatataaacactttcggactttgacacagtctttgagatgctactttgacaaacgatatctctaaaagtaatatgttttaaataaaaaaaattgcatattgtgataatttatttaatgataaatctagtaacatcaattttacataattgcaattttaaataaaaagatttgcatattgtgataatttattttttatattttttctattaatagtcaaagttacaaatatttgagttgacactatgctaaaaatgcttgtattttggacggaaggagtatatcatacatatgaattgatagttgtgaagtttattaattacctcacccctccatttagaaagctagtacgtactccagccacgtatacctcctctcatcaatcctcacaactaattgatagtccttgagactctgttatgtaactagcttggctaaatctcagtcaactcgagcatgctaaatattcttgatacgagggcctagatgatgtattcagcatttctatacaacatggagagacgtcagtgggagagatcgcgaggaagggctaccatcgaagacaatgttgacttcctcaacaagcccttaggagaagtctttcttggcaacattgagaccagagctccatcaaagaagaacattttgaaaggaacaccaaagaagaacattggaatatgtttttgagttgggtgacggtgggaagaaggtattaggtagtggggggtttagagggactagactaatctttacctattataaaaattaaagatggattctctactaaactgatttttcgtacgtcatcacttatccgtgtcggtcttgttctcgcaattagcgccacaaattgatatcgttctgcaccctacgcgctcgcgtgatacgtccgatacccgtgtcctgtactctccctgtcccaacataaatcaacctagctcgtactaggatatgacacattctactacaacgaatcaggacatactctatgttcagatttgttgtactagaatgtgtcacatcctagtacggggttggtttattttgggatggagagagtactcagtacgcaagcggaggactctcacaggctagacccaagggccccccgatttgtaggctccccatgttatctgtgtgttgcgaggttaattttcctagattcaatgaattgtaaatgatgttgcatgcttatatatataagttttgatatgtacttgttgctagtggatgatgtggtatgtttgcaactttgcatgttttgagcttagatctagtgggttaggtatagatctcacaactcatagcaagccggcacttgaccttaatttcacatttgctagctaagtactaattgaagaagtgtcatgcatatgcatgaaattaatcgatcagaattgcattgaagtaggtggtgcaatgggcataatgcagtcagcaggaaaagtatacatacaggctatttaactcatcaaacaggtccataaattaggttttgaatggcctctagctgcatgggatcagaaggaaggaaggaaggaagatatcgatctggggaggagagatagagcaaagaaaaaaaggtatcgagatgacagatggcatgaactcgatctgcaagtttttatggctcgagcggcatatatatgcagcaatatattgaaggcctggcagcatctgctaactgctgatgagacagtgcgtaggagtatactagaacagtacttgtttgagttcaaattaaaacccctttctttgtcgaagaactgctctaactcatgacaacgctcgtagtggaaggagcggcacatgttcagccactccacattttcagtggctatatcatctagcattctgtctgttttggggattttaggcagctacatcgagaacgcgcgatatgtgatgcaaataccagcatatagctagcaaatacaacttacctaattgaaataatatacacatatagtcaattgctgggaggtcattcttcaatttgtgtcagtcaagcgtgcatgtaatgtatgggtgggccttcatcagagggtctagtagtacgtaggaaaagaacaaaaagagagtgagaactgaaggaactgtagagatatataggtggtgtctctctccatcatcaccttatgatgcagtacccaataaccaactgcagcctcaaggcagaagggttgtgttgtgcctagcatatatatgcatatgaatgcattccccattactctctctcgtagcttggtgtagtacgtactacaagctatagctagcaggcaggcaaaactttaaaaacacatgcatcctcctctgctgtctagtgtagttgaagagagaattgaaggggcatcgatgatcgatcgcattcaagatttcacttgaatgccggctaaggacaacagtgtgcatgcaattacgtatatatagtatcgatcctcttgcacccatgcatcctgtccctgtccctgctagctagctacatgcaattgcagcgatcactgccctcttccattccacactacgtactctctgacctctgaacgtctagccattcatttaacattaactagcaccactgcactgcgctgcagctgtggtactactgtttgtcaattcaacgtagacgaagagaaaaaagtacagcttaaagctggaacggaacctgtgaaatttacatgcatgcgcagcggtctaacagcagctcatctaaattggctactccacatctcagtttggatgactatctaataaagattccttttctatatttcttcctacttcaacacatcatccatatcatccttattatacccttcatatcgcctcttatatattttaataatactagaaaaaatacccatgcgttgcaacgggtgaagtctattttaatcttattaatgttatatatgatttagttaagatgaaattcactatgggagttcgcttggatatatactccctccatccacaaaagttgcacctatttcatatttgagttttttcaaataagttgttcctatttgtagtctttatgcattcaagacttaaatgaagagataaattaaatgttttattagaacccaaagagtcatctaaatactcattggttacatgcttgcattcactccttgattttgtaacatccaaggtgatttaatttctccttggtattggtgtcaaaagtaatatgtgtaacttttgtggatggagggagtatatttttacaaaatcatgagctatagttaggagtctgatcgtctcaagttagcatgcgagtttttttaaacagatttcttatatgattccttctgtattaccaaaagtgaacgaccttgaaaatcgacttaaatacggatatgtatttccaaaaggaaacgaacataaaaaccaactcatacacggatgacgtaccaaaataccggcaaaaacatcttcaatttttatatattttaataatatattgtaaccaacttttctatgtacgtgtttttttaaagcctggattagttaaaagaaacaatgtatcactattctctagacatgcttcactgatagttactaatttaatctctcacatatatggatggttgattaataaaacaagtactacgtttactatgaaagcaaataataataataataataataataataataataataataataataataataataataaaaagaagagataacgcctttccccaaccccagtccccagccgcatagatgtgcgatactgccgatgcggctaagcgggcggagcggcgaccgaaagcgtgcgcggagggaatgtgcggtgggagcggcggcggaagcaaagggggaggtgcggcggtggaaggcgggcgcaaaaattggaggtgcggtgggagcgttgatggaaggaaggcgcggagggggaggtgcggtgggagtggtggcggaaggcgcacgcggaggaggatgtgcggcgacactgcttctactccgactacctccaccagatcctgttggtaccaccactctacctccattccccaacctctattcctgaatctgggaaggacgtgattctgattgtggcgcgaatttgatccgaaggaagacagttgtgggatggtataaggagagagagatgccaatttgacgttcctctctccaggatggtggatgcgctaaaattggaggctatgatggcgcatctgctggagcccctttttcttcccccatatgttattttcggaatggcgtacgtgatagaggagctgctgggatgctctacggaaagaaaaagaaatgaaatagtgaagcggacatatataccagattccagctgctagctcgatccgctaattactagtgagttaagagtctaaattgcagaaattgaatcttagccttaccaccactgctgattgcggaattaattttgtactaagcattaattttatgaagccattgaacttgcctttgatctctccttccatcctttattttattttcttccttcttgatgcatatattgcaatatccgcctgctcgagattgcaggagatctgtggctactgatcaccagcttgatcaactagtggtcaccgatgggttgatgtattcgggaaatttaactatttgccactatattaggtttggcatgcaattatacaaatgcccctcttaaatttacttttatttttctctctaaagaactggtttagtaactagtatttactacttttcttcacgtggcatgccaacgtgataacccacggtgaaaaatgtgagatccactcatcagtacctttgatttcctcactatacgatcttttttcacgagtaaagatcccacactgtttttcaccctaggttgccatgttggcatgccatgtgggcaaaagtggtaaatagttaagaaaccacccctttattaaagggggaaaaataaaagcaaatctaacagggtaatttggataattgtcaaacctaatagttacaaatagttaacttaatttctcgatgcatcatgtagacaacatccttcagtgcattggcggcgacactggtcagggatcgcctcacgaaccccttcctgcgctttgagatagatcgagctctctatggtttagggtttagcgatagagacttatgtttcataggccttctcttggtgtcttaaccccatataaatgcattggtgagactcaggggccaattttgattaggaatctaattagttgttacggatcacaacttttttaatctcttattttcttgttgggaagaaaaccggtgaaaaattgtatctcccccattttgtatggatactaaccaataagatcaaccaacaattaggaatcaaacaaacaataacccagctggtgttgtactacgaggtatgcatagctcatgtattaaaaaatagtaatccttggagacaaattcgtttgattcaatcaggttccggtaatttcttaaacttgaaatatacctcggagaaaaaaaataaaaatagtaactagttgaaactatatattatggttatttattctctttagttttgttgatagcgggtcttgtttcgtcccttttatgatttactatcatgtttttatttggcgttatttgaaattttgaatatagttaggttgtgtacgtgcacctaattaatatcaaaaatccttatacacgggcgtctgatgagagagaaaaatatcatgtgcccgcgcgtctcatttcgcgtcgctaggactccccacgcctccctcgctcgcgtcgcctcctttcccccgtcggcgccgcctcctctacacgagctccctcgcctgtgctgcctcctctcccccgccaacctcgcctgcgctgcttcctctctcccgtcaacctcgcccgcgtcgtctcttcgtcggatccgccgctgcatttcttcttcctcgacgtcgacggcggtttcgtccccgtggtggtggccgacgcggaggatgatgcatgcgcggcgaggtggcaacgacggcggcggtggtggtggaggaggagactcgccggctccctctctctcccaggagcactccctcctcatctccaccgccctcccccttctcctcctctagattcggttatgagggcggtggagaagatcaatgcgggcaaccctgtgtttgtcagagaggaggagatgcaatctagaccaggttctatgttttttgtgtgtttcagctagtgtactcgtaatgttcattgtgtttggatcaaatgttgcaatggatattttgatagggtttcatatttctattttcgacattcaggtttcgttgatatttcgatggttcaaaagcaatgttcagctaatatactcatgatgtttctttatgtgtagatcaaatgttgtagtggattttagatagtgtttaatatttttatcttgatgtacactgggtttgttttgttgtacatagggtttaagtatttcaatggcttagatcgttttgttgcatatgttaaaccaaattgtttcatctagtgatctcaccgtgtttcaatttttttaagaactgaaacattctttcgctaagtgctgaaacattgtttttataaataatggtgaaacaacacactgatttttttggaaaaatctggcgcccaatttgtagacgcctccaattaataagtgcctgaataagattttccactatccaagaaatcataaactaagtaaatttatatatgctggctagctagctagcaactccggcctatatatacataagcagcttatcagatagctctaccagctgcaacgactcgatctcatcatatcgtgtcactcgcgctagtcacgctagatcgagtgctagtgatccatcgatattcgatacatatatatagagagagagagagaaatcgtgtgtaggtacgtagctgaggaggatgcctcagaccccttcgacgcggtggtgcccgacgccggagcagctgatgatcctggaggagatgtacaggagcggcgtgcgaacgcccaacgcggcagagatccagcaaatcacggcgcacctcgcctactacggccgcatcgagggcaagaacgtcttctactggttccagaaccacaaggcccgcgagcgccagcgcctccgccgccgcctctgcgcgcggcaccagcagcaaccctcaccgccctcctccacggtgcctccggctcccactgctgctgctgccggtgccgtcgtgcaggtgcaccccgcggtgatgcagctacaccaccaccaccaccaccatcacccatacgctgcggccgccgctgcccaaagtcatcacctgcagcagcagcagcagcagcaagctgagtggccggcggcggtggactactgcagcactgcatcggcgtcagcgtcggcaactgctgctgacatggcgatcccgccgtgctgccggccgctgaaaacgttggagctgttcccgaccaagagcaccagcggcggcctcaaggaagattgctgcagcagctccaagtcctcctcttgctccacctccaccaattaattactagcagagagtaatcctacttccactctaagctagctagctgctaatcacttagatctatcgatttaatttgtttctgcggccatatgcgttaattcgtacgtacgtacgtgtgtgccactgccaatatgcatgccacatgtgtgtcggcatatcgttcgtttcgttatcgcttcctcgatcgattacatatttgatattgttcttaaattagttttagctatctaggttagtcaatttccctcgactctttatgtaatctgatgagctagcttagcttctttgtgtaccaatggactttgctgatcaattatctatatatcgcttgctgttgattgacttttcgttttcgacacctaagggcctgtttacttcgcgaaccaaaatttttgacgtgtcacatcaaatatacgaacgcatttgaaatattaaacatagattaataacaaaacaaattacaaattctgcctagaaactgcaagacgaatttattaatcctaattaatctgccattagcaaatgtttactgtagcaccatattatcaaatcatggcgcaattaggcttaaaagatttgtctcgcaatttacacgtaatctttgtaattagtttttttctatatttaatactccatgcatgtgtccaaacactactaagtgatctttgccgagtggggaaaaaccacaattgtcccggtttggataggaactagtactaaagatcatttttcgtcccggtttaaaactttgatga

SEQ ID NO: 15317 - DNA, 7236 bp, Oryza sativa
atttatttgtttatataagcttgtactagagtattagctagtagattatctttatttacctatcttgctctaaatattgttccattggctatttctatagtatcctctaaaatacgtttgataaaccaaacaaatgatattactgccgatgaggcatatttagggtttgtgcttaatttatatttcaatccattgccgatctggttcaactacatcggctgggatcactaacgatatatcatcggcctatcggccgattggctatcggctgactcactctatttattgttttccttgctggtttcaagatcaaaccagccggcacgcccttaacacactcgaggctagccttggacctgcactgggattaagtagatctcccaggccaccgtgttttccgtcaacaatgacatatgggtcccacatattttttaaattctaatgccacagaagagccacatcaatgccaggtaggatgaagacaaggtcaacacctccacgtcagtcaaaaccgctcgcaaaaccaccatgggacatagtttgcacctgtacttatagttggagtagtcgatatacccagtttcgcgtttggagggcatgagtcatactcggaacattgttgagggagttaaagtccctttctctatatatatgcatagtcaacaacaacgaggctcgagagagactactttattcacgctggttggacaggtacttatggttcaaaattcctatgcggcacaaactcgcgacgtaatgaagtcgcgtgtgtgctctgccccctctttttttcccacatgttttttctcagggttcgatgagcctccaagcacaagggcacaagactttttttttcaatttcaatttcaccgtgacactgatagatatcgaaaatttcacattttgttcctttctgaaaacttatttcaaaataagtctagccgaaaactatcataaaaaatggaccccaacctcagcgctagggccgatggcactgagctctagcacgctgcttagcgctgaggtagtgacgaccgtcacaggctgtcgagcaggagattgggcatacaagctgacgtggcaaaggtcaccacccgcatctgtgctgacctccccaacctcaatgccaagcctgtgggcgctgaggtagtgaaaaacccctctacccatgcccatacacttctccctcatttcgcacaatcaaactagggtttctaagggctcttggcagtttcgaaggtgagttcactccattccattccatcttctcatttgttgtgttcgatttgttcctcctccattaaccttgttggatgtgttgctatggccctttgtattctgttgccttaggggagttctccaaattcaaaccttgatcaattttggatgagacgatgatgttgttctatcagcgttaccttcttgggggcattgccttcgagttttttccttcctgttttgctagctcaggacacttgggtgtgggagagcaacgatgacacccttgtgatagagtcagcgttttcgtgctttggtgtagcaggttcatcttctcagggattgtatggttggtttgtttgttttgatagtgtcagagtttttaatagtttttcttgtaaatttaactaattatcttaattgcaggagctacgttccttcggaaaaaaatatgggtacgatttaatgtatgtttgcttctatctcgaagaatagataaggatgcatatgtaggattgtaggtatatgaattgaatataatgtagatgcatgcatggagcgatggatggcaagtgaacaagccaaattggccgacaacctggcatggaaagcgatgaagttgctctcttctcgccaatcgatcgatgagatttagcgctacagtattatattcttaccatgttgtctcacaattggttaggcggctccattatatttgtctagttgttgcatgtatgagtatatcaccggattagtaatgcacaaaagtttttgaaaagagagattgagggtttttgttttatagattcaacagagtacttcaatgcataatataataattatcttactaataatatagtaaaatttaaaaacatgctttttagaatatgtcaaacagatacaaagtagccaactagccatctgtcttacttttaaatttgtcattttaattaaaacagacgtaaaacattttttctctttacttaatttagtatttggcaccacgatgcagtatttatgcctgaattatatatttggatcacgataaaactaaaatgtcacggccaaacccatctccctgatggcagtgccatcgcagcgagcggacgccctttggcgctggtcgtgccaagatcacctccaccgcttcggtcgaatcggattccgctatccaaactcggccgttctctgccatagtcaatcttgttccctgccgctgtggtcggctgactgctcttcggtcgcgagggaccggatcttgtttgacgtgccgatggtcgttcccaatctcgagggccggctgatggcacacactcactaccatcttcgaacgcggagaacgccatgctacgcaccttcctcgccagctgctctaggcctctgctccttaggctgctcccactacccctgcctccggcgcctaccgttgtggttgtaggggtagtgccgaaactcagcaagaggattatggccaagctcgcgaccgctagcccgagtcacacggtctcgcacacgcaacacaatctgatgcacaagctcaggctggtgccaaagaagggtctattaacgctagaatttggtaaaattctttagtggattcggttaaggaaaaagtaaaatcagtcgatggaaagcttatccagaatagacaagttcaaaaaagaatcatgaagaccatgacatggtagcttcatttctaccatataatttaccaactgcagtcctacaaacctcattcatcaaatccgatgatccaaattcatcgcatccaacacctcaaatcatcccacgtttcccctcagctgctcaccccctctcactccgcccacccgaaaatcactcacaaaatccccatcctcaccccaatcatccccgatgccgccaacacatcgcgccactgtcgccctgccatctcctatcccggttctctctcccgaacaccccaaaccctagaactgtcattatcaccgatccatcaaagcgccatcctccgccatcaccgctgcgccatctcctgaatccccatctgccgtaccatctcctgaatccccatctgccccctcaatccgtcatcgtcgccatcgaatccccatctctctccgatcctccctcatcgccgacactgatgatggggacactaatgtgttgttatgtggtagtgcatcatatcgagaatttgtgtaaataggatagaacattggaaatctagtggattctttattttttttaatttaatatcaaagcgagagtccaaactatatacaacttggtacttattatttctgaaatttataattattaaattaagaaaaaggctaaattgggagtccaacaagagaacaaataggcagtgattaattccagttttgagaaatttaaatcatggaaaatatataaattatactctaaaccaagtatattgcgaatttcagaattattaaccatgaaaagactaaaatttcgactccaaattgaggacgactcaatacttgtttcttccgaattatgaaattattaaatcatagaccagctataattagcattccaaaccaggaaaaagtcaatttcttcaattaatggcaaattttataactataaattcaggaaaaatttataactgagacttcaagccgaatgcaactcaatactaattttggaatcattgaatcataaaagctaagtataattgaggctccaaaccgaatacacaacttttcaattgtgaatttcagatttatttgatcatggaaaaagtagggttaattaacactagctataaattcaatgcatacaactcaatatttatcaattatgaatttaaaagttgttagatcatgcaaaagctaaattgaggctgcaaattaattaaactaagtacaagtttgtatacttataattccaatttttttgaggagaacgacggcaggagatctgccggaatttaaattagggaagggcgaaacctagcaaagagtttacaggaactataacaaagaggaaatacaacttaagaagaaaggaggatcaggggggcttgaaagcaagcctgcgcaagtccatatcttgtttaataaggtgtgctacttcacctactgtgaggcaagaattttgaaaaattcttctgtttctttctagccatatattccaccaagtagttagtaatgagcctctgatcgcttgcacttgatctttgcttcccacagggttggctctagttcaccaagtttcaacatgagggggggtggggcgtagccaaagggcccagattttgaaattggcagattaaactccaagtttgtctagtaaaaatacactcattgagcaggtggtttgtgtcttcaaaagaacaagtgcaaaggcggcaaatccaagtgcacggccaatgtcttcgaagtatattttgtgcagtgagggttttttgatgaaggacaagccatccaaagaatctcattttgggctccgctggagccttccaaagtgaaagaaagtcaagttttgcaaaagaaccttcaaattggtagagatacgcactcttggctgtgtaggaaccgtaatcagtccagttccaggtaatgtcatccggttcttgggatagcgaggccaattgaattaagcctcctagctgtacgagctcatgaatttcctccacggaagtaaattgtctaaaagaggctagccatttgttgtctgtaagttcaagttgcacagatctttgttttctcttcgccaagctaaaacatcttggtgcaatgtcttttgggaagcgattttgtagccaactatcatgccagaatcttgttttggcgccatttacaacctaaatagttgttgcagcttggaagagtctattgccggattcgtcacagggcaggttcatgcccacccaaggcttttcttcctctttccaattaagccataaccaacgaagatgtaatgccctagaaaagtgttctaattccaagagaccagcccctcccagaaccttcggtttgcagacagtttgccagttaatcaggctatctcccgagttagagtggtctagatcttcgcctttccacaaaaaagatcttctaaaataaaataaaattaaagtaaatactaaatcgaggaggctttgttttggtgtactataagtactagataagttatgcatttttagatgaaacgtgatcgagtatggatgtacagtagagtatggagtgtccatgctgtacggctggtttcacaaatacgtactgtacaaattacagatgaacgcctagctagctagctctagctataataattgtggacacgcccactccatatacatgtgcatctcttgtcctgtatatatgtcctttttaatgtgtgtgtataattaattaagcagtgaagtgaatcgatctgattaataattaattcatggatggatccatcggggatatactgaattgttcaagacaagatcgataaattaattgagcggcggcggctgggactatatatagagagatagagagaggggccgggggggggggggcaaagaagaggaatttaattataagaggaagagggagaagaagagcttaggtacaggctccagtacaagagatcgatcgagagacagaggatcggagaggaggaagaaggagaatccaagtactgggaggcaattaatttgagttgagatcgacttgagagctagcagaggctcatctcatctaggccagcagaggctcttcgctcgcttatttcatccatggcttccaaaggtatgtactactagctagtatcttaatttctatctatatctatatctatatatgctgaatttactgaattcgattgatcgtacgtttgtggaccgatttatcgatcggttaataatatactataagcagctagctggagtagcttaatcactactttgaggaaagaagtaattaatttgctcaatcgttcaattctttcttcgttaagcaagcatgtagaatatctaacctactctctctatatatatatatatatgcaaaattaagctgacgggcagggtgattttgaggccagctctctgctgcatgcatatatactccatataacttaatatgtactaaatatttttctggtatataatagtacttgtggatttactagctagcaagtactcaaactaatgtacttagcgagtgtttactgtgctgcctgcagtaatactcctaattaatagagagagctagaaagcagagagtgataggcggaggtccctcaggcgcagggtgagggaaagaaataaagtgcaggattatcgatggatgtgccttatccaatataatcgcccaatacatccgatatgatcctcatgtattggttggccagattattgtatcagtcgatcgatcgattccccatggccatgcataatcgattgtccagattcatttctataatttaaataaatctttttgaaacagatcggagtagatattcgtgcctcgctctactacaacatgctgtcctgtcccgtagtacatcgatcgatcaatacttgctagtgatctatcgatatcaatagctaggcagccgacgacgacgtttctgtgtgttgtcccttttactaactaattagcttcttaattaataatttattaatttgcacccactcctcatcgttccatctccatcgatatcatcattaattaacggtgaaaattaatttttcagacaagctagtacagaaactgatgtgatctgatctgatggataaatataagtagagaaacgatcgatcaagacctgcatctgctgcaggcaggggcgagcatctgaatcgatcaaagcaatttgcatatctactacctccgtcccatattacttatctttttgactttttgtttgtcaatgtttgatcattcgtcttattcaaaaaatttaaaattattatttattttgtttgtcatttgctttattatcaaaagtactttacatactacttttttttatatttgcactaatctttcaaataaaatgaatggccaa

SEQ ID NO: 15318 - DNA, 5324 bp, Oryza sativa
tgctcttagagcaagtttaatagtatagctcactataggctccacttcatctatagccaatccatacaatagttgcttactatactatcaatatatggtctcatctattatacacacattgcgtcttggagtccgtgctgcagctggctacagatctgtagcccactgctcttctctcttatcttttatctcattaaaatatgtttgcagctggttaatagtctttctattgtacctgctattacttcttattaaggttccaactaattaaattgtagtactcctactgtagtggagtaccatattactatatcttaacataccgtgcctaggagataagtgaacaataatgatcgatccccatgtgctcaaaatcaaaatcatgacctaacttcgcgtgaggttttgataaactaattaatattaaccagacctaagcagtgtccactgtatatgtatatgtagatgctggtagattttctctcccatctctacttttttttacttggcttaaataggataatctagtacttattaagcaatacaattcaaatctatttaattatagactcctattctttgggtattttatacttgataatttgctaaagtagctttacggattcatctatttaaacacgatacatgatgtgcgaatttatcatagaattcaaatatattccaactacttttttcaaattaaatttctaaggtatgcagtgtaatagaatcagattcattggataggaagcaatgaatgactcataatcatttgaaagtaaggaaaaaaagagagacgagtccattttacatgtcaactttcgtcaaaataaaaattcatccctaaacttcaaaattggatactatttatcccttagtttttaataccgttttcttttgaaaagtatgtacatcattttttttatattttttctcaatcatttactaacttttataattaatatatattttaacctatttgaatcggtcaaaagatgaaaagtaaatggttgagggatgaataatgtctggttttgaagtttatgaataaatgttagacttgatgaaaattggagatgtaaagggatttttctattaaaagaatatgcgattttgacatgtacaaatggataagctcaggccggcacgtccattgcggtttcaccagagccaatccatcttgcaagattccaatgaaatagaggcatacatggaatatattctggagactgtgaagatttgaagatgttacagataagatgatttgaactatataattccagctacgtaaaaaagctaagacaatgattatatatgagatggtagcatatgtgaaatggtttagtgaatacttaaaactttatttaggtgtttggttagggagagagagagtggcgataattataagggacaattgtttatttgactttgttttgaagcctaactaccaatttgaatctattttttctagtttgcttatttgcctgcttttcgaaaatgaacactccgtctgacctgtttctacaacaccgttaagagttcattttaaaaaagaggaaaaataaaaatcacatttcataatgactaaaataccctccaactctatcctcatctaacccttttctctcccggtctctctctctctatcatatcccttctctctccggcgagggagctgtggcggggaaggtaagcggcagagccggctggtggagggagggaccaccggcggcagcggcgggccatggagggaggggatccacgccggcgccaacttgcggagggagggcggctatgccggcgtggatcagcggcagcgccggctgatggagaggggagcaccggcggcggcggggggccgtggagggatgggatccacttcggtgtcaactcgcggtgggagggcggctgcgccgagcacggatccacgggtgtgccgctggtggagggagggagcaccggcggcggcggccggcggtggaggaaggggatccgcgccgccgtcaacttgtagagggagggcggctgcgccgagcgcagatctgcggcggcgccggcggagtttcaacccataggaagtccacccctgctgcttccagcccgccggcgagggggagctcgttgtccaggccaagcagagcaggccgatggcgtggccaacgcgggcgcaggcgctcgaatggagggaggaggtggcagcggcaacgccggattcgccgaccgcagctcgagatccaccgcccggacttgccgccgccactcctcgtcgtcgtcgtcaccagggccggcgcggctcgccgtctcgactttcgccgcctctccctgtggtggatccgtggaggagaggagaagaacttgcagccgccactcctcgtcgtcgtggtcgtcaccagggccggcgccggctcgacgtctcgccttttgctacctctccctatggtggatcctggagggagagaggaagagagaagagaggattggagaagatagaacgggcgggtgggtcccacatgtaatagggtcaaatgagttagggcagaaaagacattttgtgcttcagttaacaccgttagacgcccttatcggaatagggtcagacagtgtcttcaattttgaaaaggaggatcaaataagcaaaccctaaaaagtagggtcaaattggtagttagagttcaaaacaggttcaaataagcaattgcccctacttataatgtcaactagttgatacctcgcgctttgctgcgggatatatggatgattgcatgttatacattatagaaatgatagatgtatatgtctaaataatgtaaaaatggtgtggaggtaatgattcgacattgcttgcgtattgagttctaaaaatacaataaaattaattataaatgatatgtcatgtttgatgatatttaaaatactctagataataattaccagtgggtgataatgtggcacgcttgcatgtgatttaaaatactctagataataattgctagttggtgatgatgtggcacacttgcatgttgagttttaggaattagtgggcatcaactacatagaaagtatagttatagatgcgggcacacccaaggcaatttgaaagggggttatggtagctgttatgaagaggggaatgtatcattgcaggagaagattctagtgcactgattttttttttactaatgtcttattgtagactcatagttacagagcatatgataaaatcgtcattctataataatgctcggtgctaacttatctctatcaaactattattgaatgatttcagtactccttatgtattcattattcccatgcttgatagtagattgaatttcatagtgaagcattagtaaaagttgcacaagttttttttaaaggaaaaacaaaatgatatactgttgcaggcacagaaggaggccatggtggcgtggagagaaaggagcagcagcagcagaggggttaccagctgccccgtgactcccggggatcactcgaggtgttcaacccctcatccgcttcctccttccgcactgctgctgccgcccccaagtccgcctcccccttccttgctattcccgacagggaagaggataatgtggtggcacagcagcgggcagcagagtggggcctcgtcctccagaccgaccaccacacaggcctcccccagggcgtctccgcacgaccctcctctggctctgcacgcaccagctctgaggacaacccacagcaacagcagagcgccgccgccatcccacgggtgtcggaggagctacgggcggcactatcagcgttccaacagacgtttgtggtgtctgatgccacccaccccaaccaccccatcatgtacgccagcgctggcttcttcaacatgaccggctatacctccaaggaggttgtcggcaggaactggttcgatcctcacacacacacacacataaacacatcaatccaattattcaattaataatcaattgtgtgtgcagccgcttccttcaaggctctggcaccgacccccatgagattgacaagatcaggcaatccctcgcaaatggctccaactattgtggccgcatcctcaactacaagaaggacggcacgccattctggaacctcttaaccattgcccctatcaaggatgaggacggcaggctcctcaagttcatcgggtcagctattttcccatcacgttaattacatacatcacataaacagattattacatttcagcaccatatttttatttggctgtttgcattgttattccaggatgcaagtggaagttagtaaatacactgaagggaaaaaggatactgttgttcgtccaaatggactttcagaatcactcatcaaatacgatggtactactaaatgtttatcttctgctacaaaagggttttatccataaggtcttggaaatttacaacttttggtttcaaactaaaaaagagaaaaaaatcaacaattaatatttacagctcgacagaaggatcacgcccgtagctcagtgtctgagctcttgttggctctcaaaaatccacgctcattgtcagaatcaagcaataacaccttaaaaagaaaatcacaagaatccctaagcatgtcaatgaccgaagttcctagtaagagaagctctgaaagtggatctcgccgaaattctcgtagcggaacaaggagctcgcttcagaagatcaatgaagtacctgatcaagggaatagaactagaaaatctggtctgcgtgcatttatggggtatgcatacaagtcaaattatataacatgttgtttgcatttatcttgtttgtcttacttaatttgtacatgcagttttcttggtatgggccatggaagtgtagagaagaacatgctgaaacctagagatgaagatccactgatcgatagtgatgatgaaagacctgagagctttgaagatgagtttaggaggaaagaaatgaggaggggtatagacttggctactacacttgaacgtattgagaagaattttgtcatcacagatccaaggttgcctgataatcccattgtaagatccatatggaatctcttttacctcttacaccgcacctgttctttttattaatatggatattaaattttcatgattgtatgttttggttcatatttcagatatttgcatccgatagctttctgcaattgacagaatacaaccgtgaagaaatattagggagaaactgcaggtaatgatgatcccatcttgcccttttgctgcacaatttactggaaggtttttaaattttatagaaaatttcaggcttttgtaaaatttttgcactttaacggtataagtt

SEQ ID NO: 15319 - DNA, 1276 bp, Oryza sativa
gtttcttcaaggccctgaactgatcgtgcaacagttaggaagataagagatgccatagataacgaggcagaggtcacagttcagctcataaattatacaaaaagtggtaggctactcgtcacttgtctgcatgtttttgttctcaacttataaatataatagctagttgataccccgcgctttgttgcgggatatgtatatgaatacatgctatatattatagaaaatggtagacgtatatatttaaataaggtgaaaatgatgtggagataatgatttgacattgcttgcatattgagttctaaaaatataacaaaattgtaaatgatatggcatgtttgcatgatatttaaaatactctagataataattgctattgggtgatgatgcggtacacttgtatgtggtttaaaatactctagatgataattacttgtgagtgataatgtggcacacttgcatgttgtattttaagagttagtggacatcaattttataataagataggatatgtcttttcacagtaaagttaccttcccttcattacttcattacttggacaggtaaaaagttttggaacctctttcacttgcaaccaatgcgtgatcaaaaggtactatagtgacagacatgggaaaagtttctgctgagttattcaacatatttgtctacaattcttttgtatgtaatttgacatgagtccaatttgcctgtggatcagggtgatgttcagtactttattggggttcaattggatggaactgagcatgttcaggatgatgctgcaaaagagggagtcgtgctggtttgtatcttgaaaaatcatatttgtgcaactgacaaaagcaacacaaatagatatgggcagtcccattgtcatgttatgttttgtagtctgatgcttctggagttttattaagaacgaaggctatgttcatttgcaagagttggaaacacagctgttgcgcacgggaaacggagcgatccattagcacattattaattaagtattagccaatttcttttcaaaaatggatcaatatgatttttttaaagcaacattcgtatagaaactttttgcaaaaaacgcactgtttaacaatttgaataacgtgggcatggaatacaagagagatgggttgggaacatagagaaaaaaactcagcctaactggaattgcaaaaatgctctatacccgaagtcaaaactagtgctacagaacctgtgatacatctcacatattataaaatctaatctacgtgactagcattctctt

SEQ ID NO: 15320 - DNA, 2506 bp, Oryza sativa
ccgcagataatatcgatgaggctgcaaaggaactcccggatgctaatttggtcagattaaagcatcactctttgattcatcatatatgtgcttgcagttctaacagtaacccatgctcacattcagagaccggaagatctatgggctaaccactcaaaagtagtcctgccaaatccacatatgaaggatactgcatcatggagagccatccaaaaggtatgatttgactatagttcactgaattcgctacgcaaacatcactttaaggttattgcatatagcgggctcatcttttcgcttatgcttatcagccaaaatttgaattttcaaccttaaattcgaagccgattttgaggttttttcatcgaagtttatttttcagcttttgcttttagatcactaagaacacgtatataaaagcttcatttacaaattacttttcatttgcaaatatgtcgtttggcttattccgtagataagccaaacaatggggttgtaagtgtcattatctggacaaacttggaagagttatatatcattatctagacaaacatgggagagtgatttacatgtcaacctctatgttttaaaagtgtcattttaatctcatcactattctgttgtagaatacaacagcctttatagaacactagttatttgcctactatattatatgccatcacagccaggagatttatactgatgtataatacaatagcctttacagaatattaataactaatatctcttgtaggttctcgagagtggtgaaagtattggtttaaaacattttaggccagtaaaaccattaggatctggtgacactggaaggtaatcatttcatggtttggttaaattggataaacattgaattgttgccttttattgctaatacatttgactcattttacaattgttgtttcaacaatgtgtattatgattggaattgaagtgtacacttggtagagttgttgaatacaggagaatactttgccatgaaagctatggataaaagcatcatgcttaaccgcaataaggtttgatgcttgtttcaccttttaaaatgtatacattttttgtgaataaaagacattgtttatacttctagttatgtctattgcattatatctctgagtacattataatgtctctaggttcacagagctactgctgaacgccaaatccttgatctattagatcacccattccttccaacattatatgcatcatttcaggtttgctctatcaataatctagctaagatgtcctatttatgtataatcatttccatttcactctataatgtggaagctatccctattatctagtcttaataccccaacatagctatagaaatctttttgcagtacatcagttttatgtggtattttcttatgaattttccttttcaatatatggcagacaaaaacgcatatatgcctcattactgactactgcccgggtggtgagctctttgtgcttctagataatcaacctctgaaggttctacatgaagatgcagtcaggtcatcatttaaactattgttttcgcttagttctgatgggatgatgtgtgtggctttgttttgaacacacgttggcagcatatgtgctaatcattgtggcaaagacatgctactttgatctgttgtgattttgtttgattcaattattgtatgagaagacaataagcatttgtataatactatttcattgttcacaggttctatgctgccgaagtggttgttgcactagaatacctacattgccaaggtacatatacatcattgttgataacttgcatgcattaaaaattctcttatttcaatgatcatcaatatatctagggatgcctatcaactttacataaaaagaacatggccttaatactcataatttatccactttgactgcatgccatacataaatattgaaccataacagcacttcttcaatacagttgaatcctcacaagaaatccatgcatttacttggtgggtaatagatgtcttgtctctttttgacaattcatgatatttagttggaaaatagttactccctccatttcaaattactagtcgtgtagatttgtcctaaatcaaatatgtttatctttggctatttttttagaaatctatgtagtttaacatgtgaattactccctctgtccctaaatatttaacgccgttgacttttttaagcatgtttaactgtttgtcttattcaaaaaaatttaaataattattaattcttttcctatcatttgattcattgttaactacttttatgtatacatatagttttacatatttcacaaaaaaatttgaataaaacgaatggtcaaacatgtttaaaaaagtcaacggtgtcaaatatttagggacggagggagtatatagtatgaaagtatttgtcatggtggatctaaaaaatatcaatcttattatgtcaaatattaaaatgtttgacttaggacaaacctaaaatgacgagtaatttaaaacag

SEQ ID NO: 15321 - DNA, 7698 bp, Oryza sativa
ttccaccaacaatatagttatcttgttagacagtccttgtagtctattcaattactgtgaataaataaagtattgaaaattaaaaggtgaaaatagtttagaacaccattatcatatcatgcatggttacattactgtatcagacatggttatggttacgaggtggtggtaatgaatctatttgttgattcagggattcttctatatgaaatgttgtatggttatacaccttttagaggaaaaacgaggcaacggacatttgctaatatcttgcacaaggatatcagatttcctgctagtatatcggtaagtaaatcaagcgtcatttttttttaagttggagaagttaaatcagtttgagttttcaggtcagcctagcggcgaggcagctaatgtataggttgctacatagggatcctgccaacaggctagggtcctacgagggagccaatgagataaaaggacatccctttttccgtggtataaattggcctcttatacgcgccacggtaacgtaactagctatatcctgctgctatacatgagtgtttaatttggatgatgagatcctaatgtagaatgtgtgtgtgtgaatgaaatcaataatgcattgtaggcgcctccaaagttggagatcccactattttccaaggatgacatggagaagaagggactagtaacaaataaccgcacggatatgttctgaagaccctgatgatgatcttcaataaaagagagggacatatattgttgcttgctttgcgtgcgtaggccaagattaagattatgtcatgtaaatatgtaatgtatcgtacagaccttgttgtgtttgaacctagtatgcgatccatcatcttaataagatgcaatgcagcgcaatgtgtgccagtgaacagtaatgagcttgacttgagtttatagtagtctagtatagtgagtagaggaaaaaaagagtaaattgtattgacggtacgtaaacttgtcaagtgggtgcaatttagtatacgaacttgtaaaacactcatttggatgtatgaatttgtttgatgtgtgtgaaccaagaccaaaagaacacgacatggccaagtttagcaagttagacgttggttaggacatgatgtgcacaggcataagactgatacaggggcgggcccactttaattcatgggtattcaaatgaatacccaagattttggaaaaaaaaaaagtacatatatgaagttatattattccatatgtatatatagaaaaaaaaggaaaaatacttatatctattcaaaactcaaaagaagcccaaactgaaccctcccaccacccaacatttcaggcccgttggcccaatagaaaaaaaaggcccaattcctctctaaccctatctcatctcctcacctccctccccttcccatcccagccgccacgcccacgcgtcgccagccgccgcacgcgccatcccggccgcctgcccacgcgcctcgcccgtcctcgctgtcgcgacgtcgccgcccgccggtcgcgctgcccagccggccagcccaccagccgtctgcgcgcgcgcgcgcggtgcgcctcgccgtcgcccggtcgccggccgcccacaggccatagccggctccgcgcctcgcgcctcctcggccctcgccgcttcgccgagtcgccggacgccggctcgccgcctccgcgtctccgcacgaccgcacctcgcgcccggcggccgcctgcacgcctcgcgccctcgccgcctccgtcctcgagacctcgacagcagtctgcaacggtgagtcgccgagtgcccgtaagacatgctatattggtaaacttgacttccgtttttattattggtatttttatctttctccaaacaatcttaagccttattaaacattttattgaataggccttattaaacaatcttaggccttttttatctttagctagaagaaattaattaagacgagattttttccccctctctttgaaatttgaatgaattcaaagagaaaacgctagtagtgaccgccgcaacttactaacgtaggagaggacaaggaacaggatgagtttgcccaggctgagggcacagaggtggtcgatgaagcataacgcgtaccacgttcctgagcaaatgccactagatgatcgatgatcaagaacaacatattaaaaccctaaaaaaagatgccgtcaaaaaggcgtgcaatttgatcacaccatttacatggattattcttctcatcggatgtcatgcattgcaatttgatcacaccatttacacggattattcgagataatataatttcagtacaaattcaaagtcttttttcccggagaatataatttcagtacaaattcaagtactaattaacttattgacaaggcattgtcgacgagcatggcgacgccgttcgccgtggcgcgcagggaggccggcaacgtgtcgtgtaggcggtcgctgcttcgaggcggaagatgtaatggtccttcctccagaaccgcatagccagcccatccgacgggcgggtccacttacacataccactccacttacactttcgtcctcgcttcgtgtaaaagggttaaccctggagtgatatggttcgagggaagaggccttataagttagttccacccttgctaaactagcgcacatagctctcatggtattaaacatgcgcacatagctctcatgggccacataggctttgtcctaattaggccaggatgtcatagaagtagacacggatgacatggccggcggaggtgagtgaggttgccacagtgttggcggcatcggcggtggcggcggcggagcaggagttggagttgaagtcctcttcgttgacctcgagtttgcgtgttgtccttgacctcctccctctccgcgcggtggaggtggtctcggcaacatcagagttgctcttgggaggagctcgatggcaagtgcatgctcaagagcgcctacaagatggccatggcggcgtgctcttgctgctgccacgcgatggtggggatgccgtgctacctctggcgcacgttgcggagcaccagacgcgtgcgccgtgtacactgccatgacgacgacaacgtggaggaaggaggaggaggatgggacagctcattgtcagacttcgcctggagctccagcaaggatgaggaggaggagggctccacctccactgaaggtggggagtacggtggccacggcggcggtagaagggaaaggaggaatcaagaccagatgcggcggtctctgcggctgagactgatgagctttaggtgggtctaactattttttatatacttgtttgactgacatatgggttctgcatgttttgttttaatttgttagtcttcaatttttctcttttaatttttctttttaggtcaaactaccacgtaagcgtcacgtcgatgccacgtgggatgaagacctagttaaaggagccatataggtaccatgctagcaaaaaccagggacaatactgttgagagaccttgtttgcactcgttttcgtaagttgggatgttgtatccgcttatttgcggtctatgaacgaattggtaggcctgaaattgggctttgctctcccatgttacttgcatgaataagtttactttaagtccctcaaaaattgttgccaagtctgtaattcgtccctggacctcaaaaccgaatacaacacatccccaacgtacaaaaccagtgcaagcgagatccctcggcactattgtccccggttttggctgatatggtgcctatatggctcctatgactaagtattcatcctaggtaacattgacatggcagtttgatctttaaaaaaataaaatgagcaaaattgaaaactaacaaattaaaacaaaacatacagggcccatatgctcctttaatttttctttttagatcaaactgacacgtaagcgtcacgtcaatgccacgtgtgataaagacctagttaaaagagacacatgggcgccatatcagctaaaaccagggacaatactgtcaatggaccttatttgcattggttttataagttggggatgcgttgtatccggttatgagcgttctaggaagactcagcgacaaaaattgggatctaaagtgaacttattcgttacttgcataacaaaatgttatgggcttcatcttgtcttgttgttgctagtactttctagagcactcggcgtggagggatggcagcggcagctcgcttgctgccggtggcggcgaagcgactaacgacgacggcgagggcgaggcgcctctccacctctacctcgacgtccccacccgccactgccgtactctacgaccagcacggtccgcctgacaaagtccttagggtggctgagctgccggcggcgaagatcggcgagcgcgatgtgtgcgtgcggatgctggccgcccccatcaacccctccgacctcaaccgcgtggagggcgtctaccctgttcgccctcccctccctgccgctgtcgcaggctacgagggggtcggccaggtccacgccctcggcggcgccgtccattcccggctcctctcccccggcgactggtcatcccttctccgccctccttgggcacctggcagacctacatcgtcaacccagccaccgcctggcacagggttcgctccgatgtgcctccccaatacgtcgccaccgtcaccgtcaacccactcaccgcgctcaggatgctctgcgacttcgttaacctcgcccctggtctcctgtcactgctttcttctcttttctttccctgtaattaagtctcacccctagccctggatacgtttgtttcaggtgacactcttgtccagaatggcgctaccagcattgtcggccagtgcgtcattcagctcgccaaactgcatggtcttcacaccatcaacatcataagggacaggtatgtatgcctacctacactacatcaacgcattctgcatccaagctacccaattgatgatgactacgctagcatctccataatttgttctataggcctggttcacaagaggccaaggacaaacttaaacagcttggagcagatcatgtgtttacggaaagccagctagacatcaagaatatcaaaagcttattggtacttctccctacaggcctgcatttccgtttcttaattcaacctcaaactacctacttgtccaccctttttcataataaatatatgaactaatgtggtaaattgtatttactcactctgatactgttgaaccagtcccctgtattatggaaatgcttccacacatggatgatccttgtagacgcttttacatttctgctaatagaaatggaggggtacccacccttttgatcaaacaaaaagaaacttgaaatgcttgggctcctaattaaacttagtcatgagttttactggaagctattttgctgcttcacagctaaatgttacagtgctgtttcatttaattaatgggagtgcctcgcactaaacaattatctaaaaaattaacagtaaggaacaggacaatctcaactgtttcattatactgctgctattttgtttactgtggtatcagggtgctttgccagaacctgcattagggttgaattgtgttggaggaaatgctgcttctgtcatactgaaatttttaaggtagtgctttaaacatgaacaaaattctgattagaaccgtctttgtcttccacatatatttataaactctctctttaggcaaggtggcacaatggtgacatatggtggaatgtccaagaaacctgttactgtttctacttcatctttcatttttaaggttagtacatcagatctttggtccttaacagtggtcgacagggtttctaatttcatatgcaatttactccagttgtgtactctaaatgtttataccaatctactgcttgaagcttctggcatcgtaatactagactagtctagaattagaatcaggggcgtttgtctcataagcacaagtcataggggcggctttgttagacgactgatcagtgaacacaagaatttgtttctgcatcaaaagtatcacctgtgatatcataaagttttgaaacatcatgtagttccgaaagaagaaaccctgcatggaagtttgaaagaccaatcgtttctttgtgctaccatgtatcatgtcgtttatgtcaattacttagcatggttttcatagacagtatttaacacaatgctattttgttaagtaggatctttccctaagaggattctggctacagaagtggatgagttcagataaggcagaggaatctagaacaatgatagactacctgttggacctggtgcacgaaggcaaacttaaatacgagtacgtaatgctactctcttcttgaattgctgttggattacacagaatgaaacaaatgtaggtcctatcatatatgagggagaaatgaattgttttcgtacaggatggagttgacgcccttcagtgacttccatttggctcttgataaggcactcggcaaacatggaagccaaccaaagcaggttctcaagttctaagataatgcaaggacaacggatgagagagagcttgtattacaaaaacaggagtagaaaaaaggatgtaaacagtgcatgtgtgcgtggctaggggatcggtggcctctttcagtagtagttaccaggctgacttgggaagcggcaatatgttttgcggtgattgcagcggatctctgtccaataatggcggatcacttcacttgagagtagaaagacgtagtatatcacttcacttcaatccccccgcgcaatatgaccttgtgtggttgtaagttctgaagtggtattgattaccgtccgatctggagaaagaaagttttcactagattatcgtcaccgattatttgctctaagttttcaaaaaaaattcttaaaagatttcttctgtattgattagaccacttgttttaaaatatttaagtttatttcttaaaatatataatctatccctatgatcaagtagataatatcaaataatcaaactgtctaaattgcattaatttctgagtaaaataaatagtcaaatatcatatccaaaagtagcactatatattttcattcaaactgaggaagtatgtttggcaggcacaatacaattatataaacctatatatactaatcttcaaaaagaattttcatttaacacgattgaaatagcttgagccttatgaaaaagagaaaaatgtttaacgcggctagtgtaaaatcaaaatgagaaaacaatcacgctcagttgtttttatgttggatttaattctttgactcggcttgggcactcttatatgataactccgttagttttaaaaggtagagataatttactccatgctattgagctttcccagtcaacgatttgccatcgacattgtctctttctacaatatatcgatgacttcgtcgatggttgtataatattttattgggccgagccatttaaacaaaaaatacccttagaggattgatttatctaattagaagttttaaaaaaatatgtgacctccttacacaacatggaagtttctataagtttcatgttatttttggcatctttactttctacaaaaatatttttgtatgatatatctcatagaacagattctctttaaaatgtactcgagcccccttaaaaaaaagagaaaaatgtattaacgctcatgtgaaaccaaaatgaa

SEQ ID NO: 15322 - DNA, 5344 bp, Oryza sativa
  unsure (1)..(5344): unsure at all n locations
ttccatgcgccgcacttgttgaaggaattttctcgtcttgacaaagtctactgctctatttaggtttcaatttgttaaacaaaaagggatctcacgcttgccctacttttgtttgcattgtcaattagagtgcaaaatgttgatctacacacatgccattcctcgtgtgccaagattctagacatctgctatttaatttttttgttaaatctatgtccgaaatttagataatagtattatccttgaggaaggaagtggatagctctacttttcctcatctgttgaagccaggttataaagccatgtgctctcttcagtttcaagaaccattacattacattacatacgaaaaccctcctattaccataaggcgtgatcttgtcttgcactcttgcttgagtaggctgagctaagagcaagtgtgttcgaggccatagaagaggaggatagggtagtggagaatgatgatggtgggaatcccgctttgcttggtagctgcaatgaccgagctaagcagctgcatgcttcaccatcaggtttgccttcttttctacccagaagttcagattgtttcccatgctgcttcaaaaataatttatctcatatgtatgattctctagattccttttttggagatttgttttcataccattctgtgaatttgcagcttgccaaaatgccaccattgtgccaaagtagcatctttattcgcttcatctttctcttctacgcttatgaaagaaccttttttctatcctgctgatgattagttagtctttgcctttcatttctgctgcatagtttcttcttcggttataattgatttacgtcgaacattttctactgctctcaggtaggttattaacagcacttgtaagtgaatacttggagtgggcccagctaagtcacacgatgaaagtttatctgcctgaatgtaatctggtaacagtttgccatatctcataaatcttggatggatatgtccaaaatcaacatctgctaatgctgctattgattgttggctgttgcatttgtaaatcagccaaaggacttctggaagaatgaattaaaggatttttctaacaaaagcggagctgaagggagcaggagtgctgaaagtggccccatgcttctagatgttcttgaaggatatctcaaatatgaggtactcttgctaactcagagtctcaggcagacagtatataaatgtatatggaaatctttctgtttatggaattttgatttgattaaaatccctgtgttgcaacaggattttaattaaagaaaattattattaacccattattaccatcatttcctgcatacttttttcttttaataaaatgtaaggaattggtaatggaggtggttgacatgtggaccctttggtcctacttgacctttttctttttcaaatagtagagagttggtggtgggaggggtnncnnatnnncanntnancancnccnctnctttcttttttaacatttacgtaagatatccactttttctttccttgttcttgagcccctgaattagctatcaccacttctattagtgatactagtaaaatgtccttgtgttgcatagatttcaactagctatactatgtataaaatataaaatacaatagataaataattatcgctaaaacttattcacttgattaaatgagacgaaatgagcacctatgtatacttgtatacagatatacaatacttttctatggaatttctacaaataatacacacaaggctacatattttttaaccacgaaaaatctagagtgaggtgggtgtagaacctatcataaccccaaactctctgtttctcttactcttctaaaagaaaatgcatttttacatatcttagttttaatctttatttgcttatattgcctgattttggttacttgaattgctacattgagcagaatttgtctcaaacaaggatggctggtactggtaggagaataatcaattccgagtcggatccggctctaaatgctgaacataggaacacgaggaggccaccgtcgtcttcttcagttacaggcttgcctcctatgggaaggtaacagcttactactattcagctattcaatttgcagatatttgttgtttcctcaaaacacaggtaacatttccttgcaactcgcaggccaatgccatcgtcacagatgtcaggtaaattataatttttttctcggtttgtttattttatgctagagtgctcctctaaagctagcgctttggacattcagaccgaagaggggggtcttcggcttccaatgcaaggaaggatgaatacaactggagatatgatgctgatgatatctctgaagaagtgttgcgagcatcaagtgctctagaaaacgtccagctagaccggaaagctcgcaatctgacgacttcttggaggttggaactattgcctttcttctttgcaccttccctttttgcctggccatttgtttctgatcatagaatatctgtttccaggcatccaggcgacggtgctgagtaaaatcggaaggtgggatgggtccaattcaccattgcgctgcttggacccccttgggccatttgtatcgttttggttgctgcggtgggattgtgcgcttgcgtagaagaatgctcagtgttgatcatgcctactgtactcctagctcatttgtttatgcaccatatatgggatttgatttctgctggacaatcttgttcttgtgcgtataattttagttgcgtgtagtttctaacaaatttgcttttgcttacatcgggaattcttgttacaacgtgcatacaaacctgccctgcagcagttctctccaaatccagtttcctgctcctcttgtaactcctttgagcagcattcacttattagttgccaacaacaattcccagcggtatcatttgataaaaccaatttgcacataaacaatgtgttaaaccaagattctggagtggttacatttcagttttgtcacagtatcatttggtaatttatgcctaatctagctagtagagtgacagcacactagttcggaggcctagcaattgcctattacacctcactcagttcactgacattattcccctttttgttttgtttgaggagtataccacgttaacatgccaataattgctgccaatgctactggtattgttccaagatgagtagattgatctcgagattatgccttccctctgatcatccacgtactcgcgcgtgctgcatctctaattactcctgcaatgcacatccaagcacttaacatcgtagcaacacatgacacaaacctatactatgtagcactgattgacaattttcttacagaaaatacaaaaggtgaagcgacaattacatttcaggggttaaacaagtgtactaactccaaacaagcacagacaatcgcaagtacgactgcatgtgttcttcagcatatggaattttgagcggacttatatacacaaatctgtatctctttttctttttttcatatcagtaagttaacaaggcagtccttcctagtttgcagttacctcaaccttgatatacagtggcatggaacaattcttggatgaggcattctagggcagctattttcatgttgctgatttttttttcctctgaatagattagtcagcaaggtcctacaaagtgcatgaatttcacgacatagattgtcaactttacagtgaatgaattcattgccaatcaatacctattcagctatcaacattactgcttttcctgaacatattcagctaccaaatgtgaccctaaattaattatattatgcggttgtgccagaattctcttacatgaaccatcatgaaatctcactccaaaacggaaaagcctaggcacacgacaatttcacagcaatcatctaagagtgtcctccaaggaggctgtgggtctgtaacgtaaatatcataatatgctacttgatattttaagcaaccacttgcacatttttggcacaaaaaaacattagtaagttctgaatgaaaattacagcataagcataccttttcttgcagtcactgatctcattaccatttctaaatccatccaagcagtgacagccacctcttaatgcttcaacaacagcatcagaaccaatagcttggtcacatccttctaacttgttttctaatccagcatcattagtggcaaccagagtctccacacttgttgataatgttggctttcttggaggatgaggtttggggtggttgtgctcaccgttgtatacaatttcagcaatccggccatctggtgtcatctccacctttctcttgacagggcatgttgggtgagtgcacttgtagtagctccgtgggaactcgctccctttcacttgcttctgcccatacttcctccagctgtagccatcgtaggacaaactgttcttcgcactgacatttggcttcctgacactctgggacactgtcaaattgtcccaacaggccccctttcctgtatctgctttcttttgatcgtatgctgtatgtgttccactgtcttctagctaaaaagttcagcatgttgttagaaaatgaccatatgatcatgtcaaaggtaggttcaaaataatctaatggacagatgtataattataaaaagcatcatttaaaagaaggtgcaaaattatgtaactgtcagaaagaaaatgaaatttctttccaggaaacagagaagttgaatttcgtgtcgaactgactctggttgcagcaatttctgtcgatgaattactcaatgggtgtgtgaatcgcgttgcctttggacgccttaatataatctcctccagggaagtaacccgaggagaatcaatagcagtggagtcttcctggagcattgagaaggacctcaatctggaagaaggcctggaagccacaggcttcacagcagcaaccttcttgtggctttgcatatcgcactggtgaaatttttagcacagtttatgtaccaaagtgaaatgacaaagaaagaaggtagaataacacaaaatttatgaacacaagtcatggatgtgctcccctctgctgctacctgtacgtggtgaatgaataaaagagaacagagggaaactcatagtgagctagatgtaaaactgaggaattgaccaaaaaaaaaagaagagaagagtgatactggaacaaaatagcatgcatggaaaaaaaaagtgaatttatgcaatctatagctgaattttgaagcctggttgagaccaagcaacaaaacatgcagaacatgctgaagtaataatgctttatttcaagatgtttacttgttttcctcttgtgcatgtacaaagcaaaaattgagaaaggaa

SEQ ID NO: 15323 - DNA, 2161 bp, Oryza sativa
ccgccgccgtgtgccatcgccggtggggtgggcggaggagagggagacaaggggctcgccctccggtttaatttgcgcgttcaggccaggggatatcccttaaccctcttcggaatagtattaatttattaatctctctaaggctatgtttagttcatataattggtgataagtttggagaaaatcggtagtttgtaaaaaaagttgagagtttatatgtgtagaaaagtttaggatgtgatgtggtgtgatggaaagttgggggttgggggaaagtttggtgtgaacaaacagggcctaaatgccgtgggatcgctgtagatccgtgcagtctattttgtcatttcgctgttgatctcaatcatatcttttatttaacaactaactcatttttcggaggacaacgagtgggtttgtgaggtagctccaacatttgtaacacataatgtagcttagcagataatgcaatacgagaatgaaagaacatgtaacgagacaatccttattcgtttgacaaaacaacataatgtagatacttcattatgctatataaggattcctgtattaaggacaaagagagtttttcagactttataaaaactgtgtttgattttgttttttttatcagttatttgatgtacacatgcccttcatcccaatataacttggattattatacgattactttgcgtcaacaccattcacaaaatagtatgtgacaactaataagatgtttggtaatagttggatataattgatcactacgatcatcttaatgcaatatgttgacactattacccgattagatacttaaccaaagtagagtggttactatacattaacacatagtgcatgtttggatcatgccctgacaaatcacgcttgagcaaagcatcattcccgagcgtccaatttcgtacgcctatagctagatgcacatgtctaggcaagaaccctaggtcagagcactatccaaatatgacatgtactcctggacatacataaagaccccctctcttggaaaaaaaaagttaattgcacaatggctaggtatatttacaaaagttttatattggatcactctttagcaaatgtttttactttgagttaggtaatcttacctctagtgtaatttagactcgttatctccatcttttcatctctccctcacctctggcttcctatatttgccaccatcattgtcacccatactttagagttgctcgcttagcccatgccatccacactttgagctcgagctttgtgttgccggtggcctcttgagttatgttcatgtgccgtgtcaatgtttattttgagttgaagtcccccggcgctgtggtgctcatgcttgaaatccatatgtgctggcccctgatcgggcgcaatctctattaatattagcggttaacatagacaatggggaggataagagatatgaatgggagaaaaggactttcaaagcaatgttatgttctaaatcgtggagatagcatagttgatgcctttttctagtcattgagcgaacaagcagttcaaaccatggaacaaaattgagagaggggggctcgatgacttggaaaaagggaagtgagtcagagttagcaataatagcacgcaatggatgattcttgatgtagcatgattttgtactcatagtggacgacgacaccgtggcggtcaggagcaacacatatatgtttttgttgggagcatataagataatgaaaaatagaggtgacgaggtagggaggaagaagataagtggctaacatgtgaatcaacagaccaaagtgtaaatgtggtaacaataggtagcaataaaatgaaaatattggaatgcaacttacttaaaaataaaaaagaaaaagaaagaaaaaaaagaagaggaaggcacaggggagggcacaggaggaggagatccgggtccctccatccctcgtcttcttccttactcgttcctccttcctcatcaccaccatacgcgaacacgacgacaccagccagcaagcagcggaggagagagagagagagagagagactccatagacggccatcgatcgtacgcgactccccccatccatccatccacccgccggcgccccctccctctcatcgatcgatcgattcccaccgccgcccccgttttgaccacctacct

SEQ ID NO: 15324 - DNA, 1688 bp, Oryza sativa
tctttctcttaggaatcctcagcatcgactggatccatgtagattccaaaatgtgaaacttagattgtatatagaatgcactgtgtgtgttgaaaatgggctcattattgtgatgttttcagatatattacatatgccaaagaagaagaggccatcaggtgtattcaagctgtacacaattttgttttggaagggaaagtgttaaggtcaccctctatgctttgtagccttattgcagcagttttttttacataacgcagttagcctaatcgttaatggtttgttgcagagcgtgctttggtactacaaagtattgccatgcatggctgcggaacatggtatactcgttgcttcatcctggcagctttatttaccattactctacctactgccatccttctgagggcttttatcttctcttttttagacctgtggaaatccagattgtctctatttacatgatgtaggaagccaggaagatagtttcactaaagatgagataatctcagcatatacaaggtaagctgagctcgttgaacatatgtgtggaaagttccactgttccttattatggcactgtgccagtcctagccatatgtactttttcccctgccaagcctactgctactgttactatataatgctcttctgttctgagaatttgtagtctatcaacttttccctatactatgcatgaattattatgctttgctaaatgctaagattttcagtagttctgattggtgctttcgactcatcatctctcgttcctacaggagtagggttccccaaatggcgtctaatgtttctcaaagacgcgcagggactgtattacctcctccagcagaagatttctcatatagtgcagtggttgcagctaaacatccaatcaagaatggaataactgtatgttttttatactgaaaaatccattgggacactggacatgttcatttctgtttgatttcatgctgctacattaactggtcttattttgtacagaatactgcaaatcaatccaggctttcgcctccaaacagtagttctgggagatccacacttccaccagctgcttcatggtatgatgctgcttagggtctcatgatatgttttaaaatgtgaatttgttgctaaaatttttttggtatgagcagggggcatcgcgatttgaataccaggacaacagcaactggggtggcatcgtcacaatctcttactaaatcaaaagcagatcctcaaagtaattcattctcgagttcttcgactgtttcaagtacaaaactaccttcttcatggaatgatgacacaagcacagttccgaaaatgacggaaggacgagatagtttgtctaaaaccttgaagccatataagcctggtattgcaaaggaaacccaagctgtaacatcactggagtcatcgcttgacatagacttctctaccataccttcagcttggaacgatgatgatgtcacatcagatggcatgtcaaaaggaagtgacgagaagcaggttgtaaatgacaatggaaagtttgaatgttcagtttcttcaaagccagctgaatcagggcatcttacatcgaagtcaacgacatcaccaaagaaagacatcgcagtaaacagtaccaggcaaagtcctctaaattgtgtatcaagtccatcggtttctaaatcagaagtaaaggatgg

SEQ ID NO: 15325 - DNA, 1426 bp, Oryza sativa
tcttattagggattgattgattacaccgtgttactacagattgttattcccacaaacaaacaatctcatgtactactaataatattatctttcatgtctcctgccgctgaattgctcccgaaggatgaccatgagcgacgatggagaccgcacctgcccgctctgtgctgaggacatggacatcactgaccagcagctcaagccctgcaaatgcggctatgaggtttcttcccttccctccccaccactctactctccacaccccccttccattcacctcccttttgcatctcactgcagatttgtgtctggtgctggcaccacatcattgatatggctgagaaagaggacactgagggccgctgccccgcatgccgcactcgctatgacaaagataggattgtcaagatggctgccacttgtgacaggtccctccatctcaaaccgtcttttttcctttcacctcactaactgcactgacatgcgaagatggccgcacaagagcttagggtcttcagttcaacaaaacgaaacatcacccagttgtcgtgaattgtggtttgcaaagcgccataagcaacttcttttacctgtctatcgcatcggaaattttgtacttatgcttcttttaatggaaacaggacggtagtggagaaaaatgtggacaagaaacagaagacccaaaaggtcaagtcaaaggccgcggtaactgtggaagctaagaaacatcttgctagcgtcagggttatccagagaaacctcgtgtacataattggactacctgcaaatttatgcaacgaaagcgtgagtaccatattgtgcacagacagattcttttcaactgagtaatgtgtatattttgtttctcaccttggcaacacaattcattttttatttcagatacttgagcgcagggaatactttggtcagtatggcaaggttctgaaagtttcagtttctcggccgactggggctccttcccagcaggcaccaacaaacaacagtatcagcgtgtatgtttatgtgaatctcatgccacatgtttatgatgtttctctcatggataaacatgacctattatttcaagtgattagatatatcttaccgtatgtacaagtggtgttttcaagttatgctctcctgtactttccaagcctagagcatttaagcataggtgatttattgttgagaaattatatgcttaaatatagatgaaaatgatggctaattcaaatatgatatgtccatgttcttgcaattaatttcagatttatattacctacttaacagtatgatttgactaaggatcatgaatttccatatccatttgtgaatcagtgaatgccacacctagcagcctagtagccaaagcaaaagatgtagatttctagtgttgaataatcagataaatgcaaacgtgactgct

SEQ ID NO: 15326 - DNA, 1613 bp, Oryza sativa
attcctgcagcccaacatcctagaatgaaaaaccatcagcctggagcagttggtgcagtgagaattgataacataggcagttttgacaaggctgtaagtgtaaataaggatgagagcagcataattgctgatattttgtctttggagtttgatccatgggatgagtcgtattcaacggctaacaattttgctaagatgcttagtgcatctgaaaagaacgatgtgctttttgatgcacgttcatggaaaacaaaaaccagcaatagtgagtctagattttcatttgctagacaagataatcaaggaagcctcctagattcatctatgagaaattataaaagtgagcagaatttcagtttgccatcccagaattctcatggaaacatttatcagagtggcattgcatttcaatctcctgaggaaggtttctcaaagagcaactctcttactatgttggatatgctagctaccggtgagtagtatgaagttatattacgctgcttgtttattaaattcttaatgaacagtgagatgcagtactgcagttaatgtttttattttaatatttattttatatatttgaggtaatattaatgtgtcacaaaacaaatagatatattcgctaggatacagaagggatccaatgtttgtgcacccattcccctcttttaattcaatgttggcaatcttgtaacatatgtgattgggttgtggagctattaagtataaaatgcactgtgtttttatgttgaagcattttagtaactgatgttttcaccatggtacttctatgtacttacaaaaaaaatgctttttcaggcacatcaaagcctaaagtatccgcgcctcctggattttcagcaccagcaagagttcctactgggttttcttctggattttcatcccatgaggggttgaatccacctccaggattttcatctcataatgggcctaatccccctcctggattttcttctcagggtgggtctaatcagatctatggttcggcatactcaggttctctctctctctgcttctcctaaaacaatttcagtttctaataagtttgcaatgttttgcagaaactcgcccatttgatgatcttttgggtataaatactagccattatcaaccacagttagctagacaaacaagtgatatagaatttgttgatcctgctatattggctgtgggtaaagggcggatgcctggaataagtgattcagggttggagatgaaaacttcccatacttttccttcgcagttgcaaacatcaaatgatccaaggtttcaattacttatgcagcagaacatgccttcccatcaaaatgttggatttgcagaacatgttcaagatgcattcaaccctatgaatgataattatcttgcatcccgacttatacctcagaaccatggttctctatcctcttacacacagatgtcactccaacaacctagaagctcacatcttacaaatggtcattgggatggctggggtgatttgagacaagggaataatgtttccatgcctgacatgtcaaggatgttatatccaactgaagcaaacaacttccacatgctgggttcaaatgatctgtataacagagcttttg

SEQ ID NO: 15327 - DNA, 4782 bp, Oryza sativa
ccccttgggcttcacgcacatcgtcgccacctccgcaatcttccacaccgactgcaggtcgtaccctgcgtctaacgactgatcaatgatgccgtggatatccccactctccatgtgcgatctagcctgccaatggacaactcttcactcagcatctttgtctgcgccaatcgctcggatatctttgataattcactatcaggaagaaagactaaatgcaaagttcatgtatcatcataaggcctactacttcttacccattcaacaatgttacggcagtggagcccaaagttgtcatttgagattggttcatggcctgagattagctcaagtaaaatgacaccaaaactgtacatatcactcttctctgttagctgctgcgagatatagtacctacgagcacacgcaaaaagggtgagcttggggaacacttggcatcagatgttacaaaggtatatagcaattcaatttgcaaggccattgataacaagaatagacttcataaatttcaggaaagacatggccttactctgggtccagatatccaactgttcctctaactatacttgatacatgagacccgtcgacaacaggttttgacaagccaaagtctgcaacttttgctctcatgttcttgtcaaggagaatgttactgctcttgaggtctctgtggatgatagttggggagcatcctgtgtggagatactctattcctgatattttattttatttttcatggaaatgaaagacttcagaatctttgaaatgcatgttggtagaataatcacaggaaaattgtacacgaggaagggagggagataaaccttttgcagcatcttctgctatctcaagacgcttgacccagctatttatttttacatcatcagggcctcctgtcaaagtatgataaagttcatgtcaatcctgagcctcagtgtcaaagaatcatgcacgagctagacaagtagacaaagccgcagctgagccttgatttatgtgtagtatggaaacttctgaaatcttgacagtttgtattcagttcttagttaagactggaaagaagtaaacatcagaacagaaaagaaaaggcttatacatcagtgaagatcctataagtttttcagaacacgaatccttatccaaaactggaaaaagaaaactcaagcatgaatttgctgtattatctagggaaatatcaggtgaaaagtaccaatctgataaaatcgtggaaaccactgcacaaactatgcatatgactccaaaaaatttctcaaaataattactgtatgaggggaggagataatgagataccatacgaaatcatggagaccctaatattctaaaatataactacgcatggaacatttacttgtagaagaatcattctctacacaacgacaatttggtgttgattctgcaaactagatttatcatcagatggtaggaccataggaacttaccacggaggtgttcttttaacgtcccgttatgcatgaattcatacacaagtatatttttaccatcttgctggctgtaaccaaggaagctcaccaggtttctatgatgaattcttgaaagcaatgttacctgaaacataagtccatcagatactatactaagcaacggatcgcagtaaccacccaaagaaaaagtatgcgcgctgagttttccagtagaccttgagaaaaggatatatgagggatgcctacatagagggtgagggtccataggatgttccaaatagaaaatgttcatatcttatactacttaaaataaattgaggttataagtatatgtaacgcaacatggtcacatcccattagtgtaggtctatcaattaagtaggaaatgaatgtgtcccagaatatactgggcttcagcttcagcttcaaggtttcaatctaccaagcagtggtaaaattagcaataggtacgcaagttctatttatatcttaaactgttaaactgtgaaaaacagcccattttgggccgaacgcaaagcctttttgggccctgggtcaacactcattaaactgtgtgcacaaaggttaaaattcatctgtttttggctaaaggctactcatgagtcattgggtcaaaggctaatatagatgcacttttgggcccaaggttgactcacgaagttttgggctgaaggcaaatagtaacgtgtttttcagctgaaggtattagggtcacgtgcttttgaactgaagactgatactcatgtgtagttgggccaaaggctaatattcatgtgtttttggccccagtgataatacttgtgcccaagactaatactcatgtgcactttggccaaaggctaataatattcatatgtttttggcccaaattaatactcacaattttttttgggttgaagactattaatcatttgttttggggtcaaaggttattatccatacatttttagccccaaggttaataatcatgaattttttgagcagaaggctaacattcatgtgtttatgggtctaaggttgaggttgagttcttttcagcaacttgaaacaacaacttcctcgttttccgtcaacatgcttcccaaactgctaaacgatgcgttttgtgaaatatatagaagttcttaaaaaaatcaaataaatccatttattaaatttataatagttaatactccgtccatcctcaaatgtaagacatatttcttttgtcaccaagaccaaggagaaattactcatctcccatgtaacaaaatcaaggaactatatgcatgcaaccaatgaatattaagatggttgcttgggttcctgtcaacaattaatttagcacatgaagactacaaatataatcatctcttttagaaaaaccaaaaaaaaattgcctaacacttttggatggagggagtacgtaactaattatgtgctaatgatatgccccgtttccgagctgcgaaccgctgcagccaaactgctggttcgaactagccctaagagtaaagaaattatggggcaaaagctaatattcatgtgttttttgaccaaggttaacactcttgaaatttttagacgaagcccaaattcatgcacttatggtcccaaggtcaatactaatgaaattttgtgccgaaggttaatacttgtatgtttttttggtggaagagtaatacacctgtgtatttggagtaaggcaaatattcttgtgttttttcagctcaaggataatattcatgacattttgagcgaaggtaatatttatgtgatttgggctcgaaggtaatactcatgtgtttttgagtgaaggctaacaatcatgcatttttggcccaagctaacattcatttgtttttgggcccaaggttaatactcatgtgtttttggaccaaagacttaatagttgtgtcattgaggtgaaggctaatagtcaaccatttttgggcccaaggttaatttttggccaaacgggaatagtcatccatttttagcctaagtttaatagtcttcatattttaggccgaacgctaacacttactgtgtatgtgatttatatttcaagaaaaaactataaggcaagaaaagaaacatacctcattcaggaattctcggatgccttgataggagtcatttgtgagaagtttgactgcgatttctctcccatctgtaagctttccatagtatactatgccaaaccctcccgaaccaattcttctgtcaaatttgtcagtagcatcttcaatttcagacaatgcaaatctgtgcgccgattccgtggccacttcactgaaaaatgagcctagcttttttgctggtgccgcaataacaacggtttctggagacacaaagtaattactacgcgaccatacaccataccagatatgtccaatgagctaaagaatacgcaccgtccgatgatttcttcttccttttgcatgtgaacaggtaacaaacaatagcagcaacaagaatcaaaatggccccaaccacagcacatacaataattactatagtgcggccagtgttactgtgtcccatgcgaaggtcactgtttcctgagaagctgcatacgggtaacagatcagaacaaacagcacaatcctatgcacaagttaggtactcgatttacatgggaaacaaatatatactttcatcgaaggtaaatgaagcttgctaagccacactggagttcatataggcacaaaagtatgcactgctcatatcaaatgattaagctatgcttaaagaaaaagctacacatacttgaaaataatgctctttttgaaaagcgcttgtgggacctctccagacagcttattgttctgaatatacctgtgaaggcttggatcagtaaggtatttttgtttcaatacaatgaataaagcagtaaaatgagataaaatctatagcaatgatgcatgttgaggtcttgaggatcataagaacaaaataacagcacaaattcatatttactgcacttgcaatacaaatagcatgggggtggaaagaaagtgtactgaagcgtataacttacaactctttcaggttaggtagttctcccaaggaaggtggcaatgcaccggttaattggttgtcctcaagggactgcagtgcagacacaagctccctaagtgctaaattacaagaataatgtttccaggatacactatcaaaataatggaaaactcacatatattgtaaatcatggcatccagtgaaatcaggaatttgaccagtaaatgagttaccatcaagctttctgaatttgaagaaataaatttatcagaaaaaagccaactacaaagagggg

SEQ ID NO: 15328 - DNA, 4091 bp, Oryza sativa
gatccatttttgccaacaactgcagtttgcatgaccctttgaggtggttcttcgttggtactgacgaagatgggttttgtagttgatattctctccgtccccggagcaacatcgacaaggtaatttgctcgcctcactaaatcagactcccatattctatcaaatggatcatcaggatacctgaaaacatcatcaacaacaaattctttaggcagatattgcaacgaaagtatgaacaatggtgctacgcagcagtagtagcgcatacctgactgatgcattgctttcagcaccaaaattgatcctcgcagagagtctaagaaagaactgtttttcatcagtggtgtagtagagggagccgttaaattggcgaagctcgagagtagaaataaagggctgtccagtgctggcattagagaggcaaacgctgagtgttggagcagcagcgaggataatcgcctcctggacgactggggtggtggcatcatcaatgacaacggtggtccatggggtcggtccaagggagagatcaaactttgggtagacattgctgttgtcgaagttgccatagaggaaggtggctctaacaaggtagcgtgttctgttcctgacattcatggtgtagcaatacttcctgttgtctgctggaaaagagcgaacggtggtatattgctgcaattgttgattttggagcaagaggttcgctttctggccagcagagacaaacttggcatcagaagtccactggatcccaatgccatccgtgtaatcatcgtctcccccgcaatccaagctgatgaaacctgcatgcatcaaatcaaagatggaattttcttgtagagatttatatttggagatggatttgatttcccagccctgaagctgaaggaggtccagcgaatggtaaagaagggtggaaattattgagttccaagaaactcgaaaagaaaagaagggagtagggtgagtgagagggagagtgactgaccaggctgagcattggagagcgagaaggcgacgaagaggagcacaagagcggcggaagcagacggcatctccctcagtaatctgaattgatgatggattgattagcacagcagtgggtgcgggctggtgaatcaatccatatgctccctccttggaacaagtcctaaaacaaaaggaaaagagaggattgaaattttgttggtagctggggttggggagagaggggcaatcaccaattctctctctctctctctctcacacacacacacaggcaagaaagagctcaaccagaaacagccaggggagtgaagagaataccaaaccaagcaggagtattccaagaagaagaagaagaggagcaggacaggaggaaggggaaagaagaagacaggagggtcccaatcccagtctcctgctctcactcacagccagcctctgcaccctctgtctctgtgtaataatcttggagaaaagcaagcaagaaagaaagcaagcaagcatgcagcagatgtagaggaaaagcaatggaaaaggtgagagagaggagaggccagcctgagcctgctttgccttttgcctttgctgcgcctgcgccgagctgagtggaccagtacactacctgttgctgttgccctgttgctgctgcatcatccacgtctctgtgactctgtcactcatttgtggtacctgtgcctcctgtatttaactactagagtaataaactcatcattttgtggtactactcgtagtaattagcttaacctccaagctcagactcgactttaaaaggacttctcacttaggagtataataaatccaacactaccatgaagattgaggacctctgtttttccaactactacggcccaagtttagttccaaactttttcttcaaactttcaatttttccatcatatcaaaactttcctacacatataaactttcaactttttttaaacaaattttcaattttaacgtaaaacacacccgtatacaataaactgggctaccaccaaccaaacagcatcttctataactacttgctactactgctgcacaagaacattctaacaaactgcgactttaagttctaaactactacattaaactaccatcagttcagtttgtctgttgttaagcatgttacaatttagcaattgttcaatcatgattcatgaggctctgtttcatattcggtggttctagtactacctctggactatttgtctttctttaggaaataattgtataaatagacaaacctatgaggcatgttcaaaatacttctaacggtatagccaatgatatctttctttacttatttaactaagtaattgaataaacattgttgattcaattttgacagaaatttgagtccaaaatgttatagttattaaccttgggccaaaaatgaatgggttaacttgaccctagactttcatgagtattaaacttggaaaaaaacgcatggatcatatattcaaaattttgtgttcaagaaatttaggcctagaaatacatgaattttagcccataatacatgaggtttacctttcagcctaccatttcactaatattagcattcggctgaaaagaaaatgaacattattactaagtccaaaattttacgataatacatgaattgtagccttcaacccgcacaaacataaccttcggccaaaatttcataagtattaacctttaaagaaatgcacattcacctttgatccaaaatgttgttgagaattaatcttgaattcaaaaatgcatgagtactaaccgtggcattattatacacggatatcagtctttctaggtcttgtgcctaggaacacatgaacattgcccttttgcctagaatttcatgatgactaacctactgaacaaaaggcaataaatttagcctttgacgaaaaacacatgcatattatcctctggctaaaaaaattaagggctttcatttgtgccaaaaacacatgaatattagcctttgaccaacaatttcgtaagaattaatcttatggccaaaatggtcctactcaaatattctcaactattaaccttgggccaaaatatgcatgaatttgaactttagacgaaaatacatgagtattagcctttggcctaaaatttcatcagcattaactttgggaaaaaaataaacatcacccttcggccaaaatacacataagtattagtctttggcccaaaaacacacgagtgttaaccttgggtcaaaacacatgttaatattgggcgaaaacacatgagtattaaccttttatcgacaacacacagacattggactttggtccaaaatttttttttactggaactttggtccaaaattttaaattttatgagtaaccttgggcctaaaaatgaaaggttattagcatttggcccaattacatattagtattagtcttataaaaagcacattaatattacatttgggtacaaatttcatgatcactattgttgtgcctaaaaatgcatgaatttttgccttcagcaaaaaaaatgtttattaaccttccgacacaactccacaggtattaaatttgagcctaaaaatatatgactattttcttttggtcaaaaatttcataagtattaaccttgggttacaagcgcgtcaatattagccttccatccaaaatttttcataattaagtattaccctcgagaactggaaaacatgaacattagacttcggtaaaaaattacatgaatgttagcctttggcataattacacacaagtgctatcttccacttaaaaacacatgaataatgaccttatgtccaaaatttcaaaattatcaaccttgggcccaaaaggcacacgagtatttgcctttgaccaaaatttcatgcatattaatcttgacttgagaacatatgaaatttagtctttggttcaaaatttcatggtttcataattaacgtggtcctaaaaattgcatgaattttaacccatgtccccaaaaacacattgagtattagcttttcaacccaaaatttcatgagtactaacgttgagcccaaaacagatgaagattagcattttagcctaaatttttgtgtgtattaatcttgggcc

SEQ ID NO: 15329 - DNA, 14460 bp, Oryza sativa
agagtagaggggctaaagaaggaagaaaaagatgagccccccttgcataaaaaaaaaagaagatgagcgcccccccccttccccaccatttttggatccaccctcacgaataaagcatttaaattagagttttacaaaaagaatttccaagaattagttacaagtaaccactaattccatagcatgtataaagaccaatatgaatattcaagcatcgcaagaaccctagaatccaacgcaaaaccgaccctgttcgtgaaaagttacgcctagtcgacaattggatggtctctactctcttcttaaaccattctggcaaaaaaaaaagggtaaaatatattcattttcagcaggatataaatttgcttttggtgaggaatttgacttttttaatttacatgcccatgctagatggaagtaagcatttttacggtttgaatggataatctctataagtttagaattctatgtctagaaatataatttagtttcctgcaacggctgatttatgaaaagcaaaaggttggagcaatgggctgtaatttggtcgaaccatatgatcgaagtgagaaaatgcaatatatgcatggattcggtgtgagaccgggacaaggcttaattaatttgggctttttcccaaagtcagtagccagaggacccacatatataaatcatcgatgcagctaaaaagctaagctgcaagaggttgaccaaactatcaattctaaaagaatgaatgaagaaagaaaaaggacgaccaacttggatcatgcgtgcatgcagctaagctagctgctggtacgatattgtgctaacagtaacaaatggagtatatatacatgtatatcatactacgtacatgtgtgtgaaaaaaaagatatataatgaacacactactcactcgagtcgatctgcaggacgagaaggttaagtaaggaaagaaaagctactactctcctaacaattactatgtgtttaattattacatatatatatactcgactcacgctgctacagcgttgggatcctctgcaatcctgtaacagaggtactacgtgatgtggtgatatatattatttagtgaagctgcaggcacgcagctgccaaatcttaaaccagctaagctgtaattaatttaatttgatcatgcatgaagaatatatactagctcgtatatataaagtcgatcgacatgcgtgcaaatgcattgtaaatttgtaatacggccttacaaacagtaggttagttgcatatatatcgatcatcatcatgcgagtactgcagcatataggttggtagctagctagccttccaagctaagctaagctaagatggagatccaattaattgatccaacaatgatgaaataaataaaatgaggtaatcatacccacgaatatagtacattttcgcctttaattatgggcgcagactgtgccatgcaaaggtagctaaatacaacttgcttgcctcgcatggatctgtatgtttcatcaaaccagaccaaagcaatcaacgaatgcatgtgattttcgttcacatatatatcattgatttaattagtcctagtggtctaccggcccggaccagatagtggaaaaaatagtaattagtatgggagaaaccctattgtcatattctattatgatatattacatgaaccttctcagaggtacatacgagatagatgtttggattacaagaaaagttaacagcagatgtatccggaaatattattccgcgcacgtacgctagcaagtatgaaatgacaaataaattattcacttattatcctctcccacctggttcacttgattccgcaacaaacctctcgcaccaattgaagctatgtgccacgataggcgagacgccgctccccatgcccgcaagcaggtcaaggactgctttgtccttccttccttctcgacatcccgtgcaccctagctatccctcttcttcctccctggtgacccctggttccccttcttccctgtccatggtgagacatcatggatgtcgcctaagcctcgccagcactagatgagctaccgctgccctagatgttgggtcgtcggattctattcttccttctcctagcatccatgtcgtcctctgtttcttccttttcctagggtggggttgggggggggttgttccctttcttgctcctcccagtgagatatcgggtttgagattatgagatgaaactttttagaatgggcataaagtttttaagtttctagttgaaagtttccaaatcatagaggggtgttagcgcgagtttcctctctcatgtaatgagtgtacgccgtgtagttgtgctaactagcggtccctatatttatatctaagatttgattaagagctctatttatctttaggattttatttttacgactctattttatcttagaactctgttttatttttacgatgtttatatttgagtggcatatgtactgggatgggtaagttgcatgttgggccgggccgaatggaatggaatcggatgtgtgtgttatgaaatcggacacgttagccactagtaggccagccaggagtattagtcggagaattggacacgtcagcgtcatccaggctcccagcagcctctcccaatctctcctcctttcttcttcttcctggcttcctgctcagtcgacttggtgggaattccattcccctgcagttgcaatgcttgggtgaatccagctccgtcgtcgccatccccacccccacccgcaccggagaatgagcagctcatccaatgcacttgtgcagcactactactcttgcaagcccccaccgccccccagattagtactagtaccattcttcttctccggctccggctccggcaccaacaacaccgcctcctcccctgctgctgcatcctccacgcacactcacactcacactgcagatgccaacgcccagctggacgcacacctcctttccctcctccgcgacggccacaccgacgccgcctaccacctcttcgcctccaacccctccctccccctctcccctgtctccgcctcccgcctcctcgcccagctctcctattcttccttctcccgcgcctccgccctcctccaccgcctccgcgcccgccaagccctccacctcctcgacgccaactccctctccctcgcctcctccgcctccgcccgctccaacaacccccacctcgcctattccctcctcctctccatgctccgacgcggcctcctccccgaccgccgcgcctacaccgccgccctcgcgcgcctccccccttcccgcgccctccgcctcttcgacgccctcctccaccacctccgccaccaccacaataaaactaattccctccccgacaccgccgccttcaacgccgcgctcagcgcctgcgccaacgccggagactgcatccgcttccgccacctcttcgaccagatgcccgcctggaacgcgccgcctgacgcgctcacctacaacgtcctcatcaagatgtgcgcgcgcgccggccgcaaggacctcgtcgcgcgcgtgctccaccggatcctctcctctggtctcaccccctgcgccaccacgttccactccctcgtcgccgcctacgtcggcttcggcgacatccccacggccgagaggatcgtgcaggccatgcgcgaaagacgcaccgacatctgcttgctgttccgggctgtcgcggcgaccacataatcagccacgaccagcagagctgtgtgctggaggacatcgtcaagccgtgggaacaagaggaggtgccgctgctccccaaggcttacccgcccaactccagagtgtacaccacgctcatgaaggggtacatgaacgccgggcgcgtgcaggacgtggtggccatgctgcgcgcgatgcggcgagagggagagacgtcgccagcgagccgccccgaccacgtcacctacaccacggtcatctccacgctggtggcggccggggacatggagcgagcgcgcgccgtgctggaggagatggggcaagcaggggtggcagccagccgcgtgacatacaacgtcctcatcaagggctactgccagcagctgcaggccggaaaggccaaggagctcctcgccgtagacatggctgaggcgggcatccagcccgacgtggtgacgtacaacacgctcatcgacgggtgcgtgctgacggacgacagcgcgggcgcggtggcgctgttcaacgagatgcgcgagcggggcatcgcgccgtcggcggtgagctacacgacgctgatgaaggcgttcgcggcgtcggggcagccgaagctggcgcacaaggtgttcgatgagatggagaaggacccgcgggtggcagtggaccgggcggcgtggaacatgctggtggaggcgtactgcaggctggggctgctggagtcggcgaagaaggtggtggagaggatgaaggcgcggggagtgcagccggacgtggcgacgtacgggagcctggcgaaggggatcgcggtggcgaggcggccgggggaggcgctgctgctgtgggaggagataaaggagaaggaggtggacggggaggtggtggaggcgctggcggacgtgtgcgtgcgggcggcgctgttcaggaaggcgctggagatggtggcgaggatggaggagatgggggtggagcccaacaaggccaagtacaagaggatgtacgtggacctgcactcgcggatgttcaccagcaagcacgcgtcgcaggcgaggcaggatcggaggcgggagaggaagcgcgccgcggaggcattcaagttctggctcggcctccccaactcctactacgccaccgactggcgcctccaagacgacggcctcaactaacaccctactatatactactaatgataatgttaaatcttaacacatgttttatgtactactcctacagtccatgaagctacttgcttcccttgctcattatgtacaacttcatagtaatttattttccagcaaaaaaaaaacatagcgacatatatactgatagtgataggggtagcaacgctgttaccgaggagccgggacgaaatggaacaagagattttcctttattgatttgttagccaagcgtttgcctgggacgtggtccgtacaatgttctacaaatttggcaaccaaatgataacaaaatgagcgcaagtaagcgcagtggcaaggcttgtgaatgtctcatgtacaaggttagccaattacatggaacaacaggaccaacttgttgcaagcaaggcttcgtgttgtgctgtgacctcaagacaagtccaaggccaacgatttgattgctgtcaaggggtatcatcagtcacttgttctgacgttcttggaatacttggtacagtcgaatggcccaacatcttgagctttccgtttaacctgcaggaccatcacaaggaatggctcttcatcaatcaacctacttaacttcacttttgttaccagcaatggcaagaagtgatcctacgcaaaaagaaccagcgatgcatcttcgtttactacatctacatgtaatgcatacactgactgactgaaacaataaggcaaacgctctacatatgtttgaagaaatttcatcccatacttctaaatttcagaaaggcataccggtgaccatggactaggttctggagcagctttatcggtaggagaattttgcacagcgcccgtcttctgttccaaaacttcctgtcaaaacatacgtaaactcaggtataagcctcacagcagaagactcaatcaaacttgtacggcgaggtaaacttcaggttagccgattagggtggcaattcatgttgcatatcataaaatttatttcggggcataaaccgagctcaacctctcctaagaacactggactgggcccatacaaatagaacaaaaacaagcagttgtgtaagacacacgacaacctactcatgtaaatgacaacctgacaagctcaaaatgtccatgatgcaagtaaactgacctctccaaaagcttccatgacagcaagccattcttctgtaaacggtaccaagttttttagatgatctttacttatggtatttgttcttgatttacccactgacttaatcctcctgcagaaatataagaatgacacgctatcaatgcaatatataattgtagatgactaactttgtacattcaaatattcgatgcagacatactctatacttgatgcaccctctgaagacgacaacttggtgtcaaacccaattttgtcttcagtatcttgttcttctgataaaataggtcgtctttcctgggtcgaacagtgatgtgattctgttctaccgtcagctgtatctactttttctgtcaaattgccagctagtgcctcttgatctacacaaggtgaaggcgctgccaggttcatatgtgaacattctgcactcctgtaatcatggtcacattcatcccctacatgtaacaggggaggttcctccacagtgaatgaatcatctgtatcaagctccatttcactatcaatatctggtccttctgatgaagtaagctgaacttcactacacaaagaattgttggagtctaactggctgtatgctaaagatggttttatgcctgttgaactatcaaactgtggtatttgatctgtacaatgtatagactgaactagcatattctgctgatggcaggaatcggatttttgcaaggaatctgtagctgaagtgcaattgttgccttctgatgaacaaactgtaccagatgtctctccagagagtgaattttctatgtcaactgctgtttcaccattgtcagacttgctttgagaattgagatcatttggggtgcaccctggagaagaaatgcaagatgttgtcaagttactccccacggaaggttcgcttgacgagcaaatgactttaagaaagcaagaatcctcagcaggctcagtgcttgagcagcaaatagcattaagatcctgtccgacagacagcgcaacactgcactcattgggcatgctatttctgccatcatcattatctctaaaactcaactctgtggtagctccatttccagccaacgaaaaatcatcatctggcatttcttgataacttatattccctgatttttctgaatatggtacagtactttccgataaggattgcttcagtgaacaaactgtcgcatcctcaacaccaggtagagaagaggccaagacgttgggagtgctgtcactagtggcaggttgcacaggaagactggaagcagcagagaaattggttggcagctgctttgttagatggaatctgctttttggatccacaggctgcttatacctggggggttttactgatgaaatatttccactaaagcacctctctggatttctttgagcagtaccactatgtgatacagaagcttttccctgaaataattagtcaaaaatgaggtatggagattttcacaaaaaaaaaaaaaatctcataaaacataggcatacactttgtaggatggccaaagtaaaatttctccaagaatgagaataaaattttgtccaactcagacatacattttgtaggatgcccatctcttgtttcaaacaattttcacaccacctcatcatccagtaacccacaaatgcaattattacacacaaatcattcaccgctatttttttaatgcgctttcaggtaactaatttgtaacgtctggttagatgcaagtaaacacttaaagtgtaagagaaatatattgatacatcaaagtagctgtaaaaatatcacgttattttcatatcactgagaaaacaagaagcaacattagtgaatatgtatgaaagagcataatagattacctgagtgaaaaagccaactgaaggtgaaggcatccggagagcagatggcttagcagatattcgtgcaggggcgacaacagaactggaggggttatcttgtgaatatggtgaaaaagtttcacatttcccagaaccattggtttcttgacagatggtagtaacagtaggcggcacctgtagaagtaaataagcatgtaacatcctttgtagttttaaggttacaatgttttcaaattcaccgctacatcctttgaagtaaataagcatgtaacaaccataaagtagttttaaggttacgatgttttcagtatcatatataggggcaagatttgagatcttgagtggtatccaacaaagtggcagtgcttcaaataacagaggtgtactaagagtttcccctcgattaaatgtaattgacgctatcactcaccatgtccttccctatggtaggtccagaagatttagtgacagatgaacgctcagtcttcgatttaagcgggagcccctctactttatgtgtacactcacttgtaactgaaaaatagtggcgtgctgaattagtgatagtgacatgcaaaagtgctgaaacctaagttatatgtcaggaagatttcattggtagagttgaggagtgaggactatgagcaagattacctgtagctggccttgttgtggtttgggaacatttgtcacagatgaggtacttctacttctagagaccacagaaggagaaggttcagacttctttggtatcctttgtatttgagctataccacttgagtttggcacttttttcggtgtataattatgttaagactaacaatagcacgtgtaattaataagagtgaaacttatgaaaagagtattaaccagacaattggcatgagtctgttaagaaaaaaaaaacaagacatccaataatcccaaaatctccataaggatatttatatcctgcaggtggtcgtggaatggacttttggatggcttttgctgaccttttatcctgtgtgccctgcaattgtccagaagaaaacgagaaattgcatgagctttaataatagcattaccataagtaagcaaaatgctatgtgatgaactgaccgcaagtgcttttcgttcatcctgctcagaagcttttgaggaagcaaacaacttccttcccttgttttctgcactcaaacattttgaaggaaattttccacgagaattctctccgatttccttgagcacagatgtattgctagattttccaaacctagacaatggggaaaaggtagaagaaaatccagaggcagggctcctagttgccttcacttgggagccagtaagcatagaaagctccgtgttatccaaaacgcctgccagaagcatagaggtttttcagttgccggaagcatttagtagctgtgaaagaaatcttgtaccttgttcagtgaagaaagcaggattccatgcgatgctttttctgagattgaacccccctgcaggcttgttcttcctctttttagaggtagccacgcctttgccttcgcacggggtttggcaatccaagacatggcgtcgattttgggagatattgttctctttgttgcctgtccatgaagatattattagagaagtaaagcttattggatacctggaaagtcaaagtccagggcaaaccctagtaggtgcaaatgcaaagagggggttggggggggggggggagctcaccggaaccggtggctgcagggatgcggcacggcgaggccatttacatgtggattcacgactgagcgtgccagtgagaagaagaaatttactttttgtttgtcctttttggatacctggtatcacaagaaatggattcgatttcaatttatagttgaattgagtcaagaggaatcggtttgaactgccattttttctttacatgtttggtgtccacgtgaagtgcaaactttgcctttctcaaacaagagcaaacatattgtgtttatcaatctaaatcacaagaagatactccactagatagaaagggggcaattatatatataaataaaaaagaaaaagatagaaagggggaaataggcatgttgaaggcgcctgatgtagcggagaagatggccgtagtgcttacccacggagtcgtggacgagggcggtggtgagcggagatggatctggcttgtagcggaggaggcagggaaggaagctgcgaggagaggaagaggagaatgtggcaagaggaagacgaggagatggagcaggtgggtggcggaggagtcgaggacgacaccgtcggcgagcggcggcggcggcggcggcgagccggcgatgcggttgagttggatggggaattgaagttgaattttctggagaagaaacctcgcgtcgccagccagcgggaaatgaaaatctacatgggccaataatcgatgggccggcccaggcccaggcccaaccagcagcggtttcctttttggtttctgagtcttctttgagaaggaaagaaacggcagtgggagtggagtcgatcatgtccgccgccctccaccaccagctctccctcgcctcctccgccgccctctccgcctccgaccacgacctcgccttccacctccagctcaccgaggccatccaggcctccctaccctccaatgccgccgcccccgcgccaccggaggaaccttcccacgcctcatgtgccctggaaatcccacgccgccgacctcgcgcgagccgagcatgaccgccgcgacgcccaggcctgccgcgcctaccacgcccgggccgccgcctccgtccgcgtcgccgcgcacgacgccctcttcgcgcgcgacctcgccgccatcccggaggacaggtgggcccacgacggcgactacttcgagcggcccctccccctggaaggaggcggcgcgctcttccgcgtgctgttcaagggcatggcgagcagggaggtggtggggccgcgtgaccgtgaccctggcgtcggggtgctcgccgtcgccatctgcgggccaaggggggaggtggtgctccggatacacaagcccgtgcaggcgcaggcgcagcaagggcggatgatgctggaggcgatggcgctggtggaaggcctcaatgcggcgctcgccctcggcatccggaccctcaacgtcctcactgacaacaagccgctgcacaaccatgtaatgtactatctatgcttgctctcatcgtaaccatattaatattgatttgccttgactacgggtagtatgttgttgtcctgttaactcaaaaatattatattctccaatactccagcacatggtgtcttgttatgtttcagcatactagtttgtttcagtgcctgttcatttggaaatgccttcctcgataaatttcgatcttaaagaaatgctgcagcttctttccatttaaataccttgataaatttccatgtaaattcattgatagatattctttctgttcatgctaaaagaatgattcaattatttttttgtctatcactggtcttgttatgatgtgcactacatgattgttgatagatacaatacatacaatctggtgtttatttcctaatgatgttgggaattgggattgcagatgagtggtatatggcgcccaagacagaagaggcttgtggatttgatcaatgaggctttctcaacaaaacagaaatttgagcaatgtgagatcctctgtgttgcacgaacccaagtcaactatgtcacaaaattagcaacagattctctgcatactcaaattgccaaagctgctgctgtgagtgctggcaaggagaaaaaagagaactgcaccatctgcttggaagacactgacgtctctaagattcatgcagttgaaggctgcgcgcatcgcttttgcttctcctgcatgaaggagcgtgtcaaagttaagctacttcatgggatgctcccagcttgcccacaagatggttgcactaccaagctaaactgtggagggttcaaagatgttcctatctccacggttattagcgatcatggtgcagcgtatcagggaagcacaaattcctccaactcacaagatttattgcccatatcccaagtgttcagccttgatgtccatgagagaactgatacatccaatgcaagcatcatcctcaaagtacactcttgttgatgctgccacattgaggaagtgtgtcaaatgcagtggctctttctgcattagctgtaaggtcccatggcatcatcagatgacttgttatgactacaagaggaggtacccccatgctcgtctagaagatgcctatctacagaaccttgcacggcagcggttatggcgtcaatgtatccgatgcaagcacatgattgaactagcagagggttgctaccatatgacttgcgtgtaggtgttttctcctcaacattgagtctgccatcctcatattattattacctttactaacaattcaacattgatctgcctccaaaatctttgatacttcctctcatatgctaatgctcagattcacttgaacgtttcattcatcctgttcatgcctgttacaggtgcggctatgagttctgctacacctgtggaaaagaatggaaggagaagaaagcgacctgctcttgtccactgtgggatgaacgcaacattatccgtgatgatcctcaaggcaatgctgctatccatgatgatcctgaagatgaatatgatgactactatgatgaggacgaaaataattactatgttggagaaggccttcagtacaatgtggattaccatcgtcagtatgatggaggggaccgtcaccatggccacttctatcaatacaatcgctagtgtcaatgtcgtcttctacagctactaatatctagttattagtacagtagttgagcaggacaatccccgtacttttcgctttcgctttatttttacctagccatccaatgttgctacttcatgggatcctatttgtgccagacatcaacctttgcagttagctgaagttgaagggctcaatcctggcgagcctgttcaattgccatgctagtttaatggatattttcatcataacttgctcatgcttatcgtaacaatgctgtctctgatatctttttaacatctcaaataactcacagtgtgtaactcatggacttgtcacaactgagctaactaatcacgaggagggttaatgaacatgtcatcaaggttctggattactaaagaaataacaacagatgaagtgaactgtgcaagaaagggcagcacgtctactcctgtagttgtcatctactatacagtggtataatgaaggcctatggtaatgggaattcgacaaatttccctctgttggggaggatgggaaggatatagaaggacctaacatttggtacatgtatcacgaaggcaatgccaaaaaatggttctaattctttgcaacaagggcaaaaacatttctgttgcatggcttgtcctttctttacaccatatagagtaaccaggtgaatttggatctgtcatcctctggaacccactgtggttctcttctcatgtacagagtctgcggagtcactctcagtttggatcattgctttcttggcgagctcatagcctgcaaagttcattgctccgagaggagcaatccagaagaagcgggggatcgcacccttgaacagtccgagaggtccctcatttcgaaggatggagaaaactatcaactgcatggagactggggtgcctggtggagcagtcatcatccgagtcttcatcacatcaaagggagttgtgacaactgctgcaagccctccagacaacgctcccactgcaatagtttcccatggttccaagtctctgttcaacacatgctgtgccgcctacaataacaagagcatatgacatgatcattaaattcgtcaaggcacagggcatagttctgaatctaatggcattgcaacagaactagatattatacagatctcagtccattaaaagaaaaggttcagcaacttccccgtaactatatttttgtattttgtatatccagtcgaacaaaattaaacttcttaagaaaaatagtgatcagagaaaagtaatacatgcagaagaaaacaaaacaaccttactgtgggcaatctttgaggaaaataaaacaagccaaataattcagtccaatgacatcattgatagacaggtggatagaagaaaaactccattgagatgccatttcagaagcatgaaattcaaatatgcagaacagattttttttttgccgggtcggtagaaggaaccggcgcccaaatttcattaagattgggaggaataaaaacaaagtacaagtagttttcgcttgcattaaacaaaggcagctcactgcacctttcagtcaacaaaatatagatggaagaaaaccaattttaaggtatggtccaaagaaacaataagaactcacaatacctttttagcttctgcataaagacacattccagcaacatagaaggaacctctcggcaaagagtggccccagtgccacggaagaagccctttggaccatctttttgcatggtaccaacaatggcctcccctacattattgaagattccagcctgcaaacgctgcttaagaacctcacaaggtatacggactgctgttccca

SEQ ID NO: 15330 - DNA, 1091 bp, Oryza sativa
acaagtgaataaatgagttaagtggaaaggttagtatctaatgccatgagaagatagtcaagaacatgttattattttcatgactggtcagatatcaatttagatgaggaaagggttattgtgtaatggttcaaagatgcaaacatggattctaacgcaagacatcaacataccgagggtcatcttcaaggcgctctgaaggaagcaggagcatgaaattgcgaaaatggctgtaggagattgattcttctgaatctgcatttaggtaccgcagcatggcagcagcattatcttcattggccggaaggcctgcaccttttaaagatgtgagaatttgatttttgtgaagtgtcccagacttgctcaaacacagggtggtgtatgcccgcaatattgttggctccttctgctccatcaaggatagaaattgtttccacccaattgattttgaaaacaagttacttctggtgcgccgtaaaaaatcccgagcatacctccttggcaatcgcctctttctcattgcaatctcaaggtcttccagggtgacttgaccatcaccatctctgtctaactcctcaaagaatcgctttcctgcagaagcaacaaaaaagagcttaggatatcaacatgcaagagttacctccatctatttccaatagaacaacaaagtaacatcatcagacataatatttcagtgatatcaatgtcataccaacagcatcaagccaatatctggagctctagttatctgtacatgattgtacaccattggggaattgtgttatgcatattctgaatctgaagagtctgaagtagtgcgtatgaacgcacaaaagaaataagatactacaatcatgttgtgctggaagtaataaggttgaggactggtaatatttaagtaacacatactgcatgcattttctcggtaaaaccagaagaatactgagttagagaaaacaccatatcctatatctgcgtacttgaacaaaaccatgtgaatctttgtaagaaactaaattcagcatttatcctacggttgttagaattagtgacttgtcttattgacataacaatgctatcatgttattaga

SEQ ID NO: 15331 - DNA, 667 bp, Oryza sativa
tttctacctccgtgatgcatcccattgattcaatgaaggtacacaaacttgttactttttaacccttttagtgtaaacaacttaaccgatagcactgattcaacagtgtgttcacttgatggcatttgttagaagaggatgtcttaatgacagagcaaataaaatccaacatactaaattttagataattatgacaaacaccatctgcttctagcaggttccatgggaatatcatgggatgcaatcaaatagaaatttatacaaagcatactactggcaggagctttttatttgtactatttctttttccagtttttcctctatgaatgatcgcccttcactcaaggcattacctacaatgaacttgccttactttttttagaaagtcgataatgaatttacttgctagattttatgctaatggattttttttttgcttgagaaattcaacagttttatgatatttctgattcaagctctttattttctaaactgtatcagacacgtgtccaagcatcttctctttcttttcctgatctcatatcaacacttccacaaattgggctccgaggactttatcggggttctatccccgcaattcttggtcagttttcaaggttagtgtcgattcagagttttagaggcaaatttgaatgtaggctgcata

SEQ ID NO: 15332 - DNA, 6270 bp, Oryza sativa
tctccggagcagaagttggcgaggacaccgccattgcctcctacgcatcaatcgacccaacccaaacggacgcctcggccgatcccccgggggacacaggacacacgcccacaggaagagagaagaggggagatgagaggaggaaccgctaggcaggaaggaagagaggagaggttatatatacggaccctgtcgttctacctctcctacacccatcgcctcccgtattttataagctttttcttggtttgaatgaatggggaagaaatgggatgggagaagggaataataatgcaaaaatagagagaaatgccagctttgactgcactgcaccacaccacctctctcactcacactctctctctctctctctctctctctctctctctcttgctcctcttgctttccctttcagagaaagcttcgatccttcaacatcctagctggccaagatgcctgggcaacacctctccgcctcttcttccccacactcacaggcccagcagatataaataaaaaggttcttgtatagggtggtgagctttaaaaggatggagagagaatagtgtttgctgccccactactccagtacacatctctttgtttgcccaaccaaaaaaaaaaatcctcttcttttcctctttcttgcacttctttttccctctttgtatgattcttttacgagtgaatagtacattgggccacattttattatcagagttgtaagttagactaagggtaagttaatagtatcactttggattaggtatttttgcacaagtttcatattggacttgtgtttcctaattctcttttttctttgcttcattggccgatgtctattagcttgtgcgtggtgtaccaatgccactaatattgttccatactcgagagtgatttgatgccatcaatgatgggctgtttgaatttaggaaagatgagagggtggtgtaaggtgaaataaatggctatattatgtggtccaaagtgaaaacattggctaagacctagtccaacccacaacaaggatcaaaatatatggcctaaactgcaatttactcttcttttattctctcctctattttaggttatcgattttaaagggccgagtatcatataagtatacgtcgattcttccaaaggtgagagaatatcagcaaataaaggactatcacatttttttaaggtatacgaaccgtgcaaatgcaaaagctattattatagttattactgtagaaatattaatatttgaatgttaagagaagagtcaatgtcaattataattcactgattattaatctttaactttattatgaacctaaaaaaatattaaatggaaagtctaatgtgggtaaaacgtcatctatctattcattattatattattcgggtgctttgagggagctcctatgttacacataaaattccgacgcagtcggatcgtacttcgtcatatcagtttagattacagtttgtaatttagagaaagataaagtgtattgtgcatactttttccccttccccactttactatacacctgaataaaaacatactagtagtatttagtattttattaatttaaatttaaatttgtgagttgcaaaagttgcagacccttcttaaatgctacaataaagaaaacaacatcgtatttagtatttgattaatcatatatttctataaacttaaggcacactaaattctaaagctcaacatgcaaagatgccacataatccactaataattattacatcttaaacctcatgcaagcatgctaatttattatgttttagagctttaaaattcaaccatgttaattagattatcatcccacataattcacaaaatatttcaatatatatctccatcaattttttttaatatcctatatgactatatagtttatcctcacttacattttagagctttaaaaatccaaacatgttaaatcatcattccacataattctcaaaatatttcaatatatctctccaacattttgtataatatctatatacctatacagttcatcgtcacttaattagtttatattctttctctcttgtatcattaagccatatcacagcagttgtttctaaccccccaaatgattaatatatggtcggaattatctccctcattttcttctctcataaaaccacatcatattacttttacatttggatcaacattctatatattatttaaattatgataaaccacatcaatttaagcgagtttatgtcgtctagctatcttacacattatttttatttattattatcataccaaactcctgcaccaacgagtggggtttcacctagtatatataataattatgatatcaataaaaaagtgtgtgcattgcacgtagtatttattaattctagttttaaaaattattaaatttaggatacctaatattatagagttcacaataataaacactaaagagtgcatgttattttcaatatcatgttctatttaacatggctttttatataactagtgggaatcttatttactgttttatgaaataatgctaacaaaagtcatatctcaccatttttacgccatgagatagaccatagacttaaatgataagaatatcttttaaaaatcactttgtaccggttatgtataaattatccttttgtcaccacgacttattatcactattttgaaattgtgtatgtgccaataaaataagcgtaatacatcattaatacactaaatcaactatttagagaacacactggcctgagatatttgcttagctccagtgtaggaccaaaggttggtaagatacgagcgtgccagtcagtttgaccctgcagctgacaagatatacaaattgaagatcaatgagccgatcggctgacaagccgatggagtaattccagccgatagccgatattagccgatgccgattccagccgatgtcgatagggttgagcaatcagctatatgtagataatgatataaaagcgatcggcttagttgtcatcggctaaatctaacttgtatgtaatccttataagccgatgcaacgtccagataacttatcggctagcaccccaataaaacattagcatgaacctatcggcttagcaagacttatattatcaacaacaatctagtaggtcgaacctaaccgatgcagcacaagattgtatatgataatctaatactcgatgagccgatagatctgtccaatgtaatggatataacaaatctatttagaacaactgtgattgtagagatatatcggctaagacaggagatcagacctaaccgagtcagtcccaactaaaccgattcgtctctaaatacaatgcaattagagatagaattgagatatcagatgggcaaatatatcaaccaaaccagagcgatccaagagattgaagcgatgcagccttgaacaacaccaatgtagccgatagattcaccagggccggcggaacgtaggatttactccttcgccggagatcgaaagccgatgcagccccgcgtcaggtgccaaattccgccgattgataagtaaaaaacctcagggaatagggtggcgatgcgccgagagtagttgtattgatcgagattgatagattacatagaccccgggtgtacatatttacacccatgagttgatacaagtccttgtcggataagaaataaactatcctaaagataaaaggaaaacataaaatccttatcgaacactaaacacacttttctaaagataaaaggaaactaacaaactattcctaattaatagataaactgccatgccgcatccttcttgaactcagactcttttggataaattccctttagttgatccgactccatcgagaacacggttgctggcgatttgacaactcccatcggctgattctataactctgaagccaatagtgactctaagccgatgatgactttgggcttaccaaatttcgtccttaacaaacctataagcatttgttggagtgccaaatgtcaaattagtaccgtttatagtaagtttaatggattttagtatgcaatagaagatgtataatcatgataatttgatctataaccaacgggtagatcgtttcaaaccaatgcaagagctcccttaattaggttatattcgggagtgagggttgggaaccctcactctccggtacgcaaaacgaagcagcatttatcacgtgattaatcaagtttcagctattttttttcaaaaatagatcaatataattttttaaagtaactttcgtatataaactttttgcaaaaaacgcaccgtttagcaatttgaaaagcgtacgcgcaaaaaacaaggaggaggagttgggaactactcctaacgaacgcagccttagagcaagtttaattgtacagcccactactagctccaattcatctatagccaatctaatagttaattcatacaatagttgcttactatactattaatatatggtcccacctgtcatacacacattgtgtcttggagtctgtgctgcagctggctatagatatgtatcccgctgctcttctctctcatcttttatctcattaaaatatgtttatagctgactaatagtctgctattgtactgctcttagagtgcttaaccagtataggtcatagactcctagttgcacactcgtgatttgcacatattattattaatataatataaaataaagttttattcgtatgctgatttttaattaatgtcagagtcatatatagtatagttttttccttaatttaattgagaaattatgaattatactaagtattgatttatactcgttttgtattctcaattatagctttttttcgtaatatggaaatggacaatccgaattaatgtttgcttttgtgttggggtcttattttatttattaatgttgcttttttgaattttagaattaataaatactaagttctacttacttatgtagtattatattaatactaagttctacttacttatgtagtattatattatctcatgccattatataaatgattttttctaattaatgtaggactgtaagagttaccttagagtgcaaaatagtagtttatagggagggaaatctccagagaaaatcattaaataagtaaaaactcgtgaaaaccatatctaaatgtgttgtaaatttatgaaaaaataactagagatatgtgtgtaggcctgaaatacatttataccaaatcttaagttcaaactcaaaaaactttatttgagagaaaaaatgacaatttttaggtgaatggtgtttttcttactattcactcgaaaattgttttctttgctccataataaagttcagtttgaaattcagatttggtgataatgtatttcatgcctacatatatctaattttttcatgattttacaaaactttcatatctggtttcactactcactagatatgtctccttataagtgttggtagatacataagtagatatcggctctcgtcattgtttgttgatttatcaactgcaaccaattttgaaattaaaaattggagttaacatttgcttttaaatatttagcagtatggatataaaagttgtacatataattttatttttttattcatgtttctacagtctattaactgtagctagctcagccagatacaactattattctcggtaacatactaagggggtgagggggtgtttagatggggctaaaactttttagcctatgtcacatcagatgtttggacgctaatttggagtattaaacatagactaataaaaaaactaatttcataaataagagctaatccgcgagacgaattttttaagcctaattaatctataattataaaaagtttactgtagcatcacattgtcaaaatcatgacataattagactcaaaagattcgtctcgtgaattagtccaaggatatggaatgtgttttgtaattagtgtatgtttaatactccaaattagtatccaaacatccgatgtgacatggacttggaataagtccctggaaaccaaacaggccccaacatatagtagtaataaagaagcgaagaattttccaaatctacgtgaatagcagggaggagttcgattataggtttagccctatttcggtcacaatacctgcagatataaatagcacccgaaacatgccaataagagcaaacttgctgatactaacgtctttgcaggaacacgaacgcaccgctctcataaaaaccactccgtgcgtattgcatccgcgtaaatggccattgc

SEQ ID NO: 15333 - DNA, 3606 bp, Oryza sativa
acaactctagtacattttgtgagaaagctccacccaactccactcccagttttggtggagctgaaactgtttggctgagctccagctctaggaggggtggagctggagctggagctgtcccaaacagacccttagtaccactgtagccggcgtcaacaaagcaatgcgatggttagggctttggggagttaattactgctacgcgctacaccaccgtagggcgattatgttcgtgcgtggcctgactgcgcgcgtagtagtactacgtggagtgcggcagaagcaactgctgtacccgagtgtatagctgctgctagtagtcgcgacaccaacaacttgaggcgcttttcctttgcaacccctaccggctttacccatcgcaattgaatgcgtcacatgccgaggaaatgtcagcgtcgctctcctctcctctactacggaggagtatacccccactgctttatatcctccgtattggtagcagttacgtactacgtacgtacatacactgatatactattacgtggtagatcgaatattccaatgtgtatacggacgcatgcagaccataatatacctactcgtacgtaagaacgagcgtgagcgctactactgtttgttgcgttgatggtgcatttggtgcttcacgctgtatgggcaggagagaaaatatgggtgcgtgtctgatgatgattggtgagcagggagggatctcccattatttgagcaggagttgggcgtgagcatctctcgctaatcatgtgtgcatgttcgagcagattaggccatcaatctgtccatgtgttcttccgtggggtaggagtagtaacttgttcggaaagcatgctgggctgatttcagaatttggataggtggcgtgcaatagttttgccgaatgcagcaacagcagaagaaaaataatttcctcggaaactcactaatagaaaaggtatttttcccaacgtgagagtcttattttcgcaggcggacataacccttagaactaaatgaccgcctacaaacatataaatcgaggtgaaatttgatgtccgcctgcgaaaatctattttcgcaggcggaccacttaagcggcgcctgcgaaaatcaatagacttgaatataaatagacttaggataggaggagattttttctaagtctccgcaccttcaccactcacggccggcaagcttatcccctcacctctctcattcacctctcctccccctcccctcccggcggcggcggccagcgacgggcggtggcggcggagggcggcggcggcgcgctcccggcccctacctcccagatctggccggagggggcggggggagagcggtggccggcggatctggccggaggggggcaaggggagcacggcggcgggcagtggcggcgaggagggttgaggcggcggcacggccacggcggcgagggcggttgaggcggcggcgcggacgacagcgggcggcggctcctgaccgcccctccttcccagatccgcgttgacgacggtgggccgcggccgtgctgcggcggcggtggcggctcccggccgccccccccctcctagatccgcgttgacgacgacaggccgtggccgtgcggcggcagcgcggatgactgcgcggcgcggacgtgcagcggcggcggacaaaggctgggcagcggccgtgatttgttgaatgtttttatttgctttcttttagaattgattcggtgattttggatgaactgtggatgaattgatttggtgtttttttggatgaactagatgaattgaatggattggatggggaaggggtgggaactggattgagaacgggaagctaccgccggaaatgggggtggctgcccaattttttttagcgctcgaagctattctcgcaggcggacctggcgcacgcctgcgaaaatcaactattttcgcagacgttgaggtgcaggcggatggcttgtccgcctgcgaaaatatgattcggcctactgggaaaagagtttttctagtagtgacttctgtactcctgttagttttgagaaacatatacgcatcctccattcacagaaaattgctgccattttttgtgcacgtaccactacgaatatggattgcattttgaaaactgtggtaacaaaggtaattgtacgcgatgtattttcaaatagtagagacgatcagagatctttcacgagccatatcccaattccgacctagtagtactcctaacagcaaaacaaccaaagttttggtcaatgtgagtatatatacatttcacagactgcagtctctcgtcgtgcgaacgaccaatccgcgctgcgcccacggctcgccaccagcaaaggcagcaacaattctccgcggtttcagtaacaaaaaagctccagatggccctggcggcctggcacgacgtggcgtgcgattctagcgaggaggcgtgcgattgggtagcgcagccgcgcaggagtacgtgctaccgcatggtggtgaagtactaggctcctataggcaggcgtatataggtgggctcggctcggcgattcgaggccgggagaaggtagcgcacgtcgtggcgctgggcgtgtgtccccgtggccagcagcatgggcgcgaccggcgggatgcgccgcgccagcaatcccggcgcctgtctgcatgcccctcccagtcccaaccctgccactccacctccggatagatggacagaatcaacgacgatatcgttgtggcgcaccatgcctccgcgctgcgcctctcgttgcaccacaccactggttgagttttcttttccaattctgtgatcagcctgcaggccgtggccgtgtgggtgttctggattccgggggagcgaagtcaaccggggcgtgatcctgcgaaatccagctgcgcgcactgcgtttcgtgtggatacccgcgtgtgcctgactgcctggtggagctcgtgccgaccagcttgattttcattacgaaaacactcctgatcggtgtacacagatagcctggtgaagaaaaaggaaaagtgagttggaatacgctgcgtgccaaccagccacatcggatcctcagatgcttctggctgtggggccctttgggagtatgcctgtctacgtgctgccacggtgtccgagaagttgaatacagctgtcgccctaagagtggatgtgtccctatatgaagtgctttattcacaggtaagcctatgttattgacaggtaagcctagtggcattcgtttcgactttggactggaataggcactgaacaaaattggtccttggtccacgtggacaagttaagttgggcccacgacaaaagacatggctgagcgggcccagggttagctttcaaggccgtatcttggaggctcagggcagtccgttgaaagaaaattgttgggtgtcacatcagatatttgaccggatgtctgaatgaatttttggacacgaatgaaaaaactaatttcataactcgcctggaaactgcgagacgaatcttttgagcctaattaatccgtcattagtacatgtggattactataaaacttatggctaatcgtagactaattaggctcaaaagattcgtctcgcgattttccctataactgtgcaatt

SEQ ID NO: 15334 - DNA, 1201 bp, Oryza sativa
tttctgtgttcagctcactgtctgagaaactgctctcagagtcatcttcatcctcttctgttgaagctccaatttttgagagaaaactgagggcattgcgagcgcacgtctctgaggccgcaatcccttagatttgggggattttttccttttgcttgaacgatcattcctagacttcctgcttttatgtggccttgacacttgaggcacatcacgctcgtcaaaatttcttttcttaactcgacgaccagatgaagtaaccacacccccctgtcgaagatacaatgaaaaggtaaacaagtcaaaaatcagaaggtggcataaaagaggaaggaatgatcacgattgttgcctcttacatctgattttttcttttttcttctcgatctgcggagagcgctatcagtaaggttatccccatcaatttctccacttgagtacgaagcaccagatgaatcaccattcaaagcctcatgttccccttcactagaatgctcatccaggccatcgtactcagaatcagtatcatctgaaataacctcattttctggttcaagctcaatgaagtctgttatctctggaagtggttcccacctatctggatcaataactgggatgatttgatattcaccagtggttgcattgtaagtgggaccgacagcaaaattcacggagggaggtcgccactcaatacccagggtacctaaccgtcgtttctggtacatactctggaagggctctggatagggtatcatacctgcaatcaacaaatcataagtacaagtatacaagtggctagaagcctctacttatactaggctagaaggatggcatacaatgtacataccagagtcacacagaaggtcttgcatatttctcctataaggtgcaagctgtgtttcctggattaatgaaggaaaaagcataaagaaaaccaacataggtcatgatgcactttgtgaaccaataaaaggcagcttgacacaggttaagaataaccagagttcagtagcttctggagttgtttgtttagtaatgtttcgatatttccttagccttgcaaaagttcactagattgaaccctttgtggggttactattgaatagatttttttttaatgcactacatctactatgaaaagaaacattaattaactacatgacaataatgttgtggataccatgtttactcaaagagagaa

SEQ ID NO: 15335 - DNA, 3207 bp, Oryza sativa
tcctgcagcccgaacaaaataacatactcaaactaatgccaaagagaaaaactcaatccccacggctaatccaatggttcatctcatcacaaggacggggcagtttacatgattgcacccaaacattggtttacaccaggtattccctacaataactcgaaagttgggtaacaatatttgtacctgatcatatttcgcatccttctgcgactctccctgccctgtaccaataatgaatatttgtccaatttcatcggagagaatcagtgatgtcccatccctgaatggtccagcataatattaagaacataaaaaaataaataatttagattaatcaacaatacaagtaattgatcaaagttctcttttccattttaaatggtcctgatgtttctaagttaatatatcacatactagcataataaataactaaattcaacagctctagtaagtctagtggagtattaatattgacagggtgatagtcgccttaatcttttttaaaaaaaaaacgttggagtgcagaacatctagaaggaaaaataataccaatataatgtttatattctctttgagttgtgtccaaaatgagtataagctactccttccatcctaaactatagcagcatctagcattcaaaatcccaaaatattgcaacttctccacctacattctcttttcaaccaatcacaacctgctcccatttaattcctccacctactttctcttctcaaaccaatcacaaccttctcccatttaattctacctatttccttaataaacatgtccaacctcaaaagttcttatattttggaagagataaatgtccagataacataggtacatcgtcaaaccaatagtctatgtatcaaactaaccaggcatttaaaaacaaatgtttacaagtgcaaataattgactgatccaaactaattgttctgcccattatggcattatcagttaattttaagtcggagataccaaatcatctttacagttataatcaggatctgcgctagattatgaaacatgccctttctcaagatctaaaacagcaaaaccacaagactaaatggaacagtaagaaatttaggatcaatactagttatatttagaaagaaaaagggaatgaacaaccccaattgcatataataacaccttagcccaagtttactgtacaggtttaccagccaagtggtgggtttagttccacatggatagccccatttcatactttagttagagttgcacataaaccttgaagaaccaatcgcaccaaccaggttaaccattttaggcaaagcagggacagaagatgaacatgtcgcaatgtcagtatagtgctacagatggatgtaccttgggttacaagtgagcacttcagtggaagataattttgacttttaaccagatcaaaaaagatgaatacgatggctaaagtatcacagtattcaacaaagagatttgaggaacacaatgagattgaacaacaaaatcaacaaaaatatttctacgcaaactcaagattcctaaatagtgagatgaatagatgacagtgctacttaatagatttgagaaaaataaaaggatgatgctgtgaagaaattctacagtgacacttacggtgagaacttcccatcaactaacttgaaatgcccagtttcatatatctgtacaggcttcccttcccaaatctggatagagaaaaacagatgttcagcctggaagattgtgataagaatagaaaaaatctggcaagaaacttacatcccatatgattgtctttccatcatacccagcactcatagctatacgggggttgaatggatgcacatcaagaacaaatgtctgttgagaatgagggtggtcaaatttcataagagaacataactctaggcaagggtcacagcttttgtgaaaaattgaagttgaaagaaaaaaaacacaaataaaaatgaaacagaatgcagatcatggcattgcaacagaacagaactgcaacaaaacagagcagacagatcactgattcattcaaacagtttaatacatagattcactcatggaattcatgcaaattttagtgggaccacaccagaaatcttgtttccattcaaagagagctcattacccagaaaaataaaataaaaaggataagtgacaacacaggtccaacaagcttcaatcatggcaagagaaaaatggttatatatgtgagaatacaacagattaaactgaactgtagctgctgggtaaaaatactgccaataatcgaacgatgaaatggctatgaaataaattgggttaaaaataactcgaaacacgctaaggtaaaagatgatattaccaacgcttaatactaaactgctcaatggaatttgcaacatgaagcaacactcagtgatttcattattcaagaactatgagaaaaatgattaagtattgaatcgcagagaaacaagaattggcaggttgcattctcatactgtcctgttcttaaaaaaaaaaatctttgtaaaagatttacatctccaaagctaccatatccatgtttcttgtttcagtaatgttttgtatgcctttcagtccatgctcttgccaggatgctagcacacttacaaaaaaagtatgaatagttacaattgtactccacgaacatgtgaatagcatgctaagttgctaactcaaagagttacaattataagtgatgaaaataacatgaatgaaagctctatgactgttaatttgcaataatgtcaataatttaaaaaacataatgcatgtcatatgcttactgattctttatgcccaatcaatgaatgtaccaagctcccatcagaagcattccaaacacaaattctgcaatctgcgggacataatacatatttaagggaaatgaatacagatgataacaaaaatagaaaaggagactatgcaaaaaaatggaaagaacagtttatcctaagtctttagatggatgccccaaactgcaaaacatggagtgaggcaaccatggaggcttctacatgctaggtactctaaaccaattatcaatttcatcatatcggtccctgaggttaacaactttgagctaataataaaaataataaagagaattatgctactaagcgtctctctatttttcaaatgagcaatagctactgcaatcacaaaagcataataacctctaagtttagggctgcaggaat

SEQ ID NO: 15336 - DNA, 2154 bp, Oryza sativa
aacaccagcatagtttcattaaatcaataattgaataaattttcataatatattagtcttgggttaaaattactacttttttctacaaaattagtcaaacttagagtagtttgactttgaccaaagtcaaaacgtcttataacctgaaacggagggagtagtaaacaacttacagatatatctctgcagtttccttttagtgtgtacataagtagtttggtgtctcagacaagcttcaggtttggctaaggctacattcgtttctctggcttgggaactcattccctccgcacggaaaacggagcggtccattagcacgtgattaattaagtattagctaattttttttcaaaaatggatcaatatgattttttaagcaattttcatatagaaacttttttgcaaaaaaaaagtaaagtttagcagtttgaaaagcgtgcacgtggaatacgagggagaggggttgggaacaaagagcaacgaacacagcctaaagcagattgaacaccgaattgtataccatagactgatgacaagtttatcctttcagtttatgcttttatgaaaatactatagaataaagtattcagaaagatacgagcactcacgacaacagctggaaagcagcaccgggccttggactaaatgcaatggcggttacaacccctgtatgccccttcagcactgagataggcaggccatcaggtatacgccactacattagtgagtagtaaacagagtcattaacaggaaaggaagaaagatattatcacagttattgagaaagcatacaatgaacttacaactctaataatgaaatcattggatgaagatgctaccacagcattattggaactcactgcgaggtcagtaatatcacccttaattcgaaaaaaaagggcagtaagttttctgatgaaaggttgtaaatgttattatgttacaataagcaaaacttacttcatgacctcggcagctagccagacaaaatgctgtttccattgcccaaattttaacaaggcgatcatcagaaccagtaataacataacgtcccgttcgatcaaaagtagctgcagaaacagaaacaatctcagtctgaaaaaacaatagagcagataaaagagagaaaatgtaaaaaacaacaaggtatgatggtctagaacaaattaacaaaaggacaaggcagtagctacatttgttgaagatatagggataagtcctttagtaatgttgcataatttagcaaattgtaaagttaatatcagtaaccattttgctgaatagaccgtggcagtatggcgcatatggtcactgtagatactcaaaacaacaaccatggaatgatgtatccacggaaaaatattcaaataacttattcaagcattatgtgttaagaaaaaagaaagaccaacagaccacaatacacagcattttgatgtccccttaatctctttataatctgcatcttttcaacaagggtcgatggcttcgcaatggcatagcatgacgcgcgtacagacggagctcggcgatgtttagtgaaaccgccaatctctctcagacttaaaccgcgaacttgatcggcttgtatgtgtggccaacggagataacgcaacagcttgggattttccttttcttgcctgcttgtatcagctgaaggatccaagatttctcataagcagttcagcacatagcaattataacagcgaaaatgtacataacataaatcaaactagcgaaactaggaacacaaggttgggtagaaatgaaattataaacagctcatcgggactagaagaacatagtgtacatacatgcaagaagggagaaggaacttgatccaagaagcgttgggacatcagcagcatttggagaaacccctccaaccaagccatgtgggtggcaagaactaaaaatcagctgctttaaaagctttaccaagtggtctttaccaatgtgggggtatctacaaaatgagcagcataaacaaaagtatgtgaaatgctcagtgtcatgtgatcattgagaaaataaagcagataataactggtctgccacggcaagggacagttgtatgtgtttgttcatctgttatgctcaaattatatcctaacacattaacaaactagcagcagtttaagaaacataaagctt

SEQ ID NO: 15337 - DNA, 765 bp, Oryza sativa
tgacgtttcagaaatagtatgattcatcagctctagaatctagactagcacaccagggaagagtgatgaagtatgaactccacaggataagacaaatggatacaataccagatatttttcaattgttcccaattttactctaagaaactgagaagcatctccagttcactacaggcataatattatttttatgtgctccgagcagaatgaacctctagtttcttgcgtcataaaaatccttaattaacaataattaatataatagcacaaaactggtctggaaattttcactttgaattccagacctcaacatcctgatgatctttcagaaccaacattggaatgaacggataaatagttacctctcaactaactttaggtatcccaaagggagtgatatgccatcatcattttcttcaccgctatgaaaaccacctcgtgaataccaagcatgatatcttctaggtagcagctgatgttcaaggagctcattgcagagttctccaacagtccgcttaaatggaccatgtgataaaaaatgcatgatgagaaagtaaacttccctcatatcaacatcaacatcagcctcaggtggaacatctgttgctaccactggattgacagaattaaccttctcaagttcctgacttggaaaatccaggggcaccatactaatggaggccgcattaccagaaggttggtgttttctaagagccatgtatacagcaccaactgaagtgggaaataataacaaataagcatata

SEQ ID NO: 15338 - DNA, 2191 bp, Oryza sativa
attcttctattgattgatgcatttgttgctgatatgtgcgtggatgaatcttgtgttcatcaataaaagtgaaaattttgatttctaatggtaaatcgtcctttgctagaaaccaccactatttatttcaccaaaccactctgtttgtactcctatttcactaccttttaagataatatttgtaagtcctataaaactgcatgttatataagtcctcaaaaaccatattcgtacatatcttgaaaattatgttataatagaagttggtggtggaaattgtatttttagaccatgatgatgtccaaaacatatattttgtgcatagagagtttctttttatggtgacaagtctgataatgagcattaaccatagatttagcttttcttttacatatgcttgcctttagttttttttattcatatatgctcataaaatcatagggtggatgactagtattctctccatcccaaaatatagctacttaaacattaaaattttgttaaaatatatagtagtactttctccacctacccctcatctcaactaatcacaaacatctcttatttacaccccgtacttcctaatctcaaccaatcaaaaccatcccccatttaatttcacttattcgaatgtagccatattttgggatagagggagtacttgtttatttgaatagttttggttgcattatatgttagtccaatgactgattttggttgcattatattggcattttatgtatatatggtctatttagcaaattttcccatcatcttaggagttctttttctctacacacctaggtttcctgtccagttttccattgaggtgattaggataaggcttgagaacaattactacagaactctggaagctattcgacatgatgcgactgtgatgcttgcaaatgcccagtcttatttctcaaagagcactgatatgaccaaaaaaattcggaggctatctgattggatcgaacaaaccttttcatcattgtagagtggtgcttgatggttagtgcccagttaacaggcttctttttgtgcaagcagaatttgcctcgcagccacagtatgattctacaggtgttactgcggaaaattttgttagaggaatactaaagtagttttcaagatgctcaacagcttaacactatttaatgcattgttttgcttgcacaagttgatcttaactaacgcttctgatcattagatcttcgtgaagaaaaatcaattaccgattcgacaaaaggaacatcaagggccttgttagagataaagctggtagtgtaaaatgcactaccgtgttattcgttgtgtatagaccccgtaaatcatcaataaaaatgataaaatgtttatcgtctttattatgcactccaatttcaggtgttacattggatgatattcttcgtcgctttatacaaaatctcgtttctcccacgggagaatagcggagggaacagtcttttgcgcacaaaaacaaatccgggtttcaagaaagctgttttttttaaccgctcatccacgagtctcgattctgttgggtcaaacaaacaatcgaaaaaactggaaaccaaacttgcatctacagttaaaagcgattatccctttatcagtgttacctttcagatagccgaaatactatggcacttacaaagcgatgattgtacaggagtaatatttggatcagaactaatctggaattgagcactcacgagcgtcaaccccaaaaaacagaaacaccgaggacaaaaactccaggaaaacatggtcaaccgtgagaaacgaggaaatttcctgagagacaggggtagtcatcgtctacgtgggccttgcggctctgaacgtggggtgcagcaaccggccgagctcctcgtcgccggcgtctagcggctcgccggtctcgttcctgacgcgccgcacggccgtggtattcagcgactcgtgcgcgaacccgtacagcttcagtatttggtcgtccgcgaagttgaacgcgcgctccatgccgcgccggcaccgctccgccgggtagctgtcggcgtacctccggcacggcttgcacccgacgaagtgcgtgacgaacggtcaccggccgtcgtcgcgccccgcccgccgcagctcctcgtacttgtccacgatgccctcccagaacccgttgaggtcgtaggagctctcgatgaacaccttg

SEQ ID NO: 15339 - DNA, 1934 bp, Oryza sativa
ccgcgtaccgctcccatgggatctcgaacagcatgtcggtgaacaccgcgtcggagtccacccaccagatcagctccgcctccgggtgcgccaccatcagcatccgcagcagcggcagcttcgcccagaacccgacatctccgcgtccaggaacgccgtgttgtagaacacgtcgaggccgtgaatgcggcagtagtccaccttgttcttgaacgcgcgcagaagcaggtggtcgccgtccgggtcggggcaccgcgccggcgccgacccggtcaccaccagcacgcgcggccgccccgcgggcgccacgcgcgccgggaactccgggtgcgccgccagccacgccgaacgccgcgcgtcgtagcccaggatggtgcgccccagcgagtagggcgggtccgtcagctgccgcggcggcgggaggccactatcctcctcgctgctcgcgttggcgccggcttgcatctgcgccggcggcggaggcggaggcggagccgccaccgcgacgtggacgggttcgttgaacacgacgcggatccgcggcacggtgaagctggaggagccggtcgggccgaggatgaggaacagcgcggcgacgatgaggatcacgacgacgacgagaggggcggcgtcgctcgccgaacagcgttggccgtgctgccggcggccggctcgccggtcagacgtcaccttgccaccgtgcttctccatcatcgcgcgcgatggctagctagctgggtgacacaaaggccgacgtgccgtccggccggcgagcgatcgagcgtgagctgcaacgttccaccttgcaagttgcaagttgccggtcgcatcgcaagtggttgtatatatattagtactagtagtaggcaaaatttgctggctaagtagcagtcgtgagcgcacgacgaacggtgcaaacgaacgtgtcatcgctgcatctcagccgtcgatcttgtggcagccgtcaacccaagagaggaatcctgcggtgcaggcatgtatgggttaaaaatacaccattgggatcgtgtcgaccgatcgagtgatcacgatcgtggcaggcagtgatagggttaaaatactgagcaggtaatttctggaagatttgggttccaaatctcgatggcgatgcaaattaggttaagaggctttaattgcccatgtgcattttctcaaaatttgtgtagggttattccttcttcccaggttgcacacttcatctgaggtcacttaaatttacaccgaatccgattttcgtccttaaaccctaaaaccaaatataaccagtccctaaactattaaaacaggtacaaacgagattcctcggtgatttgaaaaacggttttggctgacgtggcgtttacgtggttggtttgactagaactttgtctcacgtgatattgatatagcgtttacgtggcaattctactccaaaaaataataaaaaccatgggcccacatgtcagttaaaaaaagaatttaaaaaagatggggccacatggaccccacatgtcagcctcactccttccctctcccttctctcttcttcctcatcctcactcctctcttcttccatctcctctctctctccttccaggggagcggatgggcaggtgggtgacggagcaggcgagccgcgcacgagctgctccttcgacggcagcggccgcgcgtcacgggcgactgcgccagcgcgctgtgtcctgctccgtctccggcgagccgcccaccagctcattcaacacatgcaagtactagcagagcacaaaccatagctaactaactagctaatttgccgatccatgcaagccactaacatgaacatatcacattggtagcaccagcatgtctaacacatgacgtgatccaaaaactaaacaagcactaaaggatcctatgcaataagattagtgataacatgcccgggctgcagg

SEQ ID NO: 15340 - DNA, 4727 bp, Oryza sativa
tgctcctcgccccgtgcaccatcttattattcacgtcgggagacgtgccgctcccccgcatccgcatcgagtacgctcgccgtgacgctccgacgatcaccgcggtggcagcggacacgtcgccgccaccaccttcaccaccgtcgtcgtcgccgccaccgttgtcgtttccgcctccaccgcctccgccatcatcaccacctccgccagctctgcctgtggtcgatgatcacagcgacacgcaacggtcgctccggcggctgcggcagctgacggacagcccgtacacgctcggcccggccgtgacgggctacgacgcgcgcagagcggagtggctgcgcgatcacacggagttcccggcgtcggtggggcggggccggccgcgggtgctgatggtgaccgggtcggcgccgcggcggtgcaaggatcccgagggcgaccacctgctcctccgcgcgctcaagaacaaggtggactactgccgcgtccacggcttcgacatcttctacagcaacacggtgctcgacgccgagatgtccgggttctggacgaagctgccgctgctgcgcgcgctgatgctggcgcacccggagacggagctgctctggtgggtggactccgacgtggtgttcaccgacatgctgttcgagccgccgtggggcaggtacaggcgccacaacctcgtcatccacggatgggacggcgccgtgtacggcgccaagacgtggctcggcctcaacgccggcagcttcatcatccgcaactgccagtggtcgctcgacctgctcgacgcctgggcgcccatggggccgccgggccccgtccgcgacatgtacggcaagatcttcgccgagacgctcaccaaccggccgccgtacgaggccgacgaccagtcggcgctcgtcttcctcctcgtgacgcagcgccaccggtggggcgccaaggtgttcctcgagaactcgtacaacctgcacggcttctgggcggacatcgtcgacaggtacgaggagatgcggcggcagtggcgccacccggggctcggcgacgaccggtggccgctgatcacgcacttcgtcggctgcaagccgtgcggcggggacgacgcgagctacgacggggagcgctgccggcgaggcatggaccgggccttcaacttcgccgacgaccagatactggagctgtacgggttcgcgcacgagtcgctcgacaccatggccgtgcgccgcgtcaggaacgacaccggccggccgctggacgccgacaaccaggagctcggccgcctactgcacccaacattcaaagcccgcaaaaagaagacatccagagcagccaggcccatgtaatgacgaagatcatatcgaaaaccgtgtaattatggagatatgatactttgattaggttgtattttcgtttggagatatttcttgaatattgatgtatgaacgaggaccggagatatttaatgtgttgtttttacacccaaaaaaattctcactttatgtacgagctaattccggttacttgacttattaaaaaaaattgcgagcaatgttttgttggggaaacgtcattcctgattgttgttactattggcaaagcatcgaaattattctgcatctatgcaaggaaaagattgcaccatagttgattcatgccagtggaatacaaaaagaaacaatttatgtatgacagctggattgagtagaaactagaaacgactatatttaggagactactattgccattcacaaatagcaccagcaccagtaatacaaaaaggaactatgggctaacaatgaaacaaaagttcattatatttccatttttctaactagaaagctaatataagctcgttctagctctgatatttgcacttgaaaaattgttgcacaccttggtctttcaccatttgagatgtcatatttgtcagtattggaaagaatgaagctgccctcttaccatctcttggactgtatctcagtggatcgaatgattgatcattgaggctgaggctaaatttaagcatggtttgtcttcagggacttcaggcacaggcacttcaatcagcttcatccagtgacgttgacaaaaagttcaagatgaaatcatctaggtccccattgaggactgaatcagggtcggatacttcgtagtttgtccggagatctttgaccatacgatatggctgcataaaggcaaaacatcagctatatgtcagaagtaattctaaaaatatcctggcaaaaatacatcacgaacttatgttgtttacattcaaagacactttccatatcccgtaatctagctactttcatggatagcagtacgttgacggttagcagttcgcagcttctttcttgattttcaaataacagcagatgtaaacaactgatgaatcccatgaactaatgcctaatgttgaggaaatattgagaccatggataacgcaatacttaagttgaaactttatcctccgaaacctagctagcaaaatcttagtcatatgataaaaaaaaaaagacttacatggagtacataagatcttatttggtttccccagctgatttcagagagtgattgcgtgtggtctgcattcatctgtgcttggcgggcaatctcaagctggtccagccgagactggagcactgccattgctgatgccttattcatatgctgtgatctgcactttttagaatgaatcagaaacattttttttctagccacgcatacgcagatataaccaaatatcatttatgttatatcaacaatcaagattatggatcctttcaaaagtagaaagaaagacacaatatgattctaagacatcactaagttcatagaagtccaaattgcccatcagctaacatggaactaaaagtatgctatattatattcgagaatagtacaatgatcttcattacgggaatgctggagtgtttcaataataatggaaaacaggagaaagcataaaaaatacctttcattttgacaagttgcagttataccagttggaatgtgcacaattctaacagcactttctgtgcagttggcatgttggccaccaggaccaccagagcggaaacgctctatccgaagatctgaatcttttatctggtatcgggtagaaccatcaccaagaataggtacaacagccacagcagcaaaggaagtgtgccgcctctttccactgtcaaatggagaaatccgtaccaatctatgaacacctacttcggctttagcatatccaaatgcatattcaccatccactttgatagttgccctctaggaatagcagattttcagtataaaatctacatttttgctaaaaggtttctcaaattaaaagtaattgactgtaggaaagataggatcttatgttaagatcagatagtttactggtttgatcatcacttccagccaaagttgtaactgaaactacttctgaatgaagcagtagcaaattcagtaacgggagttgatgagaaggaatgtaaaccttgattcctgctatttcaccaggcatttcttctataatactgactgtgtatcctcgtcgttgggcccatgagctgtacatgttcataaccattgcagcccaatccatgctctcagtacctccagctcctgcctgaacctggtcatggcatcaacatcatgaggaatcactcaccaaaaatgcatggaggagcaatagctttagaggataattctgaaaatgatacacaatatacctcaatgaagcaagagcaagagtcattatctccagaaagcaatgcattcagttctttctcctttgcacttcttctcatttcggctaatgccctcatggtttcctgcacagaatgttgattatcagataaaaacaaatagctgatttgcaccttgaagttgtaactttatgtgatgtagtgcaaggaagcactgcactcaccgtctcaagttcattatcgtcctcttctcttgcaagcctcaacatgtcaatgtgctccatcaactcctgctcgaattggttcactgatttaatcttgcccatgagctcaccatgttcacggctaaccttcccagcgaaaactggatcatcccagaggtccggcctctccaacaccacagacaactgccttgatctctcaagtatccatccccactaagaaaatcgaaataaattaattaacagcataatggaacgggcgcacaaatacatactagcacataatgacatgtgccacacaacgcacaccaggtgttcgttgatatgcccaagaggaacaaggcactcagatgcataccacgggcccaacaacgccaggaacatcaccaatttcgcttggggaatatgagaagtacaaagtacctcacaaagattgtaccttgagccgcttcttgatgagcttgacggactgcgcgacggcggcggcgtggctgcgccagtcgctctcggcctcggggaggatcgtccaccccttccccgcgatcgagtccaccgtgagcccgtccgcggtcatcggcgcctccgccaccgtagccggggaagagaaccaccgcgtcggcgggtctcgaggggaccatggtccggccgccgcagggaggccaccgcggccgagtcccaggagggaggccaaggcggcgccattatcgaggtggtggtggtggtggtgggtagggctcagggccccggaggagcggaggtgggagaggaggcgcgcggcggttgatctggttaggaggcg

SEQ ID NO: 15341 - DNA, 2187 bp, Oryza sativa
  unsure (1)..(2187): unsure at all n locations
tgctaaaaaatggtttttttaaagaaaaatggtatttttttataaagcagcatcgtcaaagtgaactggcccttcatctcggccgcttgcatttgtgagcagaattaaatcactgatccgactcatgttgtgcttgcgtcgtcattcgtcagtctcgtcgcgctgtgccgactgtgcagccctcaagaacacgtccgaagctcgaatagacattcagcacatacgcatcgaatctgaagacaaccatttcctttttttcgaacgctgaagacaaccattcatttcatcctgtttagtgcgtagatttgcatgtgaagcaagcacacccagcaaccctgcttgcagatatcaagtcgtcaaccatcgctatcggcatcaacataagtttgcacacgcacatcgttccaaaattcgataaattttagatgggagtgcaattagtgcagcattgcagcaacaaagcagaaggttagtcagtactcattagaacaggttcgacatgatttttcgatttatttgtaccccgtgatagcacaggaaatcaagcatacaagatgccaattacaacgagtgctacactgaagacttccaagctccaacagctagcataacaatggcagacttgagaagttaagatgcaggtagttaaaactccggacagctaatttgccggctgagcggctcacaatatgccggagagcacgttggcggccgtggacagcgcggcgccggcgatggcgcactgcaccacccgctcgtgcgacgcgcggtccgaggtgagcgcgacggccgcgccggtgagggcgcccgccaccacgctgttctccagtcgtgcgtcccgcgcgcctccgtcaggccgtaggtcagccccgagtgcaacccggccgcgagccctgacacgcggaaacaaataaatcgaatcaagcagaattaatcagccgtaagcatagcaaattcgtcagtaaattcagctcgagagagggagggatgcttaccccactggagagactctntgctcacgcttttcacctgtcgagaaagcagaaaaaagaaggttcaccatacaggaatcagaaacgaccattcacagattcacggtgtggcgttgtccaagacaccaaaaaggcaaaaaggtatttgcacttggcttaccatagcctcagctgacttgctgctgttccctcctgcatacgcaatttatcagaacaaaaatcagtggcatccatgttgtcatggtcatactactagtaactattcaagattcaacatcaaacgatttccataagcatatcacacagttgctaccgttgagatccgggaacgatcgcttcctggcgccggtggagtcggacacggctcccgtgcccccaccctcccctgtagcagcagcaactaagcaactaagttgatcatcatcagaaagaaaaaacaataaaaaaaaacttggtaaaacgaggatgaactgaagccccgtttggtttgctagttacgtgccttccatggccatgaagtaagactcccgcgcgaccgcctggactgcgccgatctgcgtgggagatcgaagcaagcaaagttaaagacagtagcatcgcggcggtgcagaggtgaagtgaactggagaaagcgagagaaacagaaggggaggcaaaaaggtgagtgagatggagggcgtacgccggcggccttgacgaagctctcggcgacgcggttgaggagcgggtggccgaggtcgaccatccagttcttctccaggccgcgcacctcgtccaggaacgtgcgcgtctccaggctgctgttgctgctcccgctcatcttcctccgctccggcgccgcaccctgctctctctctctctctctatctctctctagctattgacagcttcggtgacagatttgcaatgccactgcttacactacagcaagcgagccgcgtgcgtatacataaactgagcgagtcgtggtcaccgtggaacagatcatcagcaagcggcgacgagaacccgatcctactggtggcgtcctggggagaagaggacatgacacgtaccccggcgggccggacacgttgcggggagaggctctactcgtggcgctcttctggaacgtgcgcgagcgcctccgtgttccatggaatctgcggtatatccgcctctgtgcctgtgctgtgctggccagggctgcaggaat

SEQ ID NO: 15342 - DNA, 3522 bp, Oryza sativa
ctttttcgcttcttttcttttcttttcttttcttttctttaaaagtgcttgatttaaatattgatttgaaaggtacaaaaattttactaaaaaatgcttgatcaaagtggtcatattttcttttcttttcattgaaaggtaccaaagcacgttttgaagtgttaggacataagcgggcatgtgcgcagcgcagtggccttcgagcaatgcctacatattgtccaggtgccagagtgccggcatgtcacgccctgaaaaaaaggaaaaaatgtctcttgaaaaatggagtattgacaacgaagcacatcttttattcagatcaatacttcagcagaacaatggttcccaatacaagtgcatcgatcgttctgaaattaaagcaacagcgaactgtcgtccataaaagaagttcacgacactccgacccactttcaaaaactggaaccacaataatcggattttcgaggtcttctcgaccatttatgaactaatgccaagctgagtgcgccaatcctcgagctgtttttttacttgctccgagcctgtagagccgtaagatatgaacttgtttacggcgttctccactcccagatactcgtacacatcgccctcaaaaacggggtgaacagatttcaggtcgtctagtccaagttcggcgagctgacagttcttcgagacgcatagagctacagaccttccaactatctcgtgcgaggttctgaacggcacgccctgaaaagcaaataaataaactagaataaataatctgattgtagtacaacagcatagcacctattataagattaaggagaacgtgagcggtgagccctagtgtgtgtgtgaatgtgtgtgtgtgtgtgtgttttgaacgaacaataatttttttttactgaggttacaaaaataggttttgatgtagttcagagttgatttatagactttcagatagtttgggttgtaaatgaactttacaagctatgggagaagcttaccttcttcacaagataatctgctagtgttgttgcatccaaatagccagcaggcagcgaactttgtattctttttgagttgaaggagatattttgagcaaactcggtacatacttcaagcattcctaatacagccttcacgctgtcaaacaagggttccttgtcttcctgctcaaaacgaaatattgagagcatgcaatgacataacatcagcatgaataacttgtacgaaggataatcacctgtaaatcacggttgtaggcctgcggaagtcctttacaaagggtgaggacagtcatgagatctccaaaaacacgagcagatttgccacgaacaagctccattggatctggatttttcttctgtggcataatgctgcttccagttgaaacagagtcacttggtgtgaggaatccaaactcctctgatgcccataagacccactcttcaccaattcgtgaaagatgaacagcagcaattgaattggcagcaagaaattccaatacaaagtcgcggtctgatactgcatcaatactgtacaaggaaaagtttccagattaagtgaggaagggcttatcatatgtcaaaagtgaggtaaccaacaaagaggaaagccaaaaattatgtttcagagtttgctttacaaaggcatagcatacatgacaaatcacagtggagattccagcggagaaaataggtaattcatctacacatgtgctatgtgagaagacatacttatttgagcagagattacttatttgagcagaaatgaagagcaagtatttgctgtgtgttaactttgacataggtgatataggtcaaactactaaaataccatagaaatcatgcaatgtgactgaaactttttaaagttcacagtactaaaacaaactggggatttacctgttcttcattggagctgtaaacttcaaatctttagcagttttgaacctatcgataggaagtccagtaccagccaaagcacaagcaccaagaggacagaaattcaaccgttccctgcagttgaccagccgtccagcatcacgctccaactgtgcaaagtacataaataagcggtcaagttcattgatggcttgttctcaaagaagtaagctttatcagatcatgtagtgtttgaagcactattatatccccgcacagggaatacaggaagtacttgtctataggctactcattgtgtcatactggcatgatatgccagctaattcaacaaataaagctggagttgctgaagtttattaaacaaaggagattgtagcttaagtaacacaaacatgtactgcagtttctttatattccagatttaataacttttttgtgaacagtatatagaccgttgatatatcagcattggcgagtagaggcaagcctgaaaatcatgtaaattttggcattgtactggcattggtggaacgaacaaagagagagagagagagagagagattcaccacataaattaaggagttgaatgttttggcacaaaatgttcattttatctacataagaggcatcatttttctatttcacaaaaaaaaagagagagattcaccacataaattgtccaaatcatcttttgatcagaacttgggataaagtagattatttgattaacatacatagtggagagaggattcaaccattcaggtttgttaacacaataaccaacatatgtaatcataggaaataagtctaaaaaaactgcatgggattgacatttgacacgcattgacaatccctggattacaccaagaaaactaacattaaaaaacccaatgggcatgaacggtatcagggaagggtgcataagaaaattcacctgttcaacatatgataagaggagatgtggaagcaaaacaggctgtgccctttgcaggtgagtgtaaccaggaactattaagtcaacatattttgaagctaacagaacaagagacacctgaaataatgtaaagtggtgttagaaaagtgaaaaacatccaatttagacttttatcagaaaaaaagagagagagagaaaccagtgttaatatttacaaaatggagttgcaataatcaaccatatttcatgttatacataatagtgaggcatttctgcacatcaagaactgcttaatcaaaaaaagtttgcatctggaagtgcttaataagtcgttcagtatggatgccagcagcatggctattagataattttctagtatagtaagtcaaccatatttccttgaaggcttgaggcaaaacttaagatatgtcaatctaatctcttgctccagcctttatatagtgaaagaaaggaagcatatgctctggttctcttcagaaaccattgccccagactcagcactacagtagaatcaacacttaaagctttcaacttaactagtttacctgaatgattgcttaggtataccatgaccaaaaagttttataaatggttcatgcaataagaatccataattttcactatgggttgataattttcatcaagtgttggatcaagcagaaagaattgtattgc

SEQ ID NO: 15343 - DNA, 2305 bp, Oryza sativa
ccgttatcaaaccctgcattgcaaatgattccccaatgtgaatcaaggtcgacagcacattggtacaattagcatctacaaagtgcaaaaaaagaattagaggcaggtgtttcatcaagcatctgattaacatactgacaaactctaaaccctttgatgaaacactaagaactaagaaagttagatttagaaacttgcagacacatctcaagcattacagtggagctagcaatttcatcgaacacatggcgagcgcattagcagcggattaaccccagactaaaactccccaaaacggcttagccgcagctctccagcgcaggcatgattagccgaacacctaggtggatcgcactaccaccaccaccaacagagacaacgaagcagatgggcacggtggaggcgcgcgcacacagtacctgcgcggcgagcatggatgcgtgggccttgctgcccatgatgtcgtacttgtagagctgccagtcgtaggagatggactcggtgaacccttccacggcgtcggtgacgccctcctcgaatcgcccgccccacagcttggtctccttcctctcctcgctctccgaggacgccatcgatgtggacgccgcggcgacggacgggaaggcggggcggcggccgcggagggacacggacccgccggcggggaaggggaggatcctcgggcggagaagggggttgggcgccggcgagaggaaggattgggaggtggcggcggccataagtatcgtcgccgagggtgtccgcttcgcccacgactgtggcgcggcggcgcggcggggaggagggagtagttggtgacggactatggtcttcggctacggtgagtgtgtgtgtcctctcagaactttgtttggacggtccttttagtccgagtccgtgcaatgtggatgggccggaattaaggcccaaccaaataagacccggaataattagggtacccaaatctatttttaactcgtgtatgtatattagtgctagtgctaattaatttggacactgtaacggcaagtgcaacagtgaagtccgatatggaccctaaggagaagaaatataacaccattgtacaatccggtcttcaatatgaatcagatgaagttcttgtgaagagtcaacttgatcgagatagttttcgggggtagagttattttctaatgtggattgtataatatttacactgtaccataatttggggaagcttttaggcacaagaagcataaaggagctagtgactctatggactaatttaaaagctcagactgtaaagcgtaattaattactccctccgtttgttttgacttttcttcttagttaaatcattttaattttgatcaagttcataaaaattgtataataatatttttaacccaaaacaaacgagtattaaaacatatttaattttatatttaataaagtaatttcacgtggtagagattattattactagatttttaaaaaactttgttaaatctaaagaagttttactataaaagattaaaatgacttatattacagaatgaagatagtagaaaccataatttggggaaagtttttttaaaaagtagcctctttccagtaaacagcctgatggatggtgtaacatccataacttaccgtctcagccagcatgacagcgtggacgcggctgcaggcaatgtcgtgcgcccacaattcatcagcctctcccgccaccggaggcccggtgaaccgctcgccggccttgcccttcaccgcgttgccgttaagccacacccttgtcggctcggtggccttcactaccgccggcttccgtttcgacgacaccgtaagctgctgtggcggatcgttggcataatccagcgacgacttcaccgacgactccgcggagacgtcggccgagctgccgaccatctcgatgagcccgacgtcgtgcgctgacagccgctcgccggtggccacctcgacgatctccaggccctccacctgcttcggctgctgccactgcggcgggaacggcgacggagctgaggctgagctcgtcgagtgcttgcccggcctcggcgtcaccggtattatccggttgggcgtcgccggagaattagtgcgcccgtcctcggtcaccgcgggtgaaggcggctgtgtcgcggagggcgtcgccgcttgcgtcttctcgggcgtcgacggggagtgcggcggatgcgtcaccaacgacggcgccggcgtgagcgcctggcgccgcgcgaccacggcggcggcgttggccttccgctccttgttcttcttgccgcggaagcacgacctgatggac

SEQ ID NO: 15344 - DNA, 13435 bp, Oryza sativa
tccgtgctcgacgcctccggtacgtacgtgcgcgcgccatgtcgctcgtacattcccctttccccccttctttcgccggcgttgtttgacagacctgtactagctatggtaggctacgtgttctccgacgaggtggcccccgccattgacgggtacagcaaggaggtggcggaggcggtggtggagaaggcgcagaagctctgcacgctctacggcaaggtcggtgacattccaacgctccacgagaggcaattcgggattcgaccacccattgatcgaatttagcgtggcgatttggtgcttgcaggaggtcggtggcgacggtgaggctggccataagatgaaggtggaggtgaaggtggcggtcggcgacgccaggaacgtcatctgccagatggcggacaagctcggcgccgacgtgctggtgatggggagccatggctatggcctgttcaagaggtcactgaaacgatctcgttttcaatctcagaagctgtgagagcgcagcttatctgctttgcatatcatctgcttcaatcagctcgcgctctcggtgacgatgatgtttagcttaattacgctatatatgctcgttgattttgcagggctctgcttggaagtgtcagtgattactgcgtcaggaacgccaactgtccagttctcatcgtcaagtcgtagctgccactcactccagtgcttgtaactgtgcagcagcatgtgtgctctgtccggcttttttttttgtttttgccttgtgttctgctttgtatgtctactttagttcgcttcgcatgtaatctgccggaagaggacgtgctgagtgattactcagaactctgaagttatccagcaacctgtatatagaagaactactttctgtggagatggcaaatttagtttttctgtcatcggcttccacttttagcactgatttctgaatttggctgtataattagcaaatacccagggtttgctttgatctattcgcgctaaccattgcgcagaaattcagaactcctttataaacaaatctctaagagagagaattactagcgtttcttatatttgacccaatttcatctgcgatcctcttttgtgcagttgcttttgttcctctttcttccggtgtgtatcactatctatcttgggcctcgacattataaattgggaaaaagtttatttttggttctcaacttgctgtcaagtttatattacatcctcgaaatcacaataacacgttaacagatactccctccgtctctaaatatttaacgccgttgacttttataaacatgtttaatcgcatgtttaatcttttgttttattcaaacatgtaaataaataaataaataaatatatatatatatataacagagaatttaaattttttaataagacaacggtaaaaaaaacatgctaattttaaacatgtttaaaaaattaacggcgtcaaatatttagaaacggagggagtataacgtatcccttgactagcataaccggtgttcccgagatctcaggcaatatagtgtcgtgttttagctaacgtgatgagcgggatccacatgggtctcacatgttaggggctattagggctatttttttcctccaacccctaggggcgtacctatgtgtagtttataggtgtcctagaaccctgggtagattatccaattatagttaactagcatagtggcccgcgcagattgcacagctagcatcattataatttcccatataatatcatatatattttttctcattatattgttcaaatatattacattaacatcataattttaaattttacaataactttacgaaactacaaatgtgtaatattcatattgtattttatatacgtgttagttattaattattttaatatcaaattttagttatttgtaaattatatattctcatatatctactctagactcgtcgtttaatattcttttttttaattccgaattttatgtaagttgtatttctatatagactctaggcttttcttccaatattatttatttttatttctaaatttttattatttttaaatgtatttctatgtgaactctaaattcatctctcaatattctttaatttttaatttcgaatttcagttacttctaaattgtattcctatattgactttaaactcttcttcccatatttttcttaattttgaattttagctatttgtaaattgtatttttatacggactcaaaactctactattaattttattatgtttattctgaatttcagttagttttaaattgctatatggactctatactctacttctaatattccttatttttaattccgaatttcagttatttcctaattgtatttctatatggactctagtctcctcttctaatattccttattttttaattctgaatttcagctatttctaaattgtatttctatatggactctgtttttttctttttctccgattaatgtgagaatttctaggctatgagagcgaacatgaaggctctttttttattactttaataatataatatatttatgccatgcgaatcagtataatcagttaataattaaataattagtatgtttgggaccttcgataaattttattctggtgcaccactaccaacctctcctctctctctctctccatctccaaagcttatggtcggggaaccaccggcggcagcagggtcccatgcagcctccatcgaattagcagttgccgccattggtgaaaggggaggcgagaagggagcttggcttggagtcccaaatcaaccactggttcactgttgtaggagactaggggaagagagaagaaggaggtggtggcgaagtagcagcacgccaacggccgtcagtggagctcagcgtcgttgctacagtcaatggatctcgactggagaggggaacggggagacgggacgacagtgagggcgcttcagtcggtgggtggacccaggtggagggtctccgctgtcaccgccacgctcacggcgctcgggccgtgtttagttattttcaaaatttcttttaaaatatacggacacacatttaaattattaaatatagactaatagaaaacaaattacaaacttcgcttgtaaactgcgagacaaatttattaagcttaattaatccgtcattagcaaatgtttaccgtagcaacacattatcaaatcatgtcgtaattaggctcaaaagattcatctcgcaatttacatgcaaaatgtgcaattggttttcttcatccacatttaatatgctccatacatatgtccaaacatttaatgtgacggaatttttgaaagtttgaaaatatgagggacccaatgtgtcaaataaaaacgagggacccaatgtgaacttattactactacaatttgcaagcgaccaagcgtaagtttggggccgtttggctatcgaataaattcattttatgtaccttaattttacaccgaatcctattttcgtcattgaaccccaaaaccagatacaaccggtacccgaactatcaaaactggtgcaaaacaggtccctctgcagttttgaaggctgttttggctgatacggcgcctacgtggctggtttgactaggtctccatcccacgtggcattgacatggcaattatatctcggaaaaataataaaaatcgtaggcccacatgtcagccacacaaacaaataattaaaaacggtgggtcacacatgtaacctacacaaaaaaaaatatggcgcgcccccgttggccccacatgtcattctcaaatgaccaaatccaatcctcttcttcctcctttctctggctctccccatctctctgctccctccttgccaagcggcggggcgacggacagcgcgtggccggtggcgggcaacgacgcgtgtggcggcgcgcgtggcggctgggccccctgtgtggcatgtgaaggcggctcgttttctttctatagctcttttgagacaacttggtgagtgctcgtgagctactacggccatggctgtgatgtgttgtactactgtcgtcatcaagctgaacgctgaagaggagaggcgtcctgctactagcggccgttcgagtgggagaggctagcgaccgtcggcgggaaagcccagtgggagtgacgggctctcggaggttggtgggtagaggcccgcagcggccccttcatcttcccctcgccgccgtaaccgcgcgctgccgtcggcgtcgggtcgtctcgatctgtgcgtacatcttggaggtgaggacgatgacgacgccgtggcttcctgattcggcacaaatctcagaccatgtcgccgccgcccctcctcccgtgcttctagtcccatcttgaccttgggcagcggcggcggatcctgctcaccgctttacacttcaacatgacgctcatgatgacaccgccacccaggcaaagcaccttcggccgcggcgaaatcggcccagcgctgtgacgggagcgccttcagctctaccttcgtcggcatgctgcggcttgacgaggaagaagagggagaaccgagtggagagaaggagatgacatgtggggcccacgtgggacccaccatatttatttatttatttgtgtagcttacatgtaggtcctaccatttttaaattatttttttgtgtggctgacatgtgggcccacatttattattatttttccgagatataattgccacgtcaatgccacgtgagatggagacctagtcaaactagccacgtagacgccacgtcagctaaaaccgccgagggacctcttttgcacctgttttgacaattcggggaccggttttatctggttttggggttcaaggacgaaaattggatttggtgtaaaattaagggacctcatatgaacttattcctttggctattgttgagttattgtcgtgggcttttattcattgaagaaagaagttcctgtgaacttgactcgtggcctgcaggcctcaggttcgtagcgttcggtcatcactgtgaaatggctctccttcaaaacggtttgggccctggttgtgttattgcgctgccgatccatactcaatgctctcatacttgggctgtaacgatgactggatgacctattattgacttgttcctagcaaagtttgatttattctccgtgtttttttttacttcgacgtaatggcgttctaaagtccgaattttgctatgctccgaaactctgaagtttgaaattagcatttactgctacatccgggcgtctttgagtttgacatttcaaaaccagcagcatcggtgatcgttccgatctaattgtcggcgactgttccgccaaggtcaacttgccagaaatcccagtcaatccaattggcgatgttaattacgagttaagtgggttcgttgtcggtcggtgctgaactttgcacgtcttctctgtacatgcgcgtttgaatttttcaagttcagacgttcatttcgccttcgccaacttgggaagaagtagattcttaatcgagcatagacatgtacatatgtattgcaaacattgctcctttggatatgaacaatagatcacgcctaaacactggccaatcatttcgttgttaggttgcaactaacgccagaatctccgcaatatcgtgttgctctaagataatgccagtaaattttatttcgagtttttagatgattacatgtatacctgacccgtcaactaattcatgcgagtatgcaacacaacagtatcgcttgagcaataagcgaactgtccctttcagacaggagagtttaaaaaaggaacgagctttattaggcttcagaccaaaccgtaggttggttcgactggcaatggcagtgcttaattagattagaagttccggctggtccaagtagtattagattagattataataggatcagaacaatgtatctcggcaaaacgaagcttcgtacttcggtttggttatttggtacacatccctctccaaatcaaccgaaactatcattccatcgacagtcactaaggaagcaatttggccaggctcaactcctacgcaaaattcttcctttctttgccctcactggaccatgcagagccatgagattctggaagaaatgttgtcaaatttggtgggatttctcttcattctttttgttattcttgtgggcaggtgatgccgatggattgtaacactgttgccttcccattttggacatggtgatggagctaattattgttccatgtatcttctgagcaatcataaactgtaaagatttcataatgtagtagacagcatgatcgtcaggataattggcaacatctagtttctgacaaggatacgattcgtttaggtgcagccaagacttggatggatgtattcctcttgcatggttttccatgaattgcaggtaatattcaaagactgttaggacatgggagttcagattacagagtaaggtttacataaagtagggttggcaaagactgtactttgcagcaatgaagtttgcagttagaagcatggcagtttggtaccagtttcatcggatgcaaatatgttgaactcgccatcacggtagggctagcattttcttagctgtagtccacaaaattccaaattctttctgcccaatttatggtctcaacagtatcttcgtccggtcacaattcatttgatctgaaaatctgtaccgtgcaggaagaccgttttcatcgatacaacgaacaaactgaacatcataaatattgcagctattcattttttgacgaaatgatacaaaatatttttttcgcgaacgcgaaatgatacaaaatacgcgtgattagctgaacccagctatgacctgctccttttgatttgtcaaatgcaaaaatccagggcgcactagctttcgtgagagcacgcacaggaagatctcgtcagatgcaggacacacgcctgaaaaattattgtacgaactgctaaacatcaactgaaacatccaaaaccccaacaggagagaaattttggaatacttcgattatcttccaagcaatattttgtatgaagaggagtggagccccaacgacaaaatggtcgcacgtcaccgtcggcgctgagacaaaaagtacgcatgcgaactcactactactaccattttgccaaccaaaccaattaacccattcttaaacactgtccatttctaacccgctatagctatcactcttttccctttcattaattttgtaattatctccttctcctgccacttccctgtctctttttccccaacctgtagctgtagctgttaccccgcctgttacggccggaaacccagtgtgcacacgctgcaaccgtgccaattttgtcacgaaccttccaaaaaaacgtaaatttgggcgtcgtttctgcgtacagtgacattttacagaaggtgttctttccgtgcgagttcagtgcgttcagagaagagacggcacgagtgattcacaaattttgacgatttgtccatttggaaaaactaattttacaaataaatcgtgaccaaaacttatttcagaaatgataatttttttcagcgccaaatcatatggcactgaacttatacatctcagcgccacatcaactggcgctgaatgccgtgccaccacagatgggaggctgagtcggcgtgccaatgtgcattcagcgcgatgctatttggcgctgagacgtctaagttcagcgccatacgatttggcgctaataggggtgaaaacggtcacggaaattaccgatcgaccgggcgttgtttccgtttaaggggtaccgttttcgaccgtaccgtttttggctatttttaaattttattttttctaatttctttcagcatcgtattaatgtcgatattaagtagtttaaatgataaatatggtcaattaccggttgatcgagcatcgtttccgaagagatgctactgattctgaccgtttctgatcatttttatccctaggcgtcgaaaaaaaaagtcatttttaaaataagttttgaccacagttcatctataaaattagtttttgtaaagggttaaattatcaaaattttgcgagtgattagtgaacggtgcaacgcgtcaaggacgagtcaacgcgccaacgacctcacgggaggagcagttcggttcaaaccgaacccgccatttttcttctcatcgtctccaccgcgcgcgccacaactaaacccctcgacactttttttttttttgtcgccgagtattcgtcgtccccgacgaccacgaaaaaccgctaggaaaacatatttgggtttcttgatccatccgattcccgatcccaccaccacccgccgctttaataccctcctgcccatccacccctcttcccggcccctcgccgcgccattagcggaaggttttgctttgcgtcatccaggatgggcaatctgatctcgtcgggcgcggtggtgggcgcgagcggcggagggaaggtggtgatggcggacgggagcgtgcgggcgctcagcgagccggtgtcggtggcggagctgatgatggaccacccgcgccacttcgtcatcgacgcgcgcgacctgcagcagcagcggcggcacaaggggaaagctggggctcctcctcctccagggggcaaggtcgcgccgctgccggccgaccacgtgctgggcgccggcggggtgtacgtcctgctgccggccaccacccgcggcaaggtgtcggccgaggaggcgcgccgcgcgctgacggcgtcccggtcgctcgagcggtcgcggtcaatgccgggccggctgaggaggaagctgtcgtccaagaagatgacccaggaggctgacaacgacggcaatgcgtccgagaaccacgcggcggcggcggaggcggagaggagggaggagacggcggcggcggcgaggccgccgccggcggacgggttcgaggagcaccggccggagttcctgagcagggagctgtcgagcagagggtggaagccgagcctgatcaccatcgaggagcgcgtagcgccgaagaaggtgtcccattggctcttctgagttctgacctcgtcgccgacgacgacgagatcaacaggaagcttcttaatttgacttgtcatctaatctctctttcttctctttttcttctttcttgctgatcctctgctgaatgcttgtcaattgtcatcatctagtccgtcaaaatgcatgcactgatgtacgcataatggcatgttgtaatgagatagcacaaatgaaatgtgcactgtaattacaaactttaattagtaggtgtttggaggctgcgtctgaaaatagctcaaattgaactggataaacctctctgtatccatattctcttctttctcttttcccccttttctgctatccacagctctatatcctccttgtctaaataagggtaccattaactctacattaaacgtacagccctgataaaaaccttcactaaactgaaaaaagaaatacagagcatatgccccggttcgttcgctaaggagttcaagtgtacttgcacctgaattacgcctaacacaactgcaacactgtcgcaacaatcgagatggtcagtaataagaaaaaagagaaaagacaacgtaaagatggagcaggatagtacattgtacagactagcgactaccgagagacagaccgaacaggacaaaaccacaacgttgtgcagaattttgccacggctttggaacactggattgttgttggccgttgccgtcgtgcttgcgtccaatgtactgtctcgacgagtagagtagagactggagaggcatacagctgtaggcctgtagcctgcagccaaatactttctctatcctaaaatattctccatttagcgggtgtttagatctaccggtaattttttttctcacatcgaacatttgagcacatacattgagtattaaatattaaaaaaaactaattatatagtttgcgtgtaaattgcgagacgaatcttttaagcctaattgtgccatgatttgataatgtggtgctacagtaaacatttgctaatgacgaattaattaggcttaataaatttgtctcgtggtttacaggcggattctgtaatttgttttgttattagactacgtttaatactttaaatgtgtgttcgtatatccgatgttacacgtcaaaactttacacccatggaactaaacacagtcttataattgaatgcaacgtaatatagtatactacgaatctgaacgggctgtttatagtatagaatatatcacatttaattttacgttattttaagataaatggaatatgcaatgcatgataggataggataagcgggcactgggcaagcgccaaacatggtgcccacggaattggcctccgcttctcgtttcgagcggaagggcgcccacgggctcggaatccagctgtggcaacagagaacggcccacgcctattcaagctgccgacatggtcacatcaggcatgcaccctggaccctggttcgacatgggccatgtgatgagctacgtggaggcccgcacgacggtaatttcgcaacctggcctgcttaccagctctgacatactcctatgcagatgctactctaaaaaaaaaaacaaaaaactcctatgcagatgataatgtttcatgattgtgtttcgaaaggaaaaaaaaatgtttcatgactggattggagggaatatacgatactacgagttctatcacatgtactctttttttaaaaaaaatcgttttgacgacaaattgttttattttagctgcatgtttagaatgcaggaattttgtaaagaaacattttttgcatgacaaaaatactgcccgtccgcgtggcatccgcatttgatgcaatgaaccaggacaagggtgttcaagatgtcagtggacacaacttgctgccgcttgcatcagcacttacctcacattcatatggcgccaggtcatcatcggcgtccatgtgccatcagaacaaatcagcgattataatcaggtccgacaaaatgaaaacaaaatgataaaaaagaagctactgctgcactacaacgctaatctgggcataggacacaatagtattaccaacataatcatacctcatctttaaattttaagacgaaagatgtactccctccatcttaaaaaaaaaactaaacacataaaataataatcccttcgttttttaatagatgacgccgttaacttttggatacatgtttgatcattcgtcttatttaaaaattttatgcaaatgcataagatatgaatcatttttaaagtatttttagtgataaaacaacttacaataaaataaattgtaattatgtaaatttttttaataacacgaatgatcaaacgtgtgtacaaaagtcaacagcatcatctattaaaaaatagaggtagtatatgatctaccctagtaaaacaaatttagatccagatttattatactaacattctattttaggtttggttttttctaatggagggagtaggttcataggcttaattggttgctcaccaagatttggcaaaataaaaagggctaaacataagtgtccttaccaaaaattttaactgtaaatcaagcacatatgcttcaccataatgtcgacctaccagcaggtttcccaaatcgtttggaatgcggttactgccatcccataatttgatactaaaccgcgcagttatcgcgagatataccgtggtttaaacagcaccgatttataaaccctgccttccagtacgttgacaacaaccagataaatttcttctcccacaaagaccggttcctcccttgtggccgtgccgtttcgtccaaagggcccaccggctgacacgaatttgggagaattgtaacgcaacgttctgggattcgaagcaatctccttatcagacaatcatagagatccactgatgacagcaatctcatgggtttggaacacgctaatctcactcaaaattccttaggacccaaattttccgacccgtttgaatgtttctccaagttgtttggcttactccagtgcagtgatcaacgacctaaacttctcccctaagctgcccgattgttttttcctaattagccgccctgatgaaagtatgaaactggagccatacagtaacagatttgtggttttcctggtcagcagcaatacaacagaggacgagaagcaccggtaatgtgatagtgaagtcgtatccacctatcagaattcaaattatagtggtcacaattcacgaatattacatacacgcaagtaggcttttaatatgaatttagtgaaataaaagatgtacaactgatttttgccttttaacatgttttagtagacgagttcgcatgtctgtgaataaatgtggtactccctccgtcccataatataagggattttgagtttttgtttacattgtttgaccactcgtcttatttaaaaaatttatgcaaatataaaaaacaaaaagttgtacttaaagtactttggataataaagtaagtcaaaaaaataaataataattcaaaatttttaaataagatgattggtcaaatagtgcaaaaaaaacttaaaatcctttatattatgggacggatggagtattaccatgtgtgcgtgtatgtacacttcgtaacagttactctctccgtttcacaatgtaagtcattctagcatttcctatatttatattaatgttaatgaatctaaattaatatctatctagatttattaatattaatatgaatataggaaatgctagaatgacttactttctgaaacggatgaagtaaaaaggaaaagcaatatagcatagcggagcactgctagagaagcataactgtagcgtatagccaattagccatctggtggagtccgtgggccatctcgacagagcccgtacggcccacttgacagtggagaagtccaactccaagtctctcgcctgccattacgcgaggacgatcccgaccgtccgtcccctgccaaaccaacggccaccgtggcgtacaggcgctatatatcgcactgaccgtcgcgcagcagcgttcgcctctgtctgtcacacacacacactccagtacccccacgctttcggcacattctcctcgcgcgagaggggggaggagaggggaggggggaggagcgagagcggagcgatgggctcgccggggcatggggatgcggcggagagggacatcgacgatctcccacggaacgacgccaactacacggcgctgacgccgctctggttcctggagcgcgccgccgtggtccacccggacagggccgccgtcgtgcacggcccggtgaggtacacctgggcggagacctaccgccgctgccgccgcctcgcctccgccctcgcgcagcgatccgtcggccccggctgcacggtaaatttctttcccctttcttttttctttttacccgctacgagccccgtcagcgcggtaaaatt

SEQ ID NO: 15345 - DNA, 10089 bp, Oryza sativa
gagagaaaatatattgatgctagccacgcaatctgtgcgggccaccatgctagttcatgataaaatcaaatggggcataattatttattgaaacaaaaaaaatgttgaaccatttttttttgacaaaatccatataagagttttagctagaaattatgaaccaaaattatttatttgttgggttcaaattttgatgaaaactatatatgaatttcataaaagttaatttaaaatttatttacaaatttttgatttatttttaaaatttgtagtcagatcattatattccctttgtttatttacaaatagatcttttacatataagaattgtgttttatcattaaactagcatataagtataagagaggggtaatatagtcaatttcaaaaatatttaactgtcaactcacggaatgggcatagaggagattaaaatgagaactcatgggtatatatggaatgaggcaaaattcagggtacataagggattgaacaaattctcaaaaatatataaagaattttctcttagagtttataaacacgcacagccattgaagaaaaaccgagcggttcataccaaagaaagatgagtattccgctgctcgacaaacaaaattgcaggaacaagaacaaacacgacatttgacaaaactaggaggaatcttgtctcactagctctgcttggctgctagtgctagctatacccactctggcccggatggtcaaattaaacgatggaaagttcatcaagaacaatctgcctcgttttctgtgccataaactacggtttggtcatggtatatagggtatgtttagttcacactaaatttaaaaatttaattgaaattgaaatgatgtgatggaaaagttgaaagtttgtgtgtgtaagaaagttttgatgataaaaaagttagaagtttaaagaaaaagtaactaaagcagggcatagctaggcttggacaatacagtactgtcagcagtaaactatccggtgcaatttttttaagactgtatagtgcagctgtactacagcccagtggaggagtatactggagtcgtagggcaccctggcctttggatttttggttaaagtgcggcaactttcttgtgatcgctgggctcgcttctgagctcagatgcctctgtttccaccgtcttttttccttgctctacagcggcgtgccctggagcttggcgcggtgtgtgttctgctgtagcaatggccaatggccatggctatacgacgctagctttccctcaagtgcggctgattccattccggcagcgtccaaaaccaccaaaatatgctgcagcgcagcaattagcattgctgtagcggcaagcaggcagccgcaggaccgcagcaacgcgtaggacgcaagcgtttttctctccatcttttggctggttgtgggaactgccgaactatacgcctaaggtagactacgggcaggggtagtcaattgccagcagagaagcgaaatactccagtacattgagatttttttttttttgagaacacagtacatagagatttgaaataggatcggaagagtacatgtactcctcactgcatgtctactccgtgcatctagaacttatttcttcctttctttttgttacctcggttattaatggagttcacactcttaactctgcctagctagaattaatcacacatgagtatatacttcgtgcaaatactggtgcatgtaccgttatatacatctcagtggatatacggtagtagaatagtacgtactctctccattttatattataagttgtttgatttttttattagtcaaagttatttggatttgatcaaatttataaaaaaattagtaacatttataacaccaaattagtttcattaaatttagtattgaatttattttgatacaatgtttgctttgtattgaaaatgttgttatattttactctaaacttaattatttttttaaaaaataactaataaaaaaaatcaaaatatttataatatgaaacagggagcagggagtactaagattaccgcagaatcgcagatcaatggatggtgcggatgtacgttttcgtctcgggcgcttatctgatgatctataaatccatgggtcacatcgtgtgctactgtgaataatcttctgcatggttgcttctgatctgggcatgcattgacgctgtcaacaattgtacgactagtatgtgttaacttctgcacacaaggtagctatgttgctgtgtgaagcaacagtaatgaactaggcaactatctaagctaatactctgctatactacataggaacaattccagtacatggtcaaagcacagtttatggcatggaactcgggtaattgttttgtccgtggcatatgcttgttcaacctgagttccttaattccgacatttctattgctaaacaagttgaaggtggccgcgcccgggcaacaacaaacgctaccaaacaaacaatagccatcaaaataatctataaggccatactgtaataacttctattgatacaggaaaaaaaaactatactgtgccactaagaactgagctgctattagctatcctgtgtgcttgaaacttctgcccccgtccccgattatagcaaggagaggcctgcaggggacgcaagcaaagtgacgcaaacgggatattgattcatttccattgataagagattcgtgtagtacacagcaagtacgtgtcggagcccctgcatgagagacacacgatatgatgacttgcaggacgtacgtacgcctgtcgatgtgcccatgcatatgctactactgactacactatactccgtatggatcgatcgatagttcgtgcgcgagcgcgtgaatgcactggccgtacatcgcacggacagtcgcaagccggggatggataagcaagctagcgcggcagccgcagcagttgttaatggcgcgtgagagtatgagagatgctacgtacgatccatcgatctgttcgtgactcatccatatccatggataggtttgtagatgcatccatccaaatgcccgggcgttggcgtgtgcgaccggtggatggatcggcccgtggcgcgcgctgtgcgtgccgcgccgcggggcgcgcggatgccttgcttgccggcgcacgcctcgcgctgctgcgcgcgccgcgtgcttttgcgtgctcccgtcgccgagctacgtacacaggctatacagcgcgggatagctgaacgcgtgcgtgcatagttatacgtacatacacgggtaaatccgatcgatccgctggtcaaacgggaacacatacgtagggccgttcgttcagtatcatcgatcacactgtgtgaagatctccggtgatccagatctgcattgccgttcctgtacaaattattatcattaggcatcttcttaattgggatgaccagcgggaatgagctagtagtaatcatagtcgtgccattatattttacgtatagtacctggcatatgctacaagcttgtggagcatcgcagtttctttaagggcccgatacacgttgtacgtacactgcctctcctgtaagcttgtaactcgtaacagtgtgtggcacagtggctgtaacgtgtgggatcgatgtgtgtggcaatttaagacgcatgcagctcgcgtctcatcgactttactagcagcgcgttgtttcttgtgatcgatcgatcgatcgatcgaccagccgttggagacaaacagaaccgtctcagcgcattaacgtacgcgaccctagcagtacgtacgtatgttccctgttgaatccactactgcgcagtacgtacgtatgccgatgcgcgtacgccccgttgcgtcgtccgcgcgcatcgacaccggcgctacagtatatgtccagccgccggcggcgccgggtgaaattaaatacacgcagatgtggtagctcgagttgcaatctgtacttgtcgatgaaatcagagcgatatcctagctacagatcaagtggactacaggaggagtacgtacgctagtggtaactgagtgaggtacagtacgtacattagtggtaactgagtgacgatttattgtgctttcactttttttccttctgtctgtgtcagctagctaaccatcgatcggtctttcgaataaaaagcagctaatcctttgtttgaagatgtgaaagcgaagtcccgttccgttccagcctagcttgacactccccgtcccagctcctgacaaatgtggcataggattccccaattcgacagcgacgcacgcacattgaggaggccgctagctcttcctctatgcgtggctccatcgcacggcgagcgattgggtcgtggtacgtactccaccgaggtaggagtagtatcaccgtatcagcgcgcagcgcacgtacgtacatgcatccgctcgccgctcgcaggcacatgcattgctggctgtaaagtggccggcgtgcaccgtggggtatccgcgacgtgtcgcgggcttattcgttagttgccccaggcctttgggtgaaaactgttcgctcttttcttttctttgtttttgtttttttatctgtaatactcctacacggccacacgggtgtaaatcaaggttgtcagtatcccgatacgtatcctaataccttacgatactacgatcctactaaatcgaaacgataccgatcccatctagtatcttaattttcataatttctcgatcctactattcattactacacgatcctacgaaatcttaggtggtatcccgattcgatccctacgatactacaaaatattatttaaaataatatggtttgaaaataatgtaaataaatatgctcaatttcttataaaaattagttgaatatattaaaaccaacgtggtttctcttgataaatgtctctatttgcatggaatatatcattactatatttttgtaatatagaatagctatatataattaatataaatattaattaaacttaaaaaaagaaaatctcatagtatcccgatactacaatacgatcttacgatacgatattactttgagaaaaaacgatattatctagtattccgatcctgacaacattggtctgcttgctaccatcacggagtgaaaaaaaaagaataaaaacgtactcgtaaatatcatgattgcttcattgctagtaggcggatgaaacagtgggagggttctgatgcagcggctgcggcgctgcgccgtgcggggtatgtggcaggcaagcgaacaactgaacagggcaagccccaccggcgctgttccggcgacccggccgccgggccctgtgggtggagggcacgtgacctggccccagcttaagtacgtccgcgtggagcatttaacacccacgcgactgctgctgccccccctgggccgggccgctcacaacgccccctggtgggcccgcacgctgaggctccggcccccaggccccgtcgccttgggcccaagcaggatgccagcataggattggacaggtgatgtacacggtaagagcgataaattctgagcgagaagggaacgcggcattagacgaatgtggtgagtgtttgggttaaaaaggtactagatcgatccgagtttggttcacgacgacgctagccaaagctattaagcgggtacgcgcgcacgatgtataatgcagcatattgttatactctgctgctacatatagctgcagatcgatgccctggatctcgaatacgtgcgtggggttcacgaccgtgtggagctcgagcaacgctacaacagaggtagctgtgcctgtgtatgtatgtgttatacgccctgttacgtttgtctggatctcgatcgtcgcgtgggcggatgtactgtgaggctgggcggttttcggttttcaggtggacgacgcaggcaggaggcagagcggctcgcgtagatctgggaaatgattggccgagcgtcctgctcggagttgggcaccggcagcggctggtagctagctttggttccatgccgccaaccaatcctgcaacgagtccatccaactctcttctcaaacgcccccgatcgacgaggcgttttgttctgtcacctgcacagctgcgctgctggcctgcggggtcggggccgatcggggcatgtgtgtacgtgagccccgtttcgcgtcgtcgtcgacaccgatcgagatgagcagcagcaatagcgagagcatgcagcagatgcatgcgtagctaagctagctaacttttggcaggcaggcagtacaggccggaccgcgggagtcagggaggagagtgatgctgagtagtatagtgagtatgtggtccagctgcgtgcgtgacatgtcaagttgtttcagcagtgcaaccactgtgcaagcagctggaccagtacacatacagacaggcatgttagacgccaatgttacgaagaaaatatcgtcgattgatgatccaaagtttagcgctggtttaccaccatgttcgcgcgcatctacgcatgcagagagtagcgtgtgcaacagcgacagcgcccgcttaatttgtcccttggtacgtactcctgcatcatgcgtgcactgctccaccagctgattgcacaatggagaggcaaacagaaaataaagcgggttttagaccgtggtttttgttctcttctcccagatgaacccagcctgaacctgtgactgctccatagtttcaccatgcagctggcatttgggctcccagtcccaattggccttctcatggcgcgacacataggcatggccacctaatcgatccatcaagagatcccttagcttcaaacttactaccttcccttctttcaactgtaaagttgcttccatgatgctggctactggtctccactgctttaatgggttctattccagctttttcccaaccatacatatactatacacttatacagtacccggcttttgaatggacgcatttgcatctggatcaaccaatgcaaagtctgctcaggagcaatgctgaccaatcagccaatcgcccgtgaacaattttagtgagaaaagatgaaaccgggatcttatccttaccataattattgcagctttataaagatcataccaatccaataacctaatcagtatccctctctaaaggcaaaagggaaggtgagatcttgatcaggatggtcaatcacccaatgatattgctggttacaaggcaattagggagggcatgatcaacatgattatgatgacctgttttgagccacaagaatccatggccgctatcaggacgtctgtaaaggagactacataaccatatcaagactttaactttatcccactttgaagaaagagagtgtgagagaaaaataattacaactggattatcaaatgactcatgcatgttgaacatgagttgagttttgaattatttgtagcaggttacagaagtctgatataagtctcaaagtggattacagctgaatttaatgattaagcatggtaaagattgccacaagatccaaggctaaagggagtaagtgcaagaaagtatatggtactggtccaattgacggctcatgtgcatctgtggccagatctagataggtacaaaatacaaatgtacaatggtacacagaactgagaaaggtgggcagattgtcctagatgatggattttgacctgtcaagtagtagatgccttcccgttgctttatgcgttttgattgggtcatgactcatgagacatttcaagatctacacacagattttctttacaagctatatatttttcgttcatgaataatactactaaaaacatttttatgtgcccgcttagaacacatggatttccaatgaaataattcagttcgtcatggggcagaaaaatcccagcggtttgtcaatgcgagaattgtgccgatgcaaattggatggccaggaattcttacacggtgtgagttagaatcgcaaacctaaatttatcagttatatgtatttagagttgtgtatactttacacttgtattacagtcggtggccagctaggcttgccaactagtgcaatcgtgtaaagttcgccactctgtcaatatgtacctgctgcccaacaaatgttaagggcctatttggtttgattgtcacggtgaccatggaaaaatgttggcaaagaaatcagagtttcagggacaacttggtttgatactaaattatgctaagtcattcgcctttttttttcatccatttttcagatccaaaaatggccaagacatgggcagtcaacttggcccctgattttggtttcccaacatttcgcctagctttcttgggcttccttggagccaaactaagggcctgtttggtatagctccaactcctaaatttaactccaggagttgggtctagagtggagttatggagctgcctaaacccagctccacaactctagttcattttgtgagaaacctccacccagctccactctcagttttggtggagctaaaactgtttggctgagctccagctccaggaggggtggagctggagtgtagctgaagctggagctgtgccaaacagaccccaaattatcttaagctgtagtagtacttgtctgggactatttaatcacaggatgcctataagcaaagtctgggctaggctggtaaaagaggcccagttcggttcgggcctaaaatatctgccaaaatctgggccggtacggtgaactgggcctaccgtttttaatccattctccggcccagctaacttcaacaacacaaagcccaaccgctgtaccaagtgatatcattatcaatttatcatgacaatgttcgttaatccctttttttagataatggagatatcactgagcaatggttaatccgttctgaattctgatagacatagaggctgcaactgccagagaggctaatctgcaaatgcagagttgctgggctgtttctttccacctacgatttaggacaggctacaacactgatcttagtccacctgtccccttgttgcttcgaggtctccagctgccgctgcattctgatatgcctgtgagtgacatcaacagcaacaatcaagcagagaatgggccatgcctcgtggtgttttgcttaaccatatgtctgcaaaaaaaaaaaaaagttggggttttgagtttttacctcgcggctcagcttgatgcgcaggttggcttgcgaggagggagctggtgatgaggcgttctctgaagataaaaaaaggagagtaaaaataaataactagtatttttcttttaaaatttcacagccaacaattctggaacagtcattgttttactgaaccttgagcttgggcttgagagtctcaaccgcggcctttgaaccgttgctgtttgcagcttgctgaaggaactccaggatacagggttagattcagtctgatgacatgcatgcctgaatattggactgatgatttgtcatttaccttgccaagaacccagtctgcggaatcaaagtaggcgcgctcatggtcctgcattagcaccaggccatgcagccaaaggaatagctcagattcgctttcagatatttatcatatactagtactggatagtctagatgctgcatttttttgaactaactactattaccaaaacttgcactcccatcagactacatactagtactacaagatatcggtatgttctttatctagtgagttgaataaaaactgaaaacttgatacagcaataaataggatttgaacactatgaaactgtaagactgacaaatggctacaaaatttcagaaactgtatacctttgaaatcagaggcttctttggtgcaatccctccatacttcttctcaatgcacgcctgcaattcaagatcacactctttcacaaaccccaaacacgtgcagaacaaagagaacacccccccaaaaaaatcccatcttgctctgactgaaagcagccggaaacactgaactttactccggtgtactaagtgtaccagagatgaggcttatccgttcgctcaagaggccaagagggtcaggaggacacttcacttctcaatgccggtgcagtgcagacacagacgcgggcttgtccacttgtccagtgaaccgaacgacgtgacaaacacacacacaaaagcaca

SEQ ID NO: 15346 - DNA, 18518 bp, Oryza sativa
ccgcatggacggccgtccctttcgatcgcctcaaccaagcggaggaggaggggagggatcacgcttatgagacccaacaaaatctgcacagcgttttgcacaccaccaccatcgtgtggctgctcttgatccacccaaaagcaacatgtgaccgatcgatctagcgatggcgatcccctaacaacggagccgtgacaacgacacgattcctgaagccgttgagcgcccccggttctgttcctaccttcgctactgctatctctcacgcattgcccatgcagtattgcagtcatgcagatgctggttagttgcagtgttgcagaggtgagattcgcaggatcggtgaaagaaaaaaaaaagcagtggagaaaaatgcaggtgttaagtagtagtagtagtggtcagtcatctgtgttcagagcctcagagagtgcttgcagtcaaatagattcttgggttggaaaggagattaagatcaggttgaaagtttagtttgcctttttcgtcattcattccttgctggtaattaattagttttggtgtgtgcggctaaagtgatttcttctagatgcatataaatctaaagtagtgcgggtaaagggtagtaattgatagtgcagaatctttaattgctcacaggttttggagagttggtgttgaggacaagttaattttggtgcacgttaggtaatgttctggtggttactttctttaaacagattaaaaattattaactagttaattaagttcctagttaagatagaattaagacaacggcaaaggaacaatggtgacacaacaaaaaactgaaggtgatctttactgacgaattaagcacagttggggtattaattctgaaggcaagactgttctcattttccattagacagaaaagagagacaaaataactctacaggctcagggtcacacttacctcttcctccattgaagccaacgacttagcttcatcacagcctgccatctcctgtactcctctctctgtcttctctgcaagaaacaacaccacaactttcagttcctgactaaaaacataaaagattaaacaagatggtgaagcattttggcctgaaaaggagaaggaaacaagtgcaggaacttcttgcagaggtacacaaatgctgtaagagatgaaaatttcaagctttgggtgattaagagagacaaagagttaaccttgtgtgctccttcgtcagggaagatggagaggaggttatgaaaggcaaggagaaatgaagtgtgggcagagctgaacctgatatttatagagagcttgtacgggaaaccaacgaaggcccggtgcacaagatacatgcttactgtatgttagtacaagatatgcatatattactcacgtttctaatccagacaaaagtatcttttctttatgacgctaggagcaaatctaaagctggcactattcctcaatcaatggatagatagggaagtcatcacacatcccatccaaaagtttgagttgatgaataggggcggaaaattcactatatactttaagcaagctgcaagcctaatatatatgtgcaagttttatagggttttaggtgtgaaatactcctttcgtcataaaatatagacgacatggagggtctataagttaattctactccctctgtcccataatataagggattttgagtttttgtttgtaccgtttgaccacttgtcttatttaaaaaaattagaattatttttttttgtgacttactttattatccaaagtactttaagcacaattttttattttttatatttgcacaaattttttaaataagacgagtggtcaaacagtgtaatcaaaaactcaaaatcccttatattataggacggagggagtaatttttttaattgcatcagctagaattcaaacttaaaacctttttggctctaatacagtattgagtcgtatgtactagttagtttgtttgaaagttgcggatacacggttaagaatggactacccttcgattgtaaaaatttacaatccatcatttagccttcagtttttaagcacaagaaagaatttgaattttaaatcccttccattgtggaaatttacaacccattgtttagccttttgtttataaatgcaagcaacaatttgaattttaaaacataattttagagtcgatttcgggttttttttcattgtattttgttttctagcatttcttttaaattactaagaacacatataaatatttcaaaattatttttttaataataatccattttgctgataataagtataagcataatgacgtggttgttatataccttgtgttttaataatttattatgtagcggtcatgttattaaaaatcacacaattgagtagtctttaaccatcaaaagcaaatttatttttcctaaaaaaaatgttcctaaaagattgtctttttagcttgaaacattgtctacaaaattagagtgaagtctaaatttggttgggtacatggagctggatgggagatggtcgtccaatttttatagtgttttgttagatgacagtgtgggtaagacggtctagaaaaaaaaattctttcaatatcctccatcgtccttgtctcatcctcctccttttttcccctccttgttttcttcccatattaaagaagggtatagtctcttgcatgctttttgcgcaagattgcttggtctcgcactctccccacgcgagaccgctcggtctcgcgccgtccccatgcgagagcgatcgcgtcgccatgtccacattactttcgtgcaacggttcagcgataccgacggtatatttatgctaaaaaaattgcatccataatatttttgagaaaaaatgaacaatatattttcaaatttagttccaaaaatggcttgttttcatgactggatagaataatggcgtgtttgagacgagggaaaagaactagattgagaagatccatacgcaaactaaacaagatgagctattagcgcatgattaattgtgtattaattatttcaatcttcatgtgatttttaaaataactttgtgttgagaaatacgtaacgtttagtaatttgaaaagcatactcgtgaaaacaactttttttctctttctcataagaacgaactcagcttaatataatatttttttaagcttatgaacttatgaattatgcgtacatggttcaccttagggggtaatatgaacggttttgcaaagtttagggagctggatgtccagttttaaagtttagggtgctagatgaacttctatctaaagtttagggggtacttggactttttcgttttataaacgtggttaactaatgtgtgcaagtttgttatatgagagatttggcgagagacatgtgagatcgttacagatctaatcaacgagacatgaagatttttgtgagatgtgaaatctaggcgtgcgcacgccaggtggatctaatagcggacaagaatatatgggtcaagccaacaattagaacacctgtaaagctataaaatgacctgattctagtaaaaaccctatatcaatactactccctccatcctataaaaaaccaacctagtatcggatataacacattctaatactacaaatttagacatacatttatctaaatttattgtactagaatgtgttatatctaatcctagatttgttttttttatggagggagtactaattaagtagatgtggttatgtatgggtcgactagacatgagtctacttaaatgctcagaaatatcagttgattgattggattcatttcgaatggttgtctatcattctaacctcaagactacgaaatgagaaacatgttctttattctctctttctcatgtcctgtgctcatatgattttacggcattacagtcctaattaaagaccggattctacatttctggtaggtgaaatatacaattttacggttcttttatatgattctataagtgcaatcctatctggagacctctaatctggttcagggtcatgatttttaaaaccttgcctatgccgaagagtttcccctgctcttgttagctcaagccgccagttgcacagccgttcccgcttgccgcctcctcactcagtttcacaacaactccaaccctacccattgctaaactttctctgtttctcacccatagctcagctccgaagatgcctcaccgtattgcctaaatattgcccagtccgccactgcctagagctacctctaaaccttgattaaggtggactctcttcccttccctccccctttatctcacttaggtgattaatgttagcaaggtgatgcataacttcacccactagaatttaaatcctagtagccattaatatgatcgtgtgcatccttagttagtgtagagattggaagttatactttcttttattaaaaaaaatgcaagggtatataataccacaacgaattaggagtttctcaataagcttactgttctgtagtctattagacttctcttctccattgtttattttcagttcacctttgccctaggattccaaaggcattcttcaatcgctctcttccaaattctcttgctttcttctaccctttcttccacctcactgtaaatccaactcaatgtttcctagcaactttgcccatatggctatatcctcatggattcttgtctctgcagctttcatatatattctcccattatctaattcgcgcatgctttgtctccccttatccgtgctccgtgcatgccgcagtgtctccggatggttggctgctggagctttgcctggtacgccgacaggtcaaaattctggtgagtagctatcttggtgtgtgtcttttatgtgctccaaatcttttatatatgatccatatgaagttataaaacgatagtgtcggcatacgctagggagaaatatatgtgtgcatgttatgtgttatggtcattttgttaagttgtgcgttcgcaaaatgaataaatgatcatttttgttgtgtggtttggtagggtaaacccctatcagtcatcctggtgtaaccctattaacaagagcgattagctctcacagttaaattacacacgcaaagcaaccgatatggcgatcttggaaggcaagctacatacatcgatctatctgcagagtagttgaaaacttgaatcggataacaacatcaaaagtccgtactccgtagcttaagctagacagagagataccgataatgcatcgattgagaatgcacaacgtttggcatttcccctatttgtaggggaagatatgtgtactcagtactcccttcatactcgcaaagagagtcatttaggacaatatttaagtcaaaccttaggaatataaatcatgaataactctaaagttgttgagtttgaaaatgtaaaaatcatatgaatagatttgtcttgaaaaatactttcataaaaatatacatatatcactttttaataaatacttttataaaaataagaagtcaaagttgtgtttaatttggagaccgtgtcgatgtcctaaacgacttcctttatgagtatggggggagtattaggttgagcagaactaggcatatacaacaactaagatggttgttgtctacaccctccatcccatattataagggattttgggtggatataacacattctagcattaagaatttagacagagccttagtactaagaatttggacatgggccatatccagattcttaatattaggatacgttatattcacctaaaaccccttataatatgatatggagggagtaatatatttctccgatggtctattgatagcactagacagtacccataaaataggctctcgtagcaactaacaaaattaatgcgagttaatcaaattcagattagataatctattcagattagataatctatcactttgtttcgttaattaggattaaactttgatcaataattgctttattaggatatttaagtgataaaaacataatcggtgctcttaatagagtaatggttggtcaaagtttagcctaataagacaaaatatgacctacttcctccgaaaaaaaaaagacaacctaggaagagatgtggcccctcctagtacaacgaatctggataatcctctgtccagattcattgtactccttttttttttgagacggaggaagtatattttttggatgagagagtacattataaacatagctataaaataagctatgacatttattatggagacctataattcctgacggtaattgtgaaaaagaaaaaaatatttgcaccattagatcatgatgggtctagattataatggcatatattgattaataagttatatataaatacaaaagctcaaatttgtatatcaaatcaaactctactttttagaaatatacaaactataactgtatgaatgaaaacataagctaacaattgtatataatattcaaatatattttcaaaatttattaattatgtagatagaaactgcacttgtatttatggaaatagaaggcaagggttatatatcaaattcaatttcatctttatatagtttcgtgccatttgctcaagaaaattctctaattatattattattatggtagaaaaaaagctgccacatttgctctggggtctaaaaatttgcacgttgattgaagaaaaagataaatacttacacaaatattaggagtcgtataccaaatcaaattctatagttagaatatattgtatacaaaatataattattccatggatacataatctcaaagttacatgtcaaatacaattcaactttaaaatctattagctccgtgtaaatagtgctaaaaaaatccgctagttgctttcagatagcgctgaaaacgacttatgtcatcaaatgcaaattagcagaacaaaacagccctgattgcgtaatttcggaatttcaatatcccaagaagaccatcattaaggtagaagatattatcgctctgctttctttctgccgttcctttgaggagcaccattcaccaaagtgaagaatctttacgtctcttttcctccgagtcctctcttaagtcttaacgtctttctcgcctcactcaaagtcaaatcttaccgtatccatagactagacccaaaaacaactggacggaatatatgttctgaatttctggaggacatggtggagcccacacatctggtttcagatttgccacgtcgactcatcatatatatgatcaaacttaacattgaaactgtacgatgtcacgcgtgtgaaatgtttgggggtgtgtgtgtgtgttagtttttagttctttcagactcatttaacatctggttcttgttcttcgaccaaatgcggaatgaatttgagcagatttttcagtcttgcacttgctctggtataggtaattcgtgcatcgccttacggccttaccgtatcaaggttattatttagttacaagaattttagtatttttaggataataaaaatattttacatctccggcatctgccgttagacatataatcataacaagcattttagttgtgtgaatcatagatgtagagataatataattcatcttattaaaaaagggagatcgattcagtatccaagccaaaaattcaaaattaaaaccccacaagaggttcttccaaatgcatagtcattctagaaatttaatttgaacagaattaattctcaactaaaatgttttagaatgtgttgcaaagacggcgtgccaacgggcgcgctactttttctagtgtgaaactaaccattgaaaaaatataactgataaaaacatgaccctttattacataacaagaaataattttataaaatactccctccatccttaaaaaaaaggcaacctaatattagaatgtggcacatcctaaagtagtttagattcgttttactaagataggtcacatcgtaatatgagattggttttttttacggatgaagtatatgtcaagctaacctgtagcatttaattatcttataattagataatagaaaatgatctagtaagtttgaaactatgagggagtttacagtgcgctggacaattttacagattctgggctgctatttaggatgaggaacttcgtaagtaacaagtctcatagtgcgaaatccctatacatattatttttagtgggtcccacatatcacaagtcacttttcatcaacccctcctctcctccctgctttctcctgataaattttgaggaggttcggtggccaaataaagctctccgttcttggctgctcctccctccataccgatgatgccacctcaccgccctgtgaatagcttgaagagacattttataacagcaacactagctccttttcccgggtcttttcctgcctgagagactgagagctgagaccgctggctgcttgagggaataatatggcgatgcgacctgctcttttgacgatggattcgactgtattttccagctgtgctgtcgactaggaatgctgtccacgtcagcgccgcgccgtggcgacaaacctctggacttggcgttgcatgttgttgcggactgcgcgaggcactgcgaaaaagaaaaggcacttttgcgctttgcttaggaataggatagcaggtacagtggagatcgaggttgctggatgacgtgtccttgcccttgtggcttagtactgctgccgaaaattgacacgttggtgattggaattggactggctgctcatttcggcctagctagtcctcttttgacgtcgtaggccggaaagcgaaaggtgaaaagatgccgtaagcatcacctaacagtatctctaaatgaaacccgattttaaaattaagatttattttatgacaaacttgctccaacagctttcttagagaagtttctggaaattagaatcccttctcctcctttctcgccctccacaaatggggagacgctcttgctcccaatttccacaccaaaaaaggaggggcgccacgcggagagatcattagcgcgagaagggatgggcggagttattttttatttgtgtatctgttggtagttaagaatgggtccactttttatagggagttaatttaatgtacctattggagataaacatcacttacatcttaaaatcaaattaaagattccaaaaacagaatgttagagacagatttttgggtatctgttgggcatgttctaagggcgttcagcctgagtaccacatcatcaattccacgtcatgtatgcttcacctggtgccaaacgaagaacacagaacctaacaaagacccgcgctcctcgtcaatggttgtcagagcgggacagcctttgcgcgttgctactgctgacaaggtttcacgcatggcaaatgaagagaagggaggaagggaagatggcagtggtcgagctgttgccactgagacattgtcttcgagccgttgccgccgacatgctgccatcgcccgaggtcgatctgaagccacctctctcgatccgcgcaaccaatggcatggcaccgccagcaacttggcagccaggggagggggatgtgaggggaccgagcggaggtgaggatgtcgtcggctttatcaggctcccaccggatcccccaaggtcgccagccgagagggagctgagtccgagccagatatgcctcgagctccaatccggcgggaggataggagctcgacgacggttgggtgtggcgtcgacaggagctaggcggcggttgggtgcagcggcgacaggagctcgggcacaattgggtgtggcggcgattaggtgtgaaggtggtgaagcggcggcaccccaaccccgacggatggatctggctggcccgtcgctgctctgcccggtgccgtcgccgcttgggccactgcgcccagcgccttggcttcatctaccggtggggaaaggaggagaggagagagaggggggagatgaagagtgaaggagggagggagggggagggtacttgtgggatccactgtaaataacttgtattatggagcatgtagctaaacatgttcttaatctatgtagtatgtgaggttcagcaaatctggagacacactgctattccctaaatactgctcttttagattcaagtaaattaggcttgccgtacacaaatttaatataatcatattaccttcattctctttcgtatatcatttttcagctgagggcatacttttttctcaatgtaacatagatacatcatgaggcaacaagacaagggtgaagtgtgggtattggtgatcttaagtactagaatgagatgtgtgctctagctaaggcggaccacttatttgattttgaagcaaaacacactcactagccaagttgctatagcaatacgcttttttttttcaagtttcgatttcaaccttactattctaacaatctatcctcaaggcacttcatcctgacgttgccgtcttgtagcagtatagtactcataggttagcagttgagatagcaaatcaacacaagggaacaagttggcaacagtgttcattcacctgcttttgtattatttcaagctctttaaaaattcactcatcaggatcaggtgtgttcgtgatataaaaatatgagtatgagattacagtttacaacacggtcctaaaattcgtggcaacgatgatgtgacgatgaccatagcagatacagtaacaagagttcagttcagagcgcagcaaattcagagagctcaagattgatgggctcacatcctgctcttccggaccgggcccaattccttggccttggccctcagctcgtgcttcttgatcttccccgtcgccgtcttgggcagcggcccgaacacgacggacttgggcacccagtaccccggcagcctctcccggcagaaccgcatgatgtcgccggcgagtgccgcctcgtcggagctgtcggcgccgtccttgggcgtcacgaacgcgcatggcgactccccccactgctcgtcggcccgcgccaccaccgacgcctccagcaccgccgggtgctggtacaccgccttctccacctccaggctgctgatgttctccccgccggagatgatgatgtccttagccctgtccttcacctcgatgtacccgtcggtgtgcttcacgccgaggtcgccggagtggaaccacccgttctcgaacgcctccgcgttcgccctggggttcttgaggtaccccttcatgacgccgttcccgcgcatgacgatctccccgagcgtcgagccgtcggcggggacgggcgccatcgtcttcgggtcgacgacgtcgaggccctcgaggcccacgtagcggatgccctggcgggcgtggaggcgggcgcgctcgtcgtccggcagctcgtcccactccggcttccacgcgcacaccgtggacgggccgtacgtctcggacagcccgtaggtgtgggtgatgcggaaaccgagcttcgacatggacgcgagcaccgacggcggcggcgcggcgccggcggtcatgacgttgacgacacgcggcagggggaggatggcgtcagccggcggagcgttgacgatggtgttgaggacaaccggtgcaccacagaagtgggtcacgccttggttggctatcgccgagaagatggcctttgctgtaacctgtgatgatggcgaacagaagtgttagtgaatcaatttctagtttgctactcctagccagcatcaaccatcaagcaggtaatgaactgggtaaagtcactaggcatgaacaagagtccatccccaacctaatctatggtatcaaattcattcatttattatcttgcaacttatgactgcatcacaaacaagtccatcaagcacacctagtcctaatgtctgcatattcatttatctgggaggcaaggaactgatgagcatttgtgtactgaaaaatacccccatgagctagcagtacaatagaaagatgaccagaaattggcttcttaaatttcaagatatataccaactgaactaattatcctgaattccaccctggtattattgcagtaatgcatcagttaacaggacttgattttcatgtttatatgtctttcacgtaacaagtgaacaacttgtaccatttcactgcaatgctctttagagttgaaaaatgaaagtaacattgataatgtagtatcaggactagtttaaatttgtctgggagtattcatacttgaatgacgcacttttaccaaaaaataattcattgcctctagtccttatggtaattttgtagacatgaacatgttgtgaaggttattgcgttaatctaagtaatatatttgctaatgatatgattgttgtctcatacttactattcatataggttcgatagaaataatgaataggtctcaggtgtacacttgctacttcagttttgcagattgttcatgttccacatgaatgctcgagtgataaagttcttactgaagaagttctagatatagcatagcatacctgacgaagacaaatgcttgttccacaaagagcagcaagtgtccatgtatagcaccagccattacagtggaacatcggcaaagtccacaaataaacagcgccttcattcattccccataccagagcaccactcagtgacattaggtaagcacccctgtgatgcagtaccacgccctttgggttggaagttgtcccggaagtataacctaaggcaatactcttccattcatcctgtggtggtttccaggcaaattcaggatcgccagtttccagaaactcctcatactcaatggctcctttactcaaagcacttttgagggacacgggatcacaagtttgatcaccaataacaattagaagtggctgtttgaaagctcctttcttttgctccgcaataatcctcagagaatcctctgctagggagaaaaattcctggtcaaccatcacaacttccgctgatgagtgctccaagagaaatgcaacagtaggagcatttaatcgaatgttgacgcagttcaccactgctccagccattggaactccaaaatgggcctcatatactgctgggatatttggagctattacagctacctaaaaaaattagaagaaaccagtaatcagtgcaaatttgatccaatatgttgtgtgcatgcaaccacagaggttttagctagcacaacttagtcagatgaaagtattggagtatcacataagaagatattattgtctgccatatgatttctacaataatttgcagcagacagttgtaatcttctcatgtgcatccaatatatcttactggatttggaaggttcccatttcccatcagcatcaagagaaagaaccattcagtttccattgagacatagcatggtaaaaacctaattttcgttttgacaataactgatatgttcaatcttagcatgtgtttgttcaattaaaatgcataaaacacatgcattggaaaaaggacaagttttaggatgcacacatctgaggactgaagaagcacattatgcatactacatctaccaccagtctaactacatgatgggacctgccctctgtttttctcggcctatttagttcgcgaaaggaaaatttttgggtgttacattggatgtttgaccagatgtcggaaagggttttcggacacgaatgaaaaaactaatttcataactcgcctggaaaccgcgggatgaatcttttgagcctaattaatccatcactagcacatgtgggttactgtagcacttctggctaattatgaactaattaggctcaaaagatttgtctcatgatttcccccttaactgtgcaattagttttttttaatctatatttaatgctcaatgcatgtgtccaaagattcgatgtgatgtttttaggaaaaaattttggggaactaaaccaggcctaaggaaaacagtagggcaggatctatcatgcatatcatgtgaagatattctaaatttcttcttggtccgccatggattaccatggcaaactcatgcttgatagttgatagtaatagtctttaaaaatcctgttatttgtgttaatccaaatgctccaaagtccaaactgccagtataatggcatccgtataaaaaaggtttattgatacatgatttcaaattgacaaaaggcttcttcagtacgcagattctgatgttactgaaatgaagtcccagcattgggaggtgaaagggcaatatattgctgtccaatgttatctcccacccttcattagaaaaataatatgctgcgtttgaaacctgaaaattgatttccccaataataagccttctcctttattgaaaaacaagtcttttttttgtgttcttgaggggaaaaaaaagttgtggcacaaatttaactttttactgctgccaacttggaagcttcatgtgtttggggtgtttgactttgacatcgccatctccaggattacaggggcacacagaacagtagaacactaacaggaacaagtagagggaggcggaaacgaatcggagaacggggaggagagtgggagccgtaccgtgctcccgtggccgacggaccggcgctcgagggcggaggcgaggcggcggcatcggcggtaggtgtcggcccaggtgtagcgcacggggccgtgcacgacggatgcccgcgccgggtgcgccagcgcggcgcgctccaggaaccagagcggcgtgagcgccgtgtagttggcgcccccccgcggcaggtcgtcgatgtccctctccgccgccatccccgcgatgctctctctctctctctctctctctctctctctctctctctctctctctttctctctctctccgcacgcacgcattcgtttggggtggcttggttaggctttgactgggcaccggtaagccggacaaatggaagatgatgccccaatggttttttaatattcgttgaaccagcgtgccgccaaccaaggccaataagaaccggtggctggcctgccgaaggattctggttgttggtgcccgggccgggaaggaattttccaagtttttggcttctagggctcagcgcgcggagcccgacagctcgcgcggggtggggaagttgtgaactggtggtggtggtgggtccgtgaatcgtgtgagttgagaaattcctgttgctttttaacgttttttatgtcgcctgcagacggggccggcgggcggcggctagtatggagatctcgcttcattggtgggagaatgcccgcgcgcccatgccacccacccgtgtgtgatgcacgatttgcaggccacgtctcacgtgctgtcagtgcacccgtacatgtacaatagtattcccacgtcgattttgctatacactaccccgtctcgaaaaaaaaaaccttaacataaatctgaactagtatgtatccaagctcataagctcatagttatgattgttttcttttttgatggtggagtatgtaccaacaattatttttataaaaatttaacaaatataaatatagtacaatcacaatgtaattatattgtaacttgcatgtaattgaacagttcgatttgcttttaaaattcatgtgaggggattcggtactattatactttcgtataatggtaggaaataatcacaacccatgcactaccattaaacctttgttttcacgaaaatagcatgtcacctagggatttttaaaagttacatataattaagttacattataattacaagcaatttataattaaattatatcacaattctacttatatgtacgtatgtgaaatttttgaattaaaatctgacgacaaatgtatagcttatcctattttctgaaaaatatgagtattcaagtgaatatccatgagtccccttggcccgtccatgtggacacgtactggtatttcctccaaatgattttggagttactaaatttatgtccatgcgctgcaatagaatcacaagatagaaatatgattcgctttttttaatgtctgtttttcacgatgggttatgtttctatggctttttgcagtttttttaaggggaggggggttttgagaggaaggaggacgtctgtgctttttaagtactactgtactagttaagataagatgaataacataaaaataaaaactaccagtacacccttaccttatcacgtatttgaatgggtacgaaagatgtttaggttggttgtaacagaagtttcaatatattggcgcgctggttctacaagggcgtacgtgaagctacataaggcacatgtacttaaaataagtcaacaattgaagtttgactagtttgatcaatttattagtcctgcaattttagctataaatgattctaaaaggatttttctttttctgaattcatgtaaaatttaaaattcataagcattttagtgtcacgtcatccaaaattatttttaaattgtcatggttgtgcactgtagaagtttaggatcaaaagttgtctggatataaagttcatattaccttttaaatttgaaaaaaaaaaggctataaataaatttccaatatataaagcatattcaggagaactagttaatgcagagctgcagctacgctacagccgtagctacaacaactgcagcgggctgtttgagtgggctgtgcgcaacagccttgcacaatccaaaataggggtgaaaacggagcggattcaggcggatagtggtaatataattttttccttaaaccatattttttaagcagatgaaaagcggattgttttggatgtcggaaatagtgcggagtagatgcggaatcggtttggaagcggattaaatttatcggatgttacgtgtatgcaatcaatacaatatcaagttagcaatacaaagaacaataatatagtaatcaaataaacgacccatcgtaataattacgtgcttaagtgctaaacaacatgaatacatgatgtccataatataaaaatacagttacgcaagtgtgatatgagacagtaaaagcctcaaactaagaaatctaggttaattgatgaattatgccattggatggacgaacttatgttatatgcaacagacaaagtggttacatgtgttgataatttcggattatccgatgaaacgtcatataggataattcaacagaaatgtcggataatccgcatccgccggattttagagataccatattctcatccgcatccgcatccatatccgtcggatttctaaaagctcataccgtatcctcgtttcggacggattcggatcagatattatcttatccgttttcaccacgatcccaaaatgttgtagcttggccgaccaaacatgctgataaaaatgccagtcaactaatgtatggcttacttcattcattttaaaataagtttttttttcataatactacatccgtcctattttaagtgcagttgtgggtttccgtgtccaacgtttgaccgtccatcttatttaaaaaaaattatgtatttttttataaaaatagtcacacataaagtgtattaatgctttacgtatcatctaggaacaataaaaacattaatcataacaaaatttttaaataagatatacggtcaaacattgaaaataaacaatacaaaactactatctttgagacagaggtagtattattttgttcatcaatcatctacaatttaaatttcttccatcttagtatcttatccgaaccagtatcccactattaaccacacccatttaataaaggacatataactttttttttcgaacaataatctttactaacccattaaaaatggtacttattatgggagtttctcaatattgttagaagttataaaagttttaatttattttaagatggtagggagtatgatagcagatagaatgcatgttagacggaaagataacacttctccacttgctgtgagtcgaggtctcgaggaccaaaactcaggagaggagtatatgccgctggtcacattccctcaatggcacaccaacctctaaagtcaaaacagtactgagtactcctaatccagtgcgcgccgttcgtcatcaaaagattagcttttctgactttctccattgactcgccggccacttttgtcctatctcaagccctggaccgctgtacggatgcagacaactctgtgtgtttggataatggaaaatggaaggtaagattaagattaggaaatgaataaattgttgaaactaaatggaggaggaagaataaatggttaaatttaaagatgaatgaaaaatcatttcccttttccatttgccaaacattgccagtgagcatcacggagaaactctctcagtacgcagcagccaacggcaacggcccaggaataaaaacggaggagcgacccgcgaggccgcgactcgcgtcgaagaaaccgcaatttctacgcctgctgccaagccgcgctgtcatggtgtcacctcgtcacgccaccacgaacaaatccaagcaatttgcgttttgcggccggtgagcgggtgattcgtccatccacatggtcagaacgggacgagcaacgcaagcatcagcacgcgactctccatctcgcctggatcaagtcaagct

SEQ ID NO: 15347 - DNA, 1041 bp, Oryza sativa
cgcgcggtccatccgtcgcagcgtagcactaaccaactcctctcttctctctcctgtcacaagactgtgcctcaccgctcgaacgttcggatggggaccgtggtagattccacccgaatttatgtcccgcgggagcgccggttttccccccgggatcgcgtctcgcacgcaccggtttcgctgctggtggggcgcctggtttttgcgttccgcgtgcgcgcgcgctggctcgcccatgggttggcgggtggcgagtccgcgacaggtgggccccaccttgtctgcaacaggataaggacgaaaggccggtgccacgtggcgctaacgtgtctgaatgctacaacggattttccgtttggattttgatgggcttcggtgatttattatgggctggaacaccgaagattcatcgcgctgggccggcacgaaattaacgggctaacatgcttgtatcagatgcacaagtcagcccattgaatccaatggttgggtggagtaattagtggagctaatcatgttcgtgcgccccgattaaacgccacgacccgcaaactgcaaacgagctcgccacacagcgtccacgaccatggctgccgccgtggtagtgcaccgcacgtaagccatgcacccacgccgcaacaaaaatacagctccagcctacgacgccacgaacagataaagcactagctgagacatctaccggctcgagctccggttccccggccggcatcctgcgagcgaccatgtcgacggtggcgacgcctcgcggcaggtcgtcccagcgccggacacggtgcaagtgcgccggtggcggcggaggcgaccgcgccgcggcgtgctgcttcaacccgctgaggtccctcttccggtgccccggccgcggccgaggccgacgcagccgcagccgcagccgacacacgacgccgtcgaaggtccgtgacgcgtctgtcgcaggcggcgtcgagcagcagagcgaggagccgtccttcttcgtctacgccatgccgaaccagggcggtggcgacggcgtcaccgccgacc

SEQ ID NO: 15348 - DNA, 539 bp, Oryza sativa
ctttcatagttctgatatagttggcaattaatgtctgcaaaatcaggtactaaacttactaatgtgtatcgaatgcaaattatgcctgaattgctaagttggatagacagaaaatcatatgtagttgatctcttttgggaaggggggtgatttcattttatccataaaatttgtactacgatctcaatattgaaatgtgttttgcttatgcaggtgagttcaaaggcgatatactctggcatagtgaaccatggagtgacacacatgtgcgccgcgccggtcgtcttcaacaacctcatcacgctccggcgagcgagaccttcctgccgctcccgcgcgtggtcaacatcatggtggccggagccgccccgacgccgtcgctgctcgcggcgctgtcgatccgcggcttccgcgtgacccacacgtacgggctgtcggagacgtacggcccgtcgacggtgtgcgcgtggaagccggagtgggacaggctgccgctggaggagcggtcgcggctgcactgccggcagggcgtgaggtac

SEQ ID NO: 15349 - DNA, 2786 bp, Oryza sativa
tttttttaagaaaaactcaaaggtatgtaagaaataaggtaaaactcaagagtacgaaaggaattgaataatgtctgagcgacacattcttttttctttttagttgtactcttcctagtgacaccttagaaaaaaataatttactgacacgaactagtttgttgaacaaataaatttttcgagtggctacgtaaaccattatatcggtccaacaaggttaggcaagtttaggatggctatgtaaaccatttaggatgcaaaacaaccacaagtagtgggttaccatggacagacccgaccttaatagctaaattgacaacataaatgctaatgcaaaccgcacagatactattaacatagagctttagtttttgctatgtggagttttatgtttttactgagcaaaataacggtttcctaactatgtagcattacactaaaaaaaaacatgcgcccgtcccttataagtgtcaatgtgtttccatattttgtagatataatagaaatgatctccacaattttagacaattatacttgcatgaaatggaaaaaacgtgccttttgaaaagctaaaggctgcatgcactttattacaagattaattcttggtcttgcgtcttctctgctacatatactctccccggacagctgtctgagggtgaagttaggtataagtcaggattcggcatttctacatttgcgaattcatgccgtttaatttgatacgcgtgccattttattgtgagatggagggagcatgtattagcgcaaagaactagtcaaatctcaaatgaaccagcgtggacttgccacaagtcatccgtacacaaatgtaggccaggcggggcagcatcggatcctttgctcagctagccccctctcaccaggcagcgcgggcaagggcgccgtaaaaagatgaaccctacaggtagaaaagatgtgtcagctaaggcagatactactatagcagattagcagctgttgcatcagtagcgcatctcgattcctgaggcaaaatctctggccctctgaaacggaaaagcatgcaaagacctgcatgctggcaagtgtggcaagtggcgactcacccatccagggaaatctcctcctgctgatccatgattcatcaataccgcagtgacagggagcacacacaggcacagtaggggagaggttggcaactggccagtgagcgagagctgagttgaatgcacagcggaaaggtggtcctgggctgccggtttccaaggataataaaaactacctcccccgctcgctgctacgcccacccggcgctctgtgccctcctccccgtgtttatttatacgctcccagctaccactcttcacaaagcgatagccggaggaagaagaagaagcaacagcagcagtcaagccaacccgtccggcgagcaagaagcaaccgaggcagcaaaaggaggaggagggaggactccactgttcgcttgtatcgtcttatgggggaagaggatatcagcaacgacagcaagagcagctgcggctgcgaggacggcacggtggaggctccggcggctgcggcgccgaaggagaacggccgagccgcggacccgcgcctccaggccatctccgacgccatccgcgtcgtcccgcacttccccaagccaggtccgccgcccgtactcactagctagctaagctcgatcgatcgatgtcgaaaccgttttaagaccacgccaaatcagttgaccacgtgaaaccaagtcacgcgcggctctacgttaatttgcagggatcatgttcaacgacatcacggcgctgctgctccggcccgccgcgttcaaggacgccgtggacatgttcgtcgagcgctaccgcggcatgcgcatcgcggccgtcgcaggtaaacactataaacagccgtacgtccaagcactctcccaaccaaaccggtcaaaccatgatcctttgcgcggcgcctttgccctcgcgtcgccatgtgccggcggcgcggcgcggcgccgagcctgacaccaacgccgacggcgacggccgagccgagctgtgggactgaggcggcggtgttgtgagattccgtaatatctttgggggagatctttcctgctccttttgtccccctacgctttgtcgtttgatcaggtcatcatcccagtcaccacctgcagcaattttttcccctctcacctcctcctactatttctcaatataaacaatttttgcgataattaaactccggcagcatcagcagcggccgtgcgggcgcaacagtggtggtggtagaccggtaggtgcatgcgctgctgaactgtgacaactgtcgatacacgcacgtatgtcgaacataggagtactatactagtgtatcataggagtatgtctttctcgccgtctggtccagaggggcaataaatgcaggggccaatgcctccccgggccacggctgtggatggagcagccgcaggaaaggcgccgcgccaaggcggaaaggagaatgccgatgcctccctgcaccgcacgctacgtactacgtgcgccccgggcccgggcgcatgtggggaatgtgcgtgtgcatccgtccgtccgtccgtgcgcgcgtggcgcgtagtagcccggtggtactgtatggtccacggctgcgcgctcgaggcgccgatccgcgtgcgtgcgtgcggccagaatgtacgtacgcctcgtcgcgtcgcgtcgagcgagcgctcgctggttggctggcgcggctgcggctggctggctccgccgctcgcggggctccgctggggccagcggaat

SEQ ID NO: 15350 - DNA, 22220 bp, Oryza sativa
  unsure (1)..(22220): unsure at all n locations
ctttcgctcagtgcatgtactgcacgacctcacgtttttcgttctagatgcaaaccgcccgcgagtacaatgatctgatttttttagattgggagttggagtacagagtctgattagcttttcccggccgtgtgtgtttgctcgaagcactttactttcacggcattatggcgtttgttgtgacataaacctccaataattgaatagccatcgcaacgtcatcgtatttatactggctagttgaaagtttttactcctacaaggctacaatgaacatcgaacactgtgttgcaaaagtacatatggaagttctatcagggacgtttgctagtgatggatactttaaaattgtagatttctagtagtaaatttggtgggaaaaactgtagttctacgaaaaatttgatgttaaacatataactttgggatcttacatcttaaatttatagttttgtcaaatatgtgtgttttgtgaattttactgttataaatctaatttccatgtgtatatatatatggtgaaattctccaacttatgctaggtattgaagccagaggattcatatttggcccagcgatcgcactagcaattggagcaaaattcataccgttgcgcaaacctaagaaactcccaggtgaactacggactatgtcatttcgctcatacaaggagcatacctacatcctaaaacataaggaattttacccatatagtttacatgagtaaaatcccttatattttaggatgaatgtattaatttgtttactcgcacacagtacatttgcttccactgaaaatgctgtagcaacattatatatgtactactgctactactcatagaacctgttagcacatgaaccactcatcatgtcagctactgaaatagttatagcttgagtacactcaataaatgttgtttgaggatcattgaaatggtctgatgaatagaactgtagattttattccgctttggtactggtatacagctatatactacaaactcaatatagagttgctagtagaatgtgctaacagtggcttttacaaatcttaaaggtgaggtaatttctgagacctatatacttgagtatgggacggattgtttggagatgcatgttggagctactgaacctggtgagcgcgtagtggtcgttgatgatttagttgcaaccggtggaacactttgtgctgcaataaaacttcttggtgagtaactaaccgtttgtctcctcagcatgtatgcaaatgtaattcattgactgtggacaacactaaacaagtacgtacgtaagtgttaaaaaaatactattgttattttcagtttgctatgctctataatgctacttctaggtgacttatcatatgttttaacttctcaagtctgtcgaataataaaacacacattttaagctgaaaatttggttttcctgaacagataagcaatagaggaccttgagttatttaggatatttgctgactgttgtggaaaggatattctgatattttcttgtgataataacaaacattatattctgacttaaaatgattcatattaaacgaaaatatcttaaatacatagtgccggacaaagaaagtgagagaaagtggaagaaaatggagtactgaatgtgtatatcatgtactactaatttagtaaaacatacaggacgtgaagctgaatatcatggatcatagtggagaagatcatgtaacattgtcaagcatcaaacagctcagtgataatatgtagagtagaggggcatcatgttctgttgaccttaagaaaagtatgctccccagtgagtcaacgggacaaactgtttattcatgggacaaaatcctgtccggaagatatgtcctattgggtggctaatcacctacatgcatgataagactggaggcataattttgatcttatcttacaaccgaaaagttcgtggataagaatcgagcattcaagaccctcccttttctctttttatgacactaaaacaactaactattctagtgtttacatctgtttatgcttattgctcaaactatttgcattccagaacgagctggagctgacgtagttgagtgtgcatgcctcattggccttcctaagtataaggtacactcatattttggttaagaaaattgagaatcgcatctcacttttaataccttgatcaattatttgcttactggacttgcatgttttatacagaatttctacaagctcaatggaaaaccagtttatatactggtggagtctcgcaaatagaaagtaacaaagcaatgatcaggcaagcatcacttttatgcttgaaattttctccaatatctccttttattttgataataatgtttgtaccatgttgtgcaatacagctaggctgcattattgtttgttcatggtcttttatcaatgcactgcttccatacacagtcgacatgagggtttaaaatgatgtgtactgttcttgacaagagtacacatgttgttaggtcctgacaattggtttataaaactttaaaatttctggatttttttatccgggtcagtgaaatattaatattgaaacgaggggcaaattgtgaatattgagcttctaattcatgtttccccctcctatcctttttcagaaagattcacagcttcattcctttgcaagagcacgttggaggaattggatcggtattggtgagcagtgactctgcacgcagcacaactgttaatgtaatctcggtggagagatgatgagatagatgaaatgtaatctttgtagcacgactagttttccaggtagtgtcgacgacgagagcttgtagttatttctgtcgggaactgttgattacccggaagagaaagggattaagggaattgccatcccgcttgttcagttcctcttttcttttctagtgacaattgtccttttcgccgcacttgatgatttatacttctttggtaaaactaccactcctaccgtagtattattggcattagattagctccttgtcggtgaagattattcagaactaaaagcttaagccaatcataaggccagcatgaaaaaaaagggcatgggaatttgtttaagcgtcctagtgcacggttggagtgccaggctgccagaggcaggtagagagaatgctggcgttactagattgaagcttcaaagtatgctagcgatccagcagccacttggctagaccaccgtgagttcagagttttaggtatcctcttggacactaaactaagatgccggcatgcattagacattagactattgaatcatctacaccgatagtccgatactatacattagtaagcatataaaaacggcttggatgcaacaggttggcaggaatatctgtctcctgttctacgatccccagacaagggcgttgtgagatatgggagaggagacagtcgcagggagacttgcctgcatgtttggcgatcgctgctttctcgcgccccctcgattccgcctggttccaagggacggccgcttctgcggttctgcctgcccctgcagttttattactgctgcccgtacagggtcagattggcatcggtttacctgaagcaatcacacatcaacagtgcacaccattcgttaagataaattttgtgtaaatttcagaaaactatgactattttatcaacattttcactctactacaactttaactgggcatgttagagaagtgcaataatggtgtatgattttattagaaagctacaactttatttatctcataagtttaaatccattttgttggttgatttatagggtaagtccaataagttagaaaaggataagcccacagcctaattctaacaagaaaataaaagaaagagataagttggttttgtgatcggttaaaaccaattttgaatcctaattgaagataagctcccgaaccccaccaatattatataacgtagaggagagagaggatgcttaatcctatgcgcgaaaacccaaaaccctaaacaccgccgatcggttttaagcactggcagagattcgtgtagccatatcagggcagtgccagtggagacccgaacgtcatcgagacttgcaagaagccagtgacaagaagttgatcaagccagtgtccatgttcatatattggcgcaagaaccaaaagaagaagaagagaaggaaaaaggaagaagagaaggaaaaaaaggagaaccagagaaatcgacatcgatggcttcacaagcaagtcagtagattaagttattttgcatttagagaatgactaaagtaataagatcttataacttagaactccaacacattgtcatacacacatgtaatactcatgtgttatagttcagttcacatgtaatgacatgcaggagatanatttgtagttatttgataaattcatttgttaaagttgtccttatatatatatatatatatatatatatatatatatatatatatatatatatatatatatatatatattctacaccctccctcccaagagtcacacccaccttccacctctgtaaaaggccagtcaaagccctctcctgccggtcaaacccgcctactaactccccccaccgcccacctcttnttagctctcatcccacagaacgtgcaataacacgacgaccaatgtgcagtaacactgtgtcttatgtgtaataacaacgttcaaatatagttgaaatatagtcatgacggatctacttttgataagcactttttttctagcatcatcgtgcaaacggttttgaaaaaccttacatcacttgggagatattgttcttcaaagcttgactttttgtaatttgtctctctacaagtagtaatgctatactattatttgttactacatgtctgttgtacgttactacaatcgcatagcgatgttactgtaagagtgctggaaacactataagttcagtaacaatgcatcttactgtattttttggatagtgttactacataaacatgtggtaacgtgtaactgtcatgtagtaacacttccacttttgtgcagtaattcagttctcgttttgcaggaacgacgtagtaacatgatggtcaacgtgtagtaatacgactgctttccgcagtaatgacgtcaaaaaatagtcatgatggatctagtttcattaggcacttttttacgagcactatagtgcaaacggattagaaaaaaaagatatgatctgtgagagattgctctctaaagatagagagttacctcttttcagttttcgtctcgtaggaacagtgtagtaacacgatagtcaatgtgcagtaacatgactaatttccacagtaacagcgtcaaaaaatagtcatgccagaagtgcagtaacagactataagttttacagtaacgtatcatgttactgcacttctacagtcatgccagaagtgcagtaacagactataaattttgcagtaacgtatcatgttactgtacttcttctataacgttactaccgaattatagtaacataatgatatctaatcatacagtgtcatatgttgaatgggttaggagagcttctcatgaaccatgagctcatgtgttcaaatcttgaattcaccaaattatttttaatttttctagaaaaaagaagaaaaaaaggtttatttccaaaaaaaatgagagaaaagaaggagaaaaaaaaagccaaaaaacgagagaagggagatcgagcagggaggggaggcgctagaagaaaaaggggaggggagggagaaaaaaaaaggggagaagagagatcgagcagggtggggagggcgccagaaaaaaaaaggaggagcgcgcataggagacgtagggtgcaggactggagggagaggggtacagaatagttattctataaggggtgtagaatagtctatatatatatatatatatatatatatatatatatatatatatatatatatatatatatatatatatatatatatatatatagagagagagagagagagagagagagagagagagagtgtgggttaaggttgtaagttaattaagtgataatagaccaaatgattgtagttttatgaaatttacttttcgttttttgacgaaaataagaactgagattttttttcaggaaaaaaaagactgtgcaaaccatgaaccctatgtattgaagctagggtgtttcacccacaattctgccaattcgaagattcagaaagaatttcacaatgcttattacataggctgaacctgactaataagtaatagcgcggccttgaaacatgaactagtcccgacctaaatacagaagccgacacggcaatcgggcaatgcattattaagaaaatgaattgagatctttctgtgctatagaactttgtgatcttcgaatgctacaaaaccaattttgccaaaatgaattattcagagttgcacatgctaactgaaagagaagaaggaaccagactggttcaggcttcagggggttcgtggaatcccccttgttgatcagtgatcctccttttgagcaaaatcttgccacgacgccgatcttggcacgccggcgcagggcgggagctccttctccgacgccgacctcgacatcccggggtccaaagggtgctggttcgcgaactgcagctgcgacgcggacctccgcatggcggccgcggagcagagcagcggcgagctctcggcgccaagctgaagctgctggcacgaggccgacctcggcatgccgccgcgccggtggagccggcaccggaaggagccctcgtgcgtcgtgggcgagcagatgcactgtctcgcctcccccgccgccgccaccttcgccggctggccactgtgtccgccgccgcagccgttggaagccatgtacgtacctcgacgcagacagacctaaccttaaccgccggaatcttgcacgatatccacggggtattttataaagacggggtttcgatctggaggagaatccgggctcgttacggcttcggatttcctattgaaaatcgcaacagatctttcgcctaaaaagtcgattgaatttatatattcaaatttgaatctgtagcgagagcgtcgttacaaagcacaacttacaaattacatgtggtatacggataaattcagtaacttctaaattatactacacgaagaaggggcgtgtcgcgggcggccggcgattcaaatccgactgaaagaacgcgtggtgattgattcatgcaacatcgaactgaacgagcgaaccacgagatcgattgctcggtcgatcgatcgatcatagcgttggcagcatcatctggagcaggggagccggccgggatcggcgctgccgcgatttgaacttcctgatcgccgccttgagcacccgcctccacccttcctcctgaagaatccaaccagcagaagcctcgtcgtaatggcggagatgattcatgaagcgtaaggatggggggatctgtatgcagaaagctaccttggccgggagaggcgacgatggtggcggcggcgagaagtccagcctcgcgcagcccgtctcgtggaggttcaggaatgagccgtcctcccgccgcagcctcagccgccgccgccgcgacctcgacgacctgcccccgatggcggccctcgccctgcgcttcgggttggcgatgagaaagtccctcgagccctcggccccgcctccgccggagcgcggcggcggcggcggcgacgacgacgcgcggggcaccttgttcagcggggaccagatgccgctctgggagtagtcgaagtcgaaggcggaggagtccgggaacatgccgagcaggccccgcgacatggacggctccaggtactccaccgtcaccacgcgctccaccaccaccacctgcggctccacggccgcggcgccgccgcctccctcggtctctgtctccgccgcactattcatctcggcctcgaagcttactagtggtggtctccggcgatcgtcggagctaggagaggaagtgatgggagcggaggaagaggtgggaaatgttaagggagttcgcggctaaagtagccgttgggtgtggcctgtccggacacttgaccgttgggatctgggggttgctcggtcactgacgagtggggcccgatggtccatgtgcctgaaccgagtcatcagtagctttgtgttcagggagtacttcttcacatgaatgccagatttattggcccaacaattcaacaaaatcacatggaaggtttgaacacaaatttttgcagaactataccagatccatccgaggagcaattaaactgtactccctccattttttaataaatgacgccgttgactttttctcacatatttgaccattcgtcttattcaaaatttttatgtaaatatacaagatataaatcacacttaaagtactatgagtgataaaacaacttataacaaaataaattataattacataaattttttaaataagacgaatggtcaaatatgtgagaaaaaaatcaacggcgtcatctattaaaaaacggaggtattactctacattaaatcttctgggcacttccctgggaaaaaaaacaaagataaaacacttctcagcacttacagtggggaaaaggaccacccactttgcttcaaactttgcagaatctcgctatagtatgtttttaagggcattcagtgggaatatagagtgggtaataaaaaataaattacttatagttatatatatgtgggagtagcaaacaacagtatgatgtaaggaataaacaaatgttttttttcatcgctctctcctgactgtggttgtgggacctagcttactaccatttttattctttcgtccttttagctacgacaactaatacctactgaagtatgatctactctctagacatcactaagatttactctatctactttatgaataaagataggcctacatcagtgggtattagttgttgttgtagccacaatgatgaaaaaataaaagtgggtagtaagctgaaccccacagtcactagccatgagacaaggatgagagaaattatttctttattccttatgactaggtagtaagcatattacctagtaatccctccgtttcaagttataagacgttttgactttagttaaagttaaattgtttcaagtttgactaagtttatagataaatatagtaatatttataatactaaattagtttcatcaaatcaatagttgaatatattttcatattaaatttatcttgggttgaaaatgtcactacttttttctataaacttggtcaaacttaaagcagtttgattttaatcaaagtcaaaacttcttataacctgaaacggagggagtattagttacttaccacttccacaatgttataacctagtagtagtagtattttgttccttattatccactttagatacacattatggatgcgttaagggcattctcaatgtatgtttactaggtatgtagtaagggtgggacctacaaaaccagggcgtatagttgttttagttcacacaacatatttaagagaatggataagtaaaaaagagagggaatgagagaagggagaatcttaatatttgtttattccttattgtctcgtagtagcactactaccggatgaaactattacccatcttactgcctactccaataatgatgaaccaggtaatacgactccttactacccacttttttacacattgtgaatgccctaactagtattatatgttaggtggaaaggtgtgttctctaacaagaacttctccccgagttcatcattgatatatggacatgtggatggtgggtcctatatatcaataaccacgtccctctagcttcgtgtcaaagatccgtgtcaaagatcatccatgtattttatatggttacttgataggacttgttaaaaagagagaagagcttgtaagtttcagggttagggcctattgatagtctgatgggattctagtcctagaagaacaagtaatcctatatttttcctattggcaactgaaaagaactctctgtttttgcaatattcagcattagcgatgaaccctgaaagttactgtttgccagtttattttttaaaccttttcttgagacggatattttgaaaaataaaaacagggttgtaaaaaaaaccccaactttattgtgataaattttctaagttgcatatctcaatattttattttccaggatataacgtgttcctacatcctgggtttggaaagaggctctgaaaaactaaaattaaaatagatgcctataatatggcatccttctcttgggcagtcgagcgtaggtcaatttggtgcacttgcgcagtgtataagtcgccgtatgtaataaaaaaaatgtacgttgtattgtagaataaaaattaaaaaaaatataaaacaaactcagtacagctttatgtaaactcgatatgccacattgaacacacttcgcagcaacccagattaacacacataagacggaaggacactgtcgtaaaaaaaaagtacctactgtattagcgactacagaatctactaaacacgactcgacttcatgatcgaacagagatcagctctttacttcttttttgagttcttccccagggtcgggaagtgtgccgcgtcatcgaagctcggtggcggagtagccggcctaggcggcggcggtggcggagacggcggcgccgccgccgcctcctgctccttcttcttgtccgcctccgggtccggcttcttcgtcctgatcggcgccctgtactggtagcctatgtacttggccgtgtcctccttcttgaccgcactgggcttcttgttgcctgctgcggcattggcggcacccttaccggcctcctgcggcttcttcttgttcttgctgttgttattgtttttcttcttcttgtcgtcgttcttcttcttcggcgccggcgccgacttggacggccaggccgccggcggcacgggcggcttcctgtaggcgacgggctccttctccttgctcagcggattgtcgccgggattgttgcgctcgagcagcgtgaaggggtttaagcttgggtggagccccatttttttaaaggacgatcggttgaattggccaagaaacccccggtaaatacaccgagcgatcgtacgtgatctgttgcttgttgctgtgttgcgctttgtgtttcgttggtgggctacggcgtgcgacggccgagaatataaagggggggcgggcaggcgccgccgggtacagctcgggttcggcttcgagtttggaagcggcacaccaccgcacacggtacgtgtcgggatcggttttgcggtgttgggtcggcgtcggaagccagtcgcgtggcggcggcccgtacgcggacacggattgcgcttgtgggctcttgcttgccttgttgggccgtgaagggaagttctcgccgggtcggaccttgtgcacatcggactccgggctcatgtagttagtactcggagacggacccaaaaggtgcgtaagatagaaaaggtccaatttaactccctcaaacataaatcggatcagatttgtatccctcactcataaaaaccggatataaaaactcctccaactattaaaacaggtgcataataactcatagtgaagtattcctccaactatagtggatctcaattttatgcggaatcgtagtcaagtaaaaaaaaacgagacccatatgtagtctgtccctctccttccttcccaattaggggtgggcgttcagtctgaccgaaaaattcggtctcagtcttcggtctttcggttatttcggtctttgaaaagtgaggaccgaatttcttccaaaaaaactcaggatcgacaaattcggtctcgatttttttgtctcggtctaaccgaattttgacagagggggaccggctcaaacgcgaacgcatcgaatcccccaccgcagtctggctggagacgaaggcgacgcagtggcggcgttgaggcagaggcgggctcgcggaggacggaccggtggaggcggcgtcgacgcgatggaggtcgaggatggaccggcggaggcagcgccggcgcgatagaggtggaggacgggctggcgcccggcggaggcggcgcgatggaggcggacgggcggagcgtggagggcggggaccggagagcggaggcggcgccgcggaggtggaggcggcgccgccgcggtggaggcgtaggcggcacggtggaggcggaaaggcagagtcggcatggtggaggcggaaggcggaggcgggggaggcgccgtggaagcggaggcggtgcggtggaggcggaaggtggatgcggcgtgaccgagccgagtgtgacgcgatggggagaggcggcgctgcgtgaggctggtgggaggagggattggatgtgtggttgcctctagggtttagtagtttattgagtttattgggcctcctaagcttattggaccaaaattcggttttctcggttaattcggttaaccgagggcaatgaccgaattactcgaataaatttcggtctttcaatggccaagaccaaactactaaccgaatttctcggtctcggttttttcggtctcagtcttttcggttcggttcttcggttcggtcttattttgcccacccctattcccaatcatcttctaaaagtaaagatggcggtggtggcaagatggaacccggaagagggcactagtggctccttccctcttctcccaagttgtagtaaatacaacaaattaaattaaacctagtatacgcacattcacaattatatttatttattttgttacatcttgtagaaagtcaaattaaatgtagaacaatatatgtcatattttaaaggtaaattgtgttgacgatacaagaagttggtaagtgggtgtggttgggtgcaagaactagaaaaccgtgcatagcgatacaataacttggttaagtgggtggtgcgctcgtagtgtagaaggttgccacatagaaaatttttgttacgtgttccatctcagcgagattgtcacatactcacatcagcagtgacatgagagagatgctctcctatctcattttacataaaatcctttgtagctgttgaaggagaagtaactggaatacaaaagtataaggggttcactctataaaatcagatatataggagagcacctcttccgtgtcactgctaatatcacaatctcgctaaggtggaacaacgacgacgtggcaaaatttcctaagttgtaatcttctcctaaagttattgtatcgtcatgctcgattttcaagttcttgtacctaattgcacccacctgccaactttttttaccgccaatgtaatttacttattttaaaaaaataaaaaaaaataaaattatagatgacacgtataaaaggatgaacatcttaccaaataaaacactttaaatataacaaggtcgcccgtatattagcatatcggacaaaaatgctctacaataatgtacttgtagtagcaaagactgacaggtggatccgatccacatatcaacggcagctactaaagatacaatattgtgcggcttgtcaggttgggtgaatccctttgcacttaggttcctcctttcatcctttgctacaaccaaatacaaatttcctttagctaaactagcttataaatgcatcttgcaagcgcacttgttttatagccctttagtgccattttgcagtagtggataggcttgccttagaaattttacgagagaaacaaaagttctaaacttcaaatcgctctgaaccgcgttgagcccatttgtaccaaaaggcaaatgcacttttcagcgaccggtcccacactacaagatgttcaggtttggagtatctaatttacccttaattatgtggtcctagagtcactgttcacaaaaaccaaagattactttgtacttaatcatgattgaaatcttgaggaagtccacgcccccctgcacggtggtccaatttatacacatcggagagaacattacaaaagcctgtaacagctagggagattgtgcgtgcatatgcacggggtctcgctctgtcaggttttaacctgagttagtcgtttgaccaaattaagggctcacgtttcgttattttgttctttgggagaggaatctttcgggggagaattttgtctcgagaggctcccgtatccacgagaggggcaagggaaaaaaatttaaaacatggagcttctctaaacacgaagacgtttttgcagtgtagctgtgtaggtagcgtcactggaactgttgactggccgagcgagcatgcaccggccgaccagtcggcttggatttttcatccttctctcgttgatttttgtttaggatgcatactggtactagcctatactgtgtagccactcaatataaaattgctggatcaatgggaactaggggtgcaaatgggtgttacgacctgcgcttactgtttgtataagtacacaactatagagatcacctgctgctttagccttcaggcctcagctagcgagcacttagccacttactcttctttcccccattctcacagtactgaccttgctagctacacctgaagatcagctggttgccgacttgccattgccgatgcaagattccggtagctgcactgatcgatcaaagaacaatctggctagcaatcttggttcttgtttgcaaattaatcagtgaaaagatacacgaagaaagctaattaagctagtgattttggtgtctagtagctaatggcttctgcagataactggctaggcttctcgctctccggccaaggcaacccacagcatcaccagaacggctcgccgtctgccgccggcgacgccgccatcgacatctccggctcaggcgacttctatggtctgccaacgccggacgcacaccacatcggcatggcgggcgaagacgcgccctatggcgtcatggatgctttcaacagaagcacccatgaaacccaatgtgaggaagccaggttgctgatctgatgagcatgcagctagctagctacagcgcagtgatgagggatttgatatgtgtggcgtgtgcttgcagatgggccgatgaggggttggactacggcgccggctcctccgacctctcgatgctcgtcggctcaaccggcggcggaaggaggacggtggcccgcgacggcgtcggcaaggcgccaaagctggagaccttcctcgacggcaactcattctccgacgtgcacggccaacccgccggcgggtacctctactccggaagcgctgtcggcggcgccggtggttacagtaacggcggatgcggcggcggaaccatagagctgtccatgatcaagacgtggctccggagcaaccagtcgcagcagcagccatcgccgccgcagcacgctgatcagggcatgagcaccgacgccagcgcgagcagctacgcgtgctccgacgtgctggtggggagctgcggcggcggcggcgccgggggcacggcgagctcgcatgggcagggcctggcgctgtcgatgagcacggggtcggtggccgccgccggagggggcggcgccgtcgtcgcggccgagagctcgtcgtcggagaacaagcgggtggattcgccgggcggcgccgtggacggcgccgtcccgaggaaatccatcgacaccttcgggcaaaggacgtctatataccgaggtgtaacaaggttagcgatttccatcaacttttgctagtgttattgttgctgatcttgttctgcatcttccagctcaagtattatattgcttatcgattttctctcatgttttagtgtattgctcattgatctcaaagcaaatgtttggatcgaagtatattaggatgtgtttcatctaaatatctaattagttgctgagagcatatataatgcgattctcctagtagtcgcttctttgctgttgctctgctacacagtgctacttgctcttctcacttagcctagaggtaacactagcttgtaatacaaggtgatttagaagtatacaattcataaaatgtactagatttgaccaacacagaagtggagcacatgtaatttccatgatttcttggtgatccgctttgccaatgcaagtgcttcttttgacgcttcgagtactgaaccgttagcgtttgaagtgcagtgatgatcatctgcaatgaacagatgctctctaattagttttcttgttgtccacaactttaattatttttacaattttcttctagtcgataaaaaataatatatatgcatgtttatataaaaatttttaagttcttcatacgtataatcacgttgttaatctgtctttcaggcatagatggacaggaagatatgaagctcatctgtgggataatagctgtaggagagaaggccaaagtcgcaaggggagacagggtatgtatatatagtgagagatatgtaatggtagttaattactcccttattctataatcttaaagataaattaactgatcaatgattaatcattcttccatctgttctgtgactgaatactgaatttttgtcgcctctccatccgggatatgacacttcacactcatgaaaatgcagtttatttgggtaagagctaatcttgtgcaatatattcacctatcatgtatagcatatatatccatttcgtaaaaaaaaatgtaaatcttatgctaatacttcgaagttctcacttatcttcttcacgaacatttgtgtaggcggttatgacaaagaagataaggcggctcgggcttatgatttggcagctctaaaatactggggcacgaccacaacaacaaatttcccagtacagatattcttctttttaaaaaaagacttaaagagatgatacaattctgttaattgctttttagatttgtctatttccatgtgcatggtttgtttgaatatcaaaattctgtgcagatgagtaattatgaaaaggagctagaggaaatgaaacacatgaccaggcaggagtacattgcacatcttagaaggtattgcttgatgcatgctgattatactatagcatcacatgtttggaagattgcacagcacgaaagcacgcttctgttgcatagcaactaattaattacgtgcatggtcattcaaccacaggaatagcagtggattttctcgtggtgcatccaaatatcgtggtgttactaggtaattaaatctaccatcaaattacatgttgggtaaaagttatattatatatgtatgatactcctattgttcgagctgaatatatatgatttactatgtttatgttgagatgttggaatttatctagaatgacggtttgacaggcatcatcagcatgggagatggcaggcaaggatagggcgagttgcaggcaacaaggatatctacctaggcaccttcagtaagccaattataccaactagcacacagaagctaatctatttgttaattaagctagttaagatcctctgttaattgaaatatatccataaaagtacttactggaactggaggtactaggacggcactgtgctttcaagaaccccgagtcatcatcaagccctaattatttagtaatccattttctcgaaatctctgcctcgtagagcggagagagggtgcattattctatcctgcccaatgggtattaataatagtggagtagcacattaattatgtcccaaatgttcctttccaagtttgtgtctcggagctgtctgaggaaaccggggcatgtggtcaagagctcattttagaaaaaccctagctactgcatcgagacgtcacagcttgcatgcagtgcgcgcggcgagtacacacacatgcacgcgcgcgtcggtgggctaaccctaatcatggcgtacgtgccgtgctgtgctgtgcaggcaccgaggaggaggccgccgaggcgtacgacatcgccgccatcaagttccgcgggctcaacgccgtcaccaacttcgacatgagccggtacgacgtcaagagcatcctggacagcagcacgctgccggtcggcggcgcggcgcggcggctcaaggaggcggaggtcgccgccgccgccgcgggcggcggcgtgatcgtctcccacctggccgacggcggtgtgggtgggtactactacgggtgcggcccgaccatcgcgttcggcggcggcggccagcagccggcgccgctcgccgtgcactacccgtcgtacggccaggccagcgggtggtgcaagccggagcaggacgcggtgatcgcggccgggcactgcgcgacggacctccagcacctgcacctcgggagcggcggcgccgccgccacccacaacttcttccagcagccggcgtcaagctcggccgtctacggcaacggcggcggcggcggcggcaacgcgttcatgatgccgatgggcgccgtggtggccgccgccgatcacggcgggcagagcagcgcctacggcggtggcgacgagagcgggaggctcgtcgtggggtacgacggcgtcgtcgacccgtacgcggccatgagaagcgcgtacgagctctcgcagggctcgtcgtcgtcgtcggtgagcgtcgcgaaggcggcgaacgggtacccggacaactggagctcgccgttcaacggcatgggatgatctagctacgcagcggccgcgatgttgcaagaagtaaattcttgagcttaattagcggcaagtttaggattagttcatcatcagagtctacaccacttgaccagtacatgcatgagacacgtatacgtgcgttggtagtataacatgtgccttctgaaggctggtaatggcaggtattagggggtaattaagatttgttgtaaattgccgcctctccttgctgttagttttgggaaagtttcagaaggagcagatctgatcgatctgggacatgtacactgatcgatacaataatttcacggttctatgcatgataggctaattatccaatcaagttgtctttttcaaaggcccttttaatttgactccttgacatgcatgagatgttttatgatgcttggaggagatcaattgcatgaatcataattagtaaatcagacaaaggattgtgatgcgtcctttgccattttcttgcctccatttgctcgattcaacatgaactgtgttgaatggcactaatctgattggatggttggaagtctaggtgataatccattcaaatagccgaagcaatgtcattggcgactccacaactccacgagtagaaaaacagtaatccagcacagcaaacaaactaaagaaatgctccaaatgtcatacgtacataattaatcaccaaatttaaattcctccaaaaaaatcagattcaagtggattactgtttgtttagtttgtttatcagcaaaaaaatcagcaagcaaacaaacagtaatctatgctatctgaccttcagacgatcgagtggcttcatcccagagatccagactagcacatagcaccggcataggccccatacaacgtcaacacacctaacatgtaatcgttagggttgaaattggccgtgccccttctcatgggaggcgcaccatcgtcggctcgtcgctctccctcttttgctcgccgtgtgtcgttctttctcctcgtttgccgccgccgccggcaccggggattgcttcttggccttaaccttgacacgcttcccggtcttgtcgtcgccggcgagaccaaaacaggccagcgaattgtgcatcttcattgtgtcgtctcgtcgtctttgtgtggagagagatccctgcctctctttgatcgatcaggtcggcagtgcaggggtgacgctgtctcgagcttcgttggttttcgctccgtttcgtgttgggatatggcacgcagatggagagaaccggtgaaaatatgtagcggccgggtaatggacagtggagtagcttttcgcaatttgtgtcctggactccacgagtcggagtnaatcagactccgattaaaatcgaacaggaacccaccgtgggccttatttcagcccgccgcagacggcccaacatgctactcattaatgggccgcccgggtctgggcccatgaaaacggcagtgaggctctactactactcacgctcacgctgtcacgcaggggagcaaagcgactgaggagagcgagagagatggcgtgccacgccgccgctctcctgcagcatccgccgccgccgccgccgcccgcgtcgctcccctccaccgcgtgcacgtcctcctcgcgccgccgcgcctctccgtggggcggcgctgggcggttgatacggttacgcctgcgggggcactgcccctcgcccgcctcggcgcgcgccgcgagggtggtctccccgcgctgctcctcctacggcgccgccgccgacgccggggagtcgcccgcggaggcgctccggagggtcctggagtcccccggcgcccaccaggcgcccgcgtgctacgacgcgctcagcgcccgcctcgtggggcgcgcggggttcaaggtctgcttcacgagcggtacgtgctcgctgttttgcctctgggcgtggggcttccctctggcgctcattgtaattctagttcatgggcataggggatggggcgatgggcatggttgtgggactgtgtattgtgcggtttgtgatccttagctgatataacgtctgactgcttaggctcccaaatctattgttatactagctgctagtaatgccttgaatgtcgcaaagatgagaactttgattgatgtgaggatttactctgtgttgatctgtattggataattgctcgtgtctctgctgagggaactttaatcaaagatttaaagtggcattacacttgtcaaaaccactaaaattatgcgctttggctatatattcagaacctaaaaaatgcaaccacactatattttgcttctggagctttcacatgactatgtataaagaggtttaacagtgttcaagcttcaactatattatgtcttttcaggtttctcaatatctgctgcgcgacttggattgcctgatgtgggtctcatctcctatggggaaatgatagatcaagggtgtctgatcaccgaagcggcctcaatcccagtgattggtgatgctgataatggttatggaaactgtatgaatgtcaagagaacagtaaaaggatttattaaagctggttttgctggaattattcttgaagaccaggtatgcttttcaagtgatattgagttgttcatggcggatgtccttccatacactgtgtttgttctagttatcttgaaactccacgattagggaagtctgttgtgttcattgtacaaagatggtacttccagtggcaccttcatatacatacttgactgtgggatccctgtgacttctgaaatgaatagtgaccttttatttttgtgatcaatctttcccttttgtttagttttgttttagtgatatgatctgtagtattctgaaggtatctccaaaagcatgcggacatacacagggaaggaaagttgtctcaagggaggaagcaattatgcatataaaagctgctgtagatgccaggaaggagagtggctctgacattgttattgtggcaaggacagactctcgtcaagctttgtctcttgatgaagcattatggagagtacgcgcttttgcagatgctggagcagatgttctatttattgatgcccttgcttcaagagaagagatgaaggcattttgtgcagtatcacctggagttccaaaaatggttagatctgttacatgctatcttgcttatccaagttgtctgtgatggccatgaaacaattgtctcatcatattctgtgctatcttctgcaggctaacatgttagaaggtggtggtaaaactcctattttgagccctgctgaacttgaagaaactggttataaactcatagcatacccattatctctgattggggtatcaatgcgtgcaatggaggttagttgatttgtatatgttaaatgcatgtttttttttccttctcacagattttgtaagctacaactgaaaactggttcagattgcttaccatttgtcctgtgagtaatagttatggattctgaaatactagtataacatgccgggtgccccataatcagtatggaaactccaacctatgatgttagtacgagtttaggatactattgcaacctaaaattttgtccagaccttccataatatgaccctgctttagaattgcaactaagggcgtaaatttcaataacaggtcttttgactgaaatcaatgggccttc

SEQ ID NO: 15351 - DNA, 10702 bp, Oryza sativa
catactatttttcacttcttctaagttacatggatttgataaagtacctttaggggaaaaaggtgcacatgtgcatgtaaatagatagtcatgtgaacctgtctgtatgtaaatttatgtagtactcatcaactataactgtacatgaaaccccgatatgcaggatgctcttattgctataaaaggtggtcgcatacctcctcccagcagtctgccatcatttgaggagattaaagatactctggggtttaacagctactatgaagaagaaaaacgatacgttgtgacaccagcccaatcatcatcgtacaggagcggtgaggacgattacttttagattacttttattctatgtcggatctatgttgaatgttttttttcctaaccttgaactcctaaattataggttactatgataatacaagtgaagcaagcagtccaggagatgccaaatcaagaactgaaacaccgcaagagcctgttattgacatattgcctcagctatatgatcttggttctactggaggcagaggcccttcagcagggatgtggtctcggacacttcggttaaggattacaggaagagatggagttcagaaaatcgatgctagaatacctgtaagaaccccctccacatctacttggtagttgcattgaagcatttaatttacatcgaactgacctatatcattgatgttggttatacgcattttgttattattactgcaatagcctcttggtccttgtgttcccgtatattttctataatctagtttttgccaaactgattgaaaggttgcttttgtttatccccattatctacaacaggctggattcttagaaggcatgacaaaagttattccaggtctgtacttcttttcttaagagcagcatgcaccataagtaccacctccatcttcatgtgatcattccctgggttttgcaggtttggctggagctaatatcatggaaaggcttcgaaatgcacctattgattcagaaaacccccagaacggtcagatactgcttgattttgaggatgctatgggagataggatccaggtgtttattgagtgagcatgcctgttttccatttgctggcgcactgcaaaatccaaatgcatggaccttcaaagcggcaccagacttcttgttgttgtgaaaaccagtgaactagtaaaatccaacattgatcatatgacctgaagtcatgaactaatggtttcctagtccctcgatgctacacccaaataatcaatctagatgtgtgcgtagctgcacattgcaataccatgcagagtatttgcccgggattagtctggtagcctttgcttgcccccaaaatcctgaagtcaaatttcgaataaaaagcattctcaggaggtttgaaatgtttgcatgcttctatctgctgatatttacatttttgaagcagtgaacagctcatgcgttgtgatgtacccaggttttattctctacaatccggtatgcgacagttcacaatatgacactagcagtgcaaggattactacaagtctacaacttcacaacactatactatacagtgtccaatggttacacctttgccctttggttaccctacgctagcttctgctgccatgctatatcgaagagacccagcaatgcttcctccctgctctccgccgtgcgggccatggcgaaggtctcctcttcttccctctcgctgcctcctctctcctggtcctcatccttcacgatctccgtgctgtccttcatggcatctgtgatctctgcagctggcgtctccacccgctgtacatcctccacgccgcattcttggccacctgatgcgtcgccgcgtttcgccggagtcgccgcctctccttcgccgtcgacgggagccttgtcgccatgcacggtgttgccaccgccgccgccgtcgtccgccgtgacgacctccaagctctcgagttccttccgagccacgtcgtcggaatgcctccgcgcctcttcctccattgctgatcggtgcaacgacgcggcttccttctcgtcgcaccagatgtccctaaagacggcgccgccgacgccgtcgtcatcgtcctcgtgggctcggtagcggcggcaacgcttggggagaacgaacagccccgcggcgccggcgaggagggcctcgagggcgtcgatcgcgccgtcgagcctggcgggcagggactcgacgaggaggacgaggtcgtcggcgcccctgccgaggacgcgctcggcggccgggaagagcaccgcggcgacgtcctggacgacgaggagctgcctgtccgcgaaggcgagcgccgagaggcacctcagccgcagcgggctcagcaccggggccgccgcgcgggaggcgcccctggccacgcaccccaccgggcaccgcatcgcctccacgcgccggtacgccccgcgcgccatggccaggatggactcgccgcagctgcgcagcagccgcgccctcggcgtctgcatcggcggtatcctcttggtcgtgccttccaaatcctgcaaatcataggcatagcacgcggtattagcagcaatcttaaagtttggagtagattaaccggacgagagaaaccaaagcgtaaaaatcggtgcttatttatctcaccataacgacatgcatctccgacacggcctgattttccatctcacagacgacgacgtcgacgacctgaaaccagcagaaatcagttcagagatgcatactggtcgtcaggatttggagcagggcgcgagaaattacggagctgagggaggcgagagaccgtggcggtgacctcgccgtggtcacccatggtgggttgtctgcagggtggggagtgggactactagcagtggctaggcttcatatttgtggttgtcgtcgtggctatatcctccttctgcaaggcctcgtgctgcagtccagctaagttagcagccgcaccaccgctcgggcttgtgacgagggcgccgcgccgtgtggcggaaggcacgcgcgcggcagtgacaaactgacaacgacgagggcggcgcggcctggcgggaatcgcgaccggtcagtcggtcgcggtttcatggcctcctctcactgacaggggggagccaaggcctccgccgctgagctaggttgtgttcttcctcttattttctcaacccacatctctcgttttccgtgcgcatgctttgatttataaaaactttctatataaaagttattttaaaaaatcaaattaattcattttttttaaaaaaagttaatacttaattaatcatgcaataatatgaacctcttctcctgaacacagcattaatatattaagaaataaaccaaaacagtatattaagaaataaaaaataatttataagcaaaagttttatatatttgtttgtaacgacttaaaagctaacgctaaaatgaaattatattaaaaaaaatttaaaaacaagttcaaaaatttaaattttatcttttgctttagtttattgggccaaccgacggggcttttacagtcctactcaaatctgaacagctcgagacagatgcaatgcaatgccagaatagattaaagtggactagttaagttatgctctcttcttcgtttttcttttagaactagttatgtcattttcgaatacttgttagtaatactaggtactcgtcttcaagctttaaccgttcggttatttgcagaaatataaatcaatacttaaaagtatgtcaagtgtgtttgcttaattaaatatagccatgaaaatcttacattatgatttaattgttaaaaactatcgatagttaaagttaaaattatttttgtctgaagctagagtgaccatttttactactacctgcgttcccaagcacactacagaaatttcaattccacgagaggacgggcctgttcactttgatgcgaaaaaaaaaacattaccaaaatttggcattatcaaaagcaggatttcttatatagttaccaaaatttggcagcaaactaaatgtagccacttttttagtaactttatcaaaatttggtaagattgaaaatagcatcaaagtgaacaggcccgacgacggtggtggtagtgacgacgagaggtgcagcggaagaaattgttggtatggccagtgatctcccaccatcgtcctggatgagatgctttgtaattgactgcaccgtgcttttgtcattgacatatgggtctagagattatcgagctcacatgttagtgataaagacatggtacagttaccgcagatcttaatcccatcgcccttatacgacacccttagacgacaggtcgacagcgacgagtttcccagccaccagatgacgacgatgagcgtgtccgacgataccgtctctccccggcaccacaacctcccctgctctccggggcgtcaactccaacgtactcaggaacccctccatcaccctcatgaacgtcgtcacgttcacggccaccgattgccctcactgcctccactctctccaggaagagcctaggcaaccatggccatgcccctcccctgcgcgccgccgtcgcccaagaggcagagcatcagctgcaacagattaaacgaaatttgctcacggtcgatactgtgatgatggttaacttttgaaacggggacaaggaagcaggcccttcccggtcacaacgtgacaacaggtgaaccaagcaaaaaatatagcattgacagggcgaaattaacagcaatcgttaacatccaaccatttctctcaccaatcattaacagcaaaaattgtgatcaagcataagaggtatgtgacggatggtccggataatactcaaacttggaaacaagtacctggccttaatggcaaggataccaggccgagaagtataacgcctaacatccaacccgggaactcgaaccactcaagtcaaaccatacgagggaaaaagtgccatgttgccgataacctcatgcaagatcacacacaactgcaagctaaaaagatagctacgactgtaaattaggagataatggcgtcgcccagtgacagcgcagcaagttgactggtcggggtgttcgcattgtgctgctgggccacattgcggaggacatccatcgcctcagcaaccttggacttcagagcctctggagactcgagcagatgcaggacctccgtctgatccatctccagaagcattccggtgaccttggccgcatggttctgttccagaagctcaaccagtggatacaggctttcaccaagtatctagagagacaaacaaatatcagaaaagctgaggtgtacatgtttagcaagcagaatcaacaatgcatttcgatgaacgatacatgtttaaccaagccaaaacacaggatttctaatgctgattgggagctgggacttcgcagactcagactgtgaaacagtaaccggtaaccagtgggttggttggtacagacaattcacatttgaatcaagttttcaattttcctactagctctcttcgatcttttattttgttctcaacttcacatgagatatactggtaaatttactggtatggagacttgagcagatgcagatgcagaacatagattatggtaacaaaacgaataataaattaagcacacaactagtagagggatataatttggacataccgttctttgctgttctggattagcatttgcaagggcagaagtcagcgttccaattggagcaggtgacaaaccagcatctcgtactgggaagcctcccatatcatacgattgaatcataccaccagcaacccccggcattggtggaacatcaggcatgttatgcgcaggtgggtaacggtacacacgtcctcttggaagcatctgttaaaagaaccatggtaagacgtgtgtcgtcactgttcattcaattggtccacatgacaaggataagtggacaacccatccaatgatccaaaattcgagaggaaaggataaatggtagaattcatacatgaaaaagtggatatgggggttttctaagtactacaaaacgaatagctcgctgtttgaataaatatatccaccgacaaacttcccctcccctaccactgcttgggagctcagcacggtttcatgttctatttcactacccactgggggttctttttacctttccctcatggcactacttcgctatcagtcaccgtaaatcataaaaaacttggcacaacagtagaaggtacaatgttataaggatgtatattagcaaacctgttgctgaaatggctgagcagattgctgtccctgggcagaaccagcaccagaacgccggatacctggacgtggaccctgttgaccttgttggacaactggaacaaagtaatttggcatatgggcacccccaggcctcatgcctggaacaagctgttgctggaaaccaaatccaggctacatggaagaaaattggtaagaaattgatctactaaattgtccagaaaatacaacacattagatggaaaatttgaatcatttctatgagataatgatcagacagtagaatttcaaagtagatgccaaatgaacaagatatatgcaaaatgagtgcttgcagcagagacataacgcctagtacaatggtgttgatgaatgactaacctattgtgtcccaaaaacttgcatggcattgattaccatactcaaactcctgatatatgcccagcatcaacaaaaccaatattgaaaactaaatgcataaaagtattgtaggaattgatcaatgatatcacttcactcatgaagttgatgtaccaattgcaatgaccaaccaaccattagatatataataatgcagaatttcaacaacttgactgcagagggcagtgctagtctgttttataaacaaacaaaaacacattgattctctcttacagttaaagctagacggggaaaatgaatgcattgatatcgagcagtacctgtgggggcatgatagcaggtggagcttgtccgtagaagagttgctgcccaagaggagccataggagggtacatgggaagacgtggagccatggaaggtgtcatcggtacagggcgcacctgagaaaattgtgcctaaataacatggaacatgctaccgtcagcatttctttttcattatgaaatgatcagaaacaactcaacaagaagaatgagttattataaagcatttattaagaaactttgtcaaaacacagcagtaagaactatggtacagccgtacaacttaaatatatgttgtggactgcaggcaattgaagatacatttctgaggattcaactacagatctatggagcatgcattgtgagtcatccctgcatatcagtatttccctcaactattatacagaataatgagttctgaactgatgcttaaaagttcttcgccaaacccaatgacctacttcctccgtttcacaatgtaagtcattctaatatttcccacattcatattgatgttaatgaatgtagacatatatatctatctagattcattaacatcaatatgaatgtgggaaatgctagaatgacttacattgtgaaacggagggagtaaatatcaataatcataacttaattgcctagattatcaataaccataaacaattactgttgctcttgtaaacattgagttcatgatggtgcaaaacagaacagtaattcatgtggcatatcttattttcatatccataaatagtactaggaatagcagtttgggcatgcatgttgtcatgaattgaattattcaattacaaacactcagctgcttaaaggactacactatacctgcaacatcgccttcctgtcttctttacgttgtgcaaatgcgacatacaatggctttccagatatcattttgccattcatttcagttaactgtataaaaggaactatgtaagccacagtgatatacaatagctaatccaatattcaggaagtaaacttacagcttgagatgcttcctcacgagttgaaaatgcaacaaatccagaccctttgctaacaccatttgcatcacgcattatctgtcaaacaaatccagttagttataatcatatatcagtaagaaacaaaagtgaaggaaaaaaggtggatgacatgaatcaccttgcatgaagtaattttgccatagttagagaacaattcacaaagctggtcatccccaatgctatcatccaaattcttcatgtataagttcagtccttgatatttgtcagcagcatctttcatgctttgctcaaatcttctcttcaattcaatctctctttctgacttcttctgagctcttccaacataccattctttgtcattaattttctttccattaagttcctcaacagcacgagcagcatcatctgggctcttaaaattgatgaaaccaaagcaccttgatttaccatccatgccaaccatgataacagcacttgtgatgttcccataggcaccaaaaattttgactagatcctcctttgtggtggactcagacaaatttttcacaaaaacattgttaaactttgtcttgtcaacagaattctctctctcttgcttgcggagaaaaggtccaacataaacaggcttatcattgatcagcatcccatttagactttttattgcagattgggcagcctctcccttgtcatactgaacaaaaccaaagcctttggattggcccatttcatctgtggcaaccttacaggagagaatgttaccaaatgcagaaaaggtatcatggagagttttgtggtctattgctttgtcaaggttctgaaaaaggcagttgaattgtttgcattagagataaccaataaaagatgattgttttagcgtgacaatacacactaacaaatgagtaaatgacctagtaccttgatgaaaatgttagcagatccacttctgcgactgcttgggtcacggtttgagtacattacccgaatgggtttgccattcagaggagcaaagttgagcagctccagtgctcttgcagctgtcaaatggaacagcttatcagttcagaagcccaatttacattaaaatcattaagggaattagaccagtagcataactgcaaaagacaatgataacaacatggtggaggacatatttaagccagaacaattgcattattgaaaagcattccaaatttgtccattaaatgccatgtgcaacattcacataaaggatgcagagcacctagtgcaactctctaagatggatattctgattgcccaaatttaagtctctattgaggacagttctacattcctatggaaaccatccaacagataatgactaattaacaatagttcaataacagccagcagccatctatataggacatcacaacagatatatgctataaattcccagaaatcagcatgccataaattatttcagtgttcggcacactcatgctcctatagcctaaaaaaaatccacaaatcagaccatcaattcaatgtaagacattatgtcttatctacagacaggtccaatgcatacacaagtacgtcatggtgtataaggtagccacatagtgtggtgggtgtccaaggttggctagacgtaatgttggtgggatttttttggactgatgcgtgattgcatgctacttatttaccaacaaaagtggtagagcaattacagttgagatagatacagccaagtgaaaatcacttaaatgatcagtatcaatctacccagaaaatttcctcctcctcgatcatggagaaagagtagttcgttgaccacaacctcatttctgatccatacatgttatagtggatattgtaatttaaaaggtggcaacccaatgagttgcattaccttttacttcttatgttcaaaaggataatcaactacaatcatgttgataaacttgaagagccacaagtagggaaaggatcaatccaagcaacaacacgaggacaccaacttgaattaaccccacaaaaccacaccatgccgatgatttttccccgattaaccagtgttcacctactagtgaggcggtcaactagactgggacatgttgcgggcgacgagattattcgctggctaggcagccatcccagcgaacgcagctaatatcccactttcattaaggacaaactacagagttcaaccatcgcatcgatgatttagcgggctattaagctaccattatggagaatcaataaaatttcctttctaggaatagctagcgcgcgccataatccgcaatattcagacacattaaatgcaaacagcaatgcaccatagtaaaggcctcatgtgagtcaactacgtaaacatcgaccgattgcttcactatatacctagaatcctagatatcacacacaaaactcaacacccacccatgttcaccagttaacagatagcaccggatcaaagattgggtccctgacacatggttccacaattcaacaatatagaatccccaatcaatccgtgcagccgaaatgtgaaaatagcgatcaatccgtgcagtccgcgcagcagaaatggaatagggccatagggggggcgatgaggagaggagatcgcgatataccatccacggggttgttgaagttgacgtaggcgtagccgagcgagcggcgcgagctgatgtccctgcagacgcgcaccgacatcacctgccccgcctggctgaagagctcgtacagctgcgagtccgtgaccgacgcctccaggtcgcccacgtaca

SEQ ID NO: 15352 - DNA, 1464 bp, Oryza sativa
tcctgcagcccttaatttcattgtgttcttttttttatgagtcttaaactttaatgacaaaagagcatgtctttggaccaaagtagggatggcaatttgcccaaggatttgggtatccgtgaatacctggcctaatgaggatgggcgtaggtgtaacttttgtccaagacccgaagacgtggtaggcaacaactgggtttcattgctagtatttggacattttgtggacttttggatgaccaacagcagaattgatgcttttgattataatgtggtggtgatggtaagtgttattcatcctgaataactaatttactttaaaatctctcgcactccatctgaaaaaaaatggaagtactgtttcacctatcctatcctgttttacatgccttccagctgaaatacttaaatacttttaaatatagaagtgaaatatggggaacctatatatttcttagacccaaatgcaagaaaaatataaatttcagtagtgaatgcttaaattatgcatcctattacctcacagaaatcaaattgtcacctaaaattgtatgaagctaaaattcctaatttcaaaaggtcagcatggatggctcttaaccatgtaaacagtcaaggttgtggaagcaagcaatgtgatctgttcagcagcagttgttttacgcttagcataaatattttcactgttttacatagttgggaacttcgaacttgggataagccagtaaatatgcattagaagattcacagccgtctcatttcaagttctgggacacatgaagactatccttgtgctaagacatgaattttcaagttgcgcttgggatggtcatagctgtagtaggaatgatctggtatgggcacgcatcttcaagacttggacgcaaagagcgccaatcttctttttttttttgaaataacaccgggggaaagagattccccacctgaattatattgagtaaaaaggaaggttatatcacatagagattacataattagagagaacgaatagaggaagagagaagatttttccaatcggtaactaccgatctgtcttccctgcgaagacgctcagcccacagagtagcatcttcaatacatttgacaactaacctagtctgagaattgggaagaccccggaacacaacatcatgtctatgattccaaagcccctaaaaacaaagcaggaagaaaattctgaagtgtttggcaggcaaatgacaggggacggcaaggtcagcaagatcatgtacatccgaaacgacagatatgcgtaaggctcgccaaaagtcttgggcaaattgacaatgaaggaagagatgactcgccgtctcaatacctcggttgcagacaatacacccagctgtctgaataatgttcttcttaagtaagttagctttggtaggaagacgatccttagcaataagccaagcgaagaattgaatgcggggggggggggggggg

SEQ ID NO: 15353 - DNA, 1921 bp, Oryza sativa
tcgtcactcgtttagttttacgcaattatgcgggtctttcagatgacaatgctactagtacttcctcattaattcagtatcacactctttagtcccttactttgcacttaagattttttttaataaaagaaaccctgatcatgttcggagtggacgaatggtgtttgttgtttggtctgatgacctcatgtgtcaagctaataatttgttcatatccagcaatagtttttttctatcatgcccccaagtagaccagtacatttcatactccttggttctgtttggtgaagcttgtagcagtttatttcaaaatctttagtcacccaaaatttttacctacattgtgaggaaaactcagcttttccagatactgctatgttaagctctttctggatcaggcctttgcatgtatctctctctcttgacacaaaggctgagctgctgaggctatgttgtctcctgtgctctccaaacccgaagccagactagtccagcaccattgcgctaacacacaaatacccaaccgcaaaaccagatatccagcatcttataactaatcaaaaccggttacaattggtgctttggtggttttgacccaggttttgtcctacgtggcagctgagtcagcgtgggacccatgcgagcctcacatgtcaggatgccacgccatctctctcccctcctttctctctccctctctctctcactctcactctcactctcactcttctcttctcttctcttctaattcaccggtcatgccggtcggccgaagcagaagcaagagccactggtggaggggctaggggggtttcgtcgccagcgatggcctagatggagttgagcgttggtggtggcggtgttccgtgacccgccgcagtgttttcgcatcggggtgcagcagattgtgagcaccacctctcgtcatcgccttctccttcttccccgccaccggcgtcgaactcgcgttggaggagcgcggcctcatcggagacatggctgccgccatgaggattacaaacgcgaggcagccgccgtcgccgccgctgcctttgcagtcgacgtcatcacccgtgcagttgctcccccgccgcctgcgcccaccggttgccgcccgtacagctgctccctcgtcggtgcccgtgaaaaagagaggagagaggaagagaagtggagaggggaggagaagaagaggctgacgcgtggggctcacgtgggtccctcactgagtcagctaccacatcagataaaaccggaatcaaaaccgtcgagaaacctaatttgcactggttttataagttggggatacgtcatatctggtttcgcggtttatggacgattttatatcttgatgacaagtgtatggtctgagcgtccaaaactggacccatcttaatttgctttgagaaaactaggcccagcttaatttgttcttggcccaggccccttattctggtctcttccccgaaactgggaaaaggatcgagcccgaacggcgaacacggccgagaaagatccggtcttccatataccacaatcgtgaagcagagagcgaactttgcgcaggccacggcgtcgacggcgatgggctccgaggcgccgcctcccgcgcgacgcggttatgccgacgccccccgccgctatgagtctcgttggcggagggaggaggatgcggtcctcctggctgcggcgcccgcgcgggcgcgtacaggcacctggccggtgcacgtccccctctcgccggggcgtccggcctgtagtagattggcggcaggatgcttctggatgggtcgacggtgaggctcgcgtcgtcgcgtctacgccgagtcacttccatgtgagcagccaattgggtacccatatgctacagtgttttcactagaccgcttctgccgctagtatagggatctggacttgctca

SEQ ID NO: 15354 - DNA, 4089 bp, Oryza sativa
actttccatcacatcacatcacatccaaacttttctacacacataaactctaaacttttttttccaaaccaccactttccccaaacttctccccaatttcaggaataatttatttatgactgttactgtgtttcaactttcaacgaaccacttactatagtagtactacctaacatcagagtctaataagatttggttttcatggtgtttcagaaggtgcatgataacgcgccacacgtgaaactatattcatgagggatgactgaaatggaggattccttaagatcctgcacagagcagctactccgtgttagagaagagaaagaacgccttatcatcgaagcagctgataagatctctttggagcagaagaaagtgtggagtctgcagcagaagttagaagatgcaaataagcggtttgcaaaggtcaccactgaaaactacaatcttcgcaatattgtcaactccaaggataaggtgatcactgagctgagtgagtctgcagcactcctgaaccaaaagttaattgatgccacagccagacttgaattcacacacaaacagtgtggctctcttcagtatgaggtgcgcatccttcagaaggaactcgagattcggaacaaagagcgggagtttgacctcaaatcaattgatgctgcccagaagcatcagcaggaaagcaccaagaagattactgcattggaaactgaatgccagaggctgcggaccatggtccagaagcgtcttcctgggcctgcggctttggcgaaaatgaaagatgaggttgagcgacggggcagtaattgtgttgagaacagaaggagaaagccacgttcatctgcacagtcatcaccgcaggtggtgactccaaggcatcctgtttctgaaggttaccttgtcaagatgcaggaattggatgatgaaaacagacacctcaggcaattgttggccaagaaggagaatgacctccagtttgtgcagttgcagtatgcagatgaagcatcgaagctgtcagtagtgcaagggcagctcaaggagttggttggtagccatgaactggatgacgacaaccgtcctgaaccatgggcaaatagttctttagtttccaaaggagagcattttagagttgggaagcaacatgcatctcacagtaggggaagaagaatagcaggatctgacatgcagttgcttgtagatatatcggagatagagaagcttgaaatgatttcaaggccttcaagtgcgccacatcaatgcgtgccagatgcttctgatacagagtccaaaactgccctgacagaaacagtttgccaagatcgaatccttgaagatggtctatctgacaagtatcccgagtggattcaagatgttttggaacttatcataaagaagcatcaagtccttaaaataagcgtcgatatcattattgatgaaataagatctgcattgaggactgagatttcagacaaaggaaatgatgctgcaaatgtgacatatgaccaggcagtaatagacagcatggtggctactcttgttgaaagagtgagttgcatgatcgaaagatcttctggaaacaatgttctgagttctcaatcatttttgcatgagaaatctgaactcacttgtcatcttgagcaccttatctgtgtatgtagtgatgtactggatggaaaggccaatcttcgaaagttcatcgaagaagtttgcttaaccctcgagtggacagtgaaccaatatatttattgtgtcgatgctctcgaaactgtggattgcatcacaaatgatttcgatggaaatgtatctcttagatcattaaacatgcaggaaaaacaacaaatgcaaagcacaaatccgaaagtggctgtaggagttcaacaagaggtacagaaagaaccgtttctgatccctggtgaccccgtagaaaatcattctcaggttcagtttgtcacttgtaagcttgataaggaactgctggctgttaggcaagatcatggtgataattgtcaagaaaagcagtcagtacattataaagaagaaaggtaactatttctgagaaccatcaatcatgtaactattttcagcactgtacactattattgagaatcatccaacataaatatgtaacatctattttatgatacagtgctacggctgatgggagcatgcaattgttaccagaagaagaggggaaacaactaacagtaatatcttatgtccttctaaacgttcttatgtttttttgtttgtaaattaatacacatctgaaatctgatgtttcaattcacaagttgaacttcacaacattccttgtttagctgagcaccacaatgcccatagctatcactcaatcactatcgcatgattccttagacattttatttttctattttatacatattccatcaaatgttcaaggtgcagtttatgtagcaagtgttgattaaaggcctactactgaataaatatagttgtacacttgcatgacactgggctatccattagtgagctttgaataagcgcaataattgtgaagtatattttctagtcattttcatgttggtatgatgagaaccataatggttgcaactcttgcagaattcggcaatatccgcagcagctgataaacttgcagagtgccaagaaacaattacaagcctaagcaagaaactgcaggcgctaaaatgtccagcaaatgcggatgctgtagacaaaagaaagtctgataacttgcacctgttagttgcaaatcagaattttagttctcccccatccatagaagcagcatgcaagaaagagaacgatgaacgtgttacaactgaaaagaaccttctacaggagcaagatgttggcactggccataaagttgataacaatggttcaacacaaatcgctcctcgtcccgtgatccccaagtcgccactaaccactgtttctgttgatatgaagaagaggaagaaaaagaagcagggtgggagcttgctgagtagactcatctttgggaagaaggcataaaacagctccttggctgctagcctgctacgctcctctgattaagttgttagtgcatccagcagtgctggagcttgttcttctaagttattccgatcccatgtccaataagagggggcaatgctacgtagctaaaatataatttatcggttatgtcatatgtgttgcgacgtgatcaacactatatgtttgtaaaatcctgttccagacatatgcatatggtcttatgattggtggatttattatggtacggggtactaaaattgtgctgtgctgtactgatgttggatggctttccgagaggcacgggcattgcgggtcgaatacggaatacatataggtagagccctggttcggccccatgctgtgcattcaagtgtgctgtacttccttcccatgacctaagcaaaaagcttgtagcaacatgtgatcgatcggtaccatggtttatggttaggctagcttagctggtgcaacttcatctcactcaccttggtcgttgcatgcacataaagaacaaagaaaaatatagaacaaaatagcgaggagggtggctctcaggctctgtgccgaagttctatgagcaagctactactaagggtgtgtttagttcacgtcaaaattagaagtttggttgaagttggaacaatgtaacgaaaaagttagaagtttgtgtgtgtataaaagttttgatgtaatgaaaaagttgaaagtttgaagaaaaaattagaaactaaaccaggccacaccctaaaaagcggatagcggggcggcaaattcctatgcgtagcagatagcgggtgatattatggatgcttatatttcaatagaaaaatcataaaaaaaactaaaatatgtaaattgtgtatattcactttttgtcagactattttactcgttaaaattataaattgtagattagtgtttaatttatattttgttataacatagccaagtaaaaaaatatttattttataacatataccaaataatggatgatatttttgcacatagcccccgtaatattctcttcgctattttaatagcgcaacaccatcgcgctatcactattacggccag

SEQ ID NO: 15355 - DNA, 7015 bp, Oryza sativa
ccccttgcgcgaggacggtgcacatgcttcgctgctgtttgggcgcggtacgggcaccgcgcgtatgtacgtgtacgtgcacggcggcacggcgcggtgcatatatacaacccccaatcccgagcaagaggcaaccccaccagcgactgcggccgtggctgcggttagttgtggcagagcccgtgaccgatcgatcgctcggtcgctgctccacccgcgcgctcgattcgagcacgagcgcctttttttcctttttgttcttttgcgcggcccgccggaagcgtcggtttggccggacgcggagactcactcgatcaaccgatcggtttggttcgcagctaacgccgatcgagaggacgacgacgactacggattgctatacgcggacggaatatggatgcgctaactgtagtcgaagaaaaaaaaatagtacgagtataccgtatacgtactacgtagtagtgtcttccgagcaggggaagaaagaaaccaaagggcgcgacaactaggccgcggaggtaaagcgcgaaagggcctcctcaaccaccgtacgtcgtaaccaccgctctaggtctctaacctccgcgcttatgcacgtagctagctgagccgacttcaccggtgggagtttcgctaacaacgtttcacgtgtgcccgattgaagttaatgtgaaacgttgatgatgcatagccttgtttagcagaacagagttaattaaatcattggaccccctgaaacctgaactaattaagtggtagtactaagtacattaggtgattaggaggaatggcgcggcaagcatagctgctagtagaacggatgtcgttttctcttcctatcctcatgcatacgtattttcaatggtgccggccataggataacgcattcggcacccgaattgcctaatcgcgacgacattgtctgtcccctttgcttacgacattcccggtaagatagccagggagcttgtatttttctggcacgacattggcgcatacgtacaattatggatgtaacatcttgcgcgccatcacgtggtccatcatcgtagttaggccactgcatgcataataatgcaatccgataccattgcatagtaacaatatttttttctcttgaaataaaatattttattggcagacactcaagaagacagtgagcagacgacatggttgaactgtcaaatgctactagtaactgacttgtcagctcggctgcgaaaaggaagcgtaatcctggattaggtaggcccgtcaaatcgatcacgggctgtaagctggatggctcgctgaactaatcggtggagtgctaaaagggcccgatggttggacattgccatttgccaagcaagcacattccatttccacggcgagaaagggtaccactaccagttcacgattacgtacaggtacctttctgttgcaaagtcgagaaatcaggagaagcggtgaaacagtgcaaggaattagcggcagtgaacgctcatgtggttggtcaaaaaagttaatatcaaagcgagtaaatggtcatgtgctaaaatagcttatcgatagggcaaatttaagcctgaagcttccatcaacggatgaattcagtcgtactactacgaaccaacgagcttggaaagctatatattcaggtgcgccgatcgagcgccacgaaattaaaaattgtacttgttatcatattcgatcgtactactacgaattaagagctctcatgttctgttcgctgttaattaatcgtctaatcataagttcagtgctcgtatttattaatcaaggacagaattctggcagttcccttcggtcagttcggacttccgacgtagatgcatggccaaaccacatgcgataaaaatgaaagtaaaatcacatccgttccgtgcagaaacgtataggggtctaacggctagctttataaggtggtgggctagacgacctggattcaaagcccaccccttctaattacttgatattaggtcattctctaatattcatattttttttaccctttgtgatgagcacctgcatctctgcacgtacatgttactttccccatccaaaaaaataaaagattttatctatatgactatatgaatataatcccttgtatttagagataaagatgttgctagtacgtatgatgtaaatactcacacgtgagctctgcaattatttggtggagtccacgactaggtaccgatatgctcacgtagtatgatccaacgagcaacgagacaaggccccatcttctgaaacaatagccatattcatcactcattcactctgtcacagtgtgagtgaatggaataatggagtgtccctggggagtaaatgctcaaagtgaatctgtgaaggagacttgcacagcgacctgatggatgatgatcgatcgaaccttcctgggtaaagtggaacacgcaaattgacggctagctaataacccaacagcctcccatgcacgccgatattgccgccttcgcgccccccgtgtttatatactacaggcgcctgcgcgccctcaggaccaaaggccgaagccgctcgcgcgcgctcactcgatcgaccagtcgcgcgcgcgacgagagggagagcgacgcggcgccgaaccggctagctctcgtaggcacaaaagcccaaacacgttgcttctgcagtagctagtgtgccgtgcccgtgatcggagatggcaggctcgttgtctgccgcgctgtgcctcactctcttctgcttgctgggggcatgcattgcgcccggggcgcgtgctaacggccggcacagccggcgggacctcgacatcaacctcggcaacggcaacggcgggggcatcagcatcggcataggaggaaatggtggtggtggtggtggtggctccagtggtggctccagcggcggcggcggcgatctgcggccgtgcgacttcgagaacgagcggctgtacaaggcgtacaaggtgatccagaagttcaggaggacggtgacgtgcgacccgcagaacatcatctcctcctggagcggcgccgacctgtgcagcacctacaaggggttcttctgcgagcggccgcccaacatcaccgaccggaccatcgcctccgtcgacttcaacggctacaacctgcaggcgtcgtcgctgaaggagttcgtggacgccctcccggacctggcgctgttccacgccaacagcaacaacttcggcggcgccgtgccggacctcagccggctgcagtacttctacgagctcgacctgagcaacaacaagctgtcgcccgccacgttcccgacggacgtgctcaagctgaagaacgccaccttcgtcgacatccgcttcaacagcttctacggcgagctccccggcggcgtcttctgctcgttcccgcaggtgcaggccatcttcgtcaacaacaaccagttctccggcagcctgcccgacaacatcggcgactcgccggtgaactacctctccctcgccaacaacaacttcacgggggagatccccaagtcgatcgcgcgcatggccaacacgctcttcgaggtgctgttcctcaacaacaagctcagcggctgcctcccctacgagctcggcctgctcgccaaggccaccgtcatcgacgccggcaccaaccagctcaccggcccgatcccggcgtcgttcgcgtgcctgcgcaaggtggagcagctcaacctggcggacaacctcctctacggcgaggtgcccaacgcgctgtgcgagctcgccttctcgtggtcgggccgcctcaggaacctcacgctctccaacaactacttcacgtcgctcggctcctgctgctgggacctgatcaaggaggggaagctcaacgtcgaccgcaactgcatcccgtacgcgcccaaccagcggtcgcacgacgagtgcgccgccttcttccaccggaccaagacctccgcgtgcccctgcaacacctacgtgccgtgtggccacaacaagcactccgccgccgcgccggcagcgagcaggacacggcggcggcggaggaggacaagtacaggacttactcggcgctgcatccatgagcgcgagaaggaagcggcaaaagcactgtgcttctcgtgaacgtgacacgattattgattgattcggttgctcttggctggttgtgttaattgatgtgttgtgtctacttttttgttacttttgtttcctttctcatccactgttacgtacggccaacttagtttcacatatatctgcatgtttaggtaaggtaatggagattttattttgatgaaccacagaagcttgtaataattcagatcaccatgaaagatcagctttaaatttccctgcattcgtcaacatcactgcgcatgcaactgccaatatataatcttgaaaacataatacctcaattttttaatgtgtgacacagtttactttattttatctcaaacttttactaacaatataatatttattgaataacgagtatccatagatctattatgaaaagcgctttagacatctagctatcttaagatggcagaaattttgtcagctgataggtggagttggctttcaatagtttgttgacacgtgttgtttcacctctctcttaactatctgtctaactagtatgtttacctcttcgcattaatattactagaaggacagatagttaagtgaatttaaaagtcgattgtgttatatattaaaaaaaagtaaattacacattagatcacatttgtttaccaatgtttcatggaccaggggtaagcaacacttttcactttggactagttcttcctctctagaccagctcttcctcaggctctctttaattaccctctctctcttctctagttctctctcagctcactgtaccactgaaaaagccatgccaatgatcttgatctttcgaaccattagcgctacgaggaatggcatattgcaggaggtaaataatcttactgctgcactccataggtgctgatcgttgctgctttcaatgaggcaaaggtaagggcctgctcagtgctcaatggagagttgagcgctcagagagagagagagagagagagagagagagagagagagagagagagagagagagagagagagagagagagagagagagagagagagagagaggaggaatgcatgggtccaaggtgaaacactttgcaaaaatttatagtcaaaagtgaaaaatagtgtcatgcccctagtccaagctacaataatggtggtaatcaaatgtggcccattgggcaattaattctactaaataaaacaaatgtagtagtacgctatgaccctctttgtttaggcttataaaccaacttataagctgaaaagtctaaacgtaaacaaacaagtagcgtttttgtttggctttttttaatgccataagtcactcttacattattaagccaaaaactaggttggagaaacttttttttttttgcttatgtgagatatatgtattactctactattaaacttagacttttaaatctattggcttataaatcatataaaccaaaatactgacttaaaagcctaaaacaacacaaagaggacttacattcagaactagttaccatattcactctaaagggtttaaaattatcatctattaagagagaaaaatatggaccacaaattagcaaggactagctagaaaaagactccatgtcaagaataccacttaaaagccatctaattcacctaaatattagtaaccaagggtgcatgtagaaaataatacatgaataactgaagttatggtaaataaaaaagaattattcttgtaaagcatatggcatatgattagctaactaaaacagtgtgtaaataaaaaagtccccctccccccaacccaaccaatatcctggcaatggcctttgatgtactaaatatcatccaacataattgctatcagccaatatcaaatttgaatccaaccatatagctagcacatgcagattaacggtacagtactcgagttacaagcaacatccacgaaaaaacaactgataactgagaagcatcatcaccggtttgatgcagagtgcacttatttttaagggtaccatggaaaatagtttagctagccaagtaatagggttattcgttgttccctctcccagcttttggcatatgcagtttgaatcgaaattacacaaaaccatgaggcagagtcagcttcttcggcatcacagggtaatctccattactcaaggccttcttgctttcttagaactggtattttcttttctcccttgttggatttacttcctcctgatttcaaaataatgggtgaaaggaaaacactagcttcagtaccttgcacgttgaacagaatcaattcaaatacaactatgcaactaataaagagtaaggtaaaatattctaaatcacattatacaaaaccaaatcacagcctagatcatgttatttattttgtaacaagcttctaaaattgtatgtttaaaattcataccactacgttcgccataggaatccattgtcctctgcaaataaaattataagatatatcaagattttgtttctgcaaaaaaattttagtacagcacgtatacaatcatataaaaaatgacctagattgattttttttcatataccttactgtattataaaaaagtgacaatttgagattacaacttacttttagttttcacacttttgttccagcaaatcccaaacatcaaatattgtgctaaattagactacatatataataggtattagcacaaaatagttggccacctaccttcttctgtagcttttgtcctttgaacatatctgtcccgttgactagggttgttttcaaaaatagtttaacgtctgacctggaccgtaactgttttttgtatttctgatgatagtagaactgcaacaaaaggtattacgaaatcacaattcatatattgtaaggaagacttcatggtttagaccatcgacttaaaaaaccaaaaaaaaacacgagatgatcttgtccatgcccaacactaa

SEQ ID NO: 15356 - DNA, 10837 bp, Oryza sativa
ctaccattgccactgtatattttttttatagctatgacaagaggatgaattgaacatgcaagtttgcttaatccgtaactccatctaatgcggcattatactttctcggggcttaggtcaattcctcaaccacttgattcccagtacggaacccatgtataatggtgtgataaacccacatgacccacttccaggtcatacatgggatcggttcctgaaatggtaagtcatgaggcaacttccgttaccagcttctaaaaagggttgggaatcaatacactaattaagcttgatccatatgcatgtaaaggtcgtttaggcttgtagatttaatggttgacaaccaacaaacatatgattagaccagacaatgttgaatgcaaatacattacaattacaaggattcaactcatgataaaactcgtgtaaaggaattaggcatgccatcgattatgtatgaaaactcatgcatgcccattttcccatgaaaaaactcataactaatgagaaaccaacaatacctatagtagtaagaaactagagattaatcaaccgtgatctcattatcatcaatgatgtcatcaaggcagacaaaatcaacctttacgtccccacgttctagatgtgcgagaagggatccattgaaatggatccgactaggtacatccgactctacagagatggagcgtcacctaaagtcaagtgtttggttatcgacaaaaagctagctcgtgatacttcttttgaatctgggtagatggtgggccaatagtgcttgtttagttcaacatcaccaatagttggaacatccaaggttcgatgtggattctgagccaatgcctcgaacgcggatatagttggccgagttttctagtctaatttgcaacatgtcatttgtccaatgacttttgctgttggccagctttccttaacctaataatgcattgttacatggaatcttggtggcatgattatcatagaactattcttcacgttaaatctccaatataattcacaagctctatcctaaaatttcaacattatcgaatccttattgaaggagtgtattggtgttaagccacaagagtatgaccataattggttggtccatacaatattagcaatcaagcttgattcccttcttgaaggttttgcaacgggagaactaatggcgatccttaaatttccatggcatcggatctcttgtcatcgtctttgttcattcttttgaaaagaaactattgcacaataaatttaacatagattattttccccaagacactaatctaataggcatgatacttttgatagttatgttgacttaagattttctttatcccttatttttgctagtgtgatgactatgttcatccctagctattggaaacatggagttaccacatccatgatcagtaaaaaagagaaagaatgtatcatctttcaccaaattaacaaccattaattaaaaaagcctctacattcttgcactgattgtcatagagcagatatgtaagacttgaccctccaaattatgatctttagtgctccttatatcgaactaaaacctcctctaccatattatctccaactaattgttgaatattatgtgaatttatagtgtaaacatgaccgtgacttgcttcacattgtgatattgtttttgaggctatattccgatactccattttttattttagtagttctaatatcattttttttatggttctaccatttttatttccttttttaggaaaaaaaaaggtcagcaaaatggtatttttctgaccattttcatcgtttcttcgtgggcaaacaaggcttgtaatggcgaaacacacatgcatacatgttaggtataaaagggttaaccattgtcaccataaccttatttttttatgtatattgggcttgtgtgtcggcctctagtccttaagcccttgaactttgacctcgccaaccaccgccacataggcacacccaactatgtcctgccgctagtatgcacatgttttgctcgagattgacttcctctagagctcccattggaccacccccaatgccaccagatttgatttcttccttatctttcttgaatcttcattatcatgctatatgtgaattcaaccactccggtcatgtctacatccatatcagaagcccatttcccttgatcaagagcttggcttggtggacttgatgatcgatggcaatgacaaactgtatgaagacatgtgctctggagttatatagatatgcgctttgtcgatgtaagcgtcaacattaattagcaccacaggctttagctgccaaccgcagcatgtaatgacccatgatggagtttctacccaaatagctcggttaactttttctaatatttttggtaaccaatatttaactattttcttttaaacacaagaaaaaaaattgcagctccaaagtaggcacttaggagttacgtactactttttatttagagggaatgcaaggttatgggatcttgtccctcatctctgttcggtatcccctaaatcatcgacgccggaggatcagtaccacctcctctatgtttgagcttgagctctaccaccacctcattgacttagcctggcggatgcgatgaagccgaagcataacctctctagatcgatggcaaccatctggcgatagagaagagttaccgacgtcctttctacttgatcacctcctccactctgtggcgattgtgatggagccagagctagagctcgaactctctccaccatgggcataaatctagttgagcttggggaggagagatactatgatgacacaagaatcgacaaggctagcgacaatcatacggacacatgaggctcgatttgaaggagtcgtcatggtcctgtgggctagtgaggagctcaagctcaccgaggtgggatggccctacgacctagagccagcatcttcgctattgtccaaggagagaggggtaatagaggagagcgtctgaaagccccagcctccaatgtcgttgtcccgcaaagaccacacccctaccttcgccatcgctgctcgatttgtattggttggtatcacctaataccccacaggtatgacctaataactacgggtgtcagatctgataagaggtaagtcaaatctgatgcttacctagtatcatcccgttcgaatgggatcccatacaatagctatcctcttgttcagtggtatagggagggggtggtgtcaatgactaatgaggactattacccttccttacacctgtagaacatatctatgcatatagtttctgtcttaaagaagactttgatctaattctacgacaatttactcaattacttaagaacataatatatttttgagggaagcacataatacattatgaagttcctagttatgaaaatacataaattaatttacaccaataccactatcataacaacttttcaatttgaataaattgactgtgtaaaactactctttgttctataaacggaaagtactaatgatcccctctatttctccacacctagtactttctgcgcaaagattcccattactgactataatcaaagatagtaacaaatgcaattatcaaaacatccaaatatttatcacaaataggaactataatgtaacagatgacccctcctacatgtatttctatatgtacctagttagcatgccgattaattcatataaaacataaccaatatattttaaatgggtttaataatattcaaccaaatcgatcgttttattttggaaatagtatggattagtcgctactctatgccatcggattgtcctgttttatagtaaatgcattcatcttctaatgtacaacttgtagatactgataaaattgtattaatagtataaatgattacattatcgtgtggtgaaaatatccatttcatatattttttacatgataacacaagaaagctttaatttctttcaagcgtgctttgttagatattataaatgtgatgatatgtcaagattgaattagatgtacataatattcatcaatatattgacaaacaaatggaagttatttacaagtcaacaaaacaagaaaaaactaattgatagtatgtcataatattttgaaagaaaaagtaagaagcctaaatactattgcttaaaataaatctagtagatcttgaaataaaacgcaaacaccttattcaaaagtgtatcaatcctcactattctagatatatcaaaaatatatataaaaaagcaaagcatatgtaacaaatttaataaagaaatgtaagattgcaccactaacccaatctttatgtccatcatcccttatttgaaggaacactgtccagtccccatctttgtagttatcgagttgtttcatccattgaggaaccggaacctcttctttactcgaatccactttttggtgaaaagccacctcttgcctgaagggaatggagttcaaaggtacaatatccaaaggttgattattgccaagcttatctggaccttgaagattcaacatggatgacatatcagacatattttcctcttcctctaaatctgcatcaatcactataggaggaatgtcatccagagtcgcctctgagtcagaacttgaatattcagaaccactcattggagctacgccctttgaagcgttattactcatagagagagagagagagagagagaggaaagtagtataaaggggatagccttaaacaacttgtcaaatatataatactaacacaaaagggtccaaaatagatgttgtcgtgtgtgaatacgtcctggttgccctgaacatttacagctcatgcttccaactggaattggtggcatactgtagtaatgacaaaataaagtgtatcgctttaactgatacatatcttcctccatacaaggattcaacatttaatgcgatatatatttcttcaatatatgggcgtatcatttaattctacatatatacatctttcatttgcacaatttaattctacctatattttgcttcttatttgaagatccatttatgtgatacttttttaacagatacacatatcttcctctgtagcacaaggctggatcattaaaatttaatgtgacagatattttgatccatttatggctgtgtcatttaatacaatacattttttcttcttgtatgggtgcaccaattatttgtgacaaatattttgttcgtatattcacatatcattcaatacgatacgcattttttttcttacaaggatgtaccttcaagaaatacatgctttcttcctcgtctggttctgctgtttgttgcaatacacgtcctctaacagatgcctgtatttacaaagacatttgtcccaccaactagagggaaaaaacaacgtacctcatgacaagcatgcatctgtggtccacatgcataattacaatattataattctttatatctttgcccttttttggatgtccttccattttcttattttgaatgtacatctacataaggatagtgtgaataatccagagtagtaacattctccaatgctttattagctatgtaccaaatgaatggcacacctaggaatgtgttccaagctgtataattttttggatgaatgtacaccgcaagtaataggaaaactttgaagcactttgtttttcttttctattttagcagaacaattggcttttctaagaagcaaccaataaattggttagccccaccttaccatggtcaccttcgcatccaaataggtcatggttgtagcatgttacacatagggtttaattactggtagttaccacgaaaactaggcttaccatcgagctttagtagcggaaacgaccagtaaggtttggcaaaatttatttaaattcatttctttttccaaagagaggaaattaaaaataaaatcatataagtagtatagtgctatctggtgaaacatttatgaaatatatgaagttaactttatattttgtacccaacccaagttgaaaataaaaaaaagaaaaataagcaaatgggctaggctaatagtgagtgctattcacaaaacctatcttagagagccgatcgtgatttctactatgtttcagtttccaaaatacaaaaatggtcacacgaaattgcatgcttgattgctttattcttttacatcttctgaatttgccctactttttctagaattatctatgatttacctgaatttttgaaactttttctcacttttcgggtttcccaagaataatgtttgtccccctgagtttgaatttttgaattcaattttttttaatatgaattttatcagggttatggataccacatacctaatagtagttgactaaatctcggcaggacccaccacatactatgtcttatacggaaacaatcttcggatataggaggagttccgcacaaggaaggatgaatagagttctacatggaaacgacaagaactactcagattgtatccatattggttttcctagttctacttggacaaggggacacctatgggtataaatacaaggctccataggaggagaggggacacgaaacaatagatcaagacataagatcaacatacaagccaacatacgccaaaacaagacgccggatatcgacttcagagataagtatggctagtcccctacagcgtctacgaatactgtcaggagagacatagcgatgtctttgatctcgctggatgcggattctaggaggaaggctaccctgttgtcgactatgagtcagcacttcagaccgccatgtcgacaatagttagataggctaccccaaatattgtactagtgtgattatgatgaataagagcaacgaccggcttcgaccaacaggagtaggcttattacttgacaatttaggggctcgaacctgtataaaaatcctcgtccctatatcttttattacaatctcgcatatatcataataccaacgatcctcatactatgcaaataccggaatcgcgacatcaaacgtcgacaaatttcatctagttttcacatttaccatgtgctatatgtgttatcctagggtggccgtagggtttcaattatcaaagcacaaggtcactgataagtccgattttcccgtttatcgctacccccgataaaatctcctatcggccaaacatttcgggttttttttgaattttctggacatagcgtcaataactactacaaagttgctttgattaattcgttatgacctgtaggttttaatcaataggttttgtgttcgattcaagcaaagatatgaatttcttctctctctcttttttcacttccatttgcttgcgttgtgtgtgctataaaaatgttgatattatctcatttataaagtatatattaattttttatacaaaatggtttggatataatctgtatgatttcctaacaacttttgttcaatttcttttcaaattttatccaaattttttttctatcaccgttagaattccgataaatctgataatccctttatcgctacccttcgatattttttagctatcgataattaaaactaactgtggaaactactagctttttatttttttttaaaaaaggaaacaaactggccttttctaagatacaacaaataatttggttagccccacctaaccattatccacatcaccacccaaatagtccatcatggcacgcattaagcccatccacaaccaagatatcatgcatggtaactaggtttacaaccacgcaaggccttcttcgtttagtcaacaagagagggattagagggattgtgaaaaattaattccacatctcaataggtgtggaattattctcctccaaatcctcctcgatccccttgtgggtgggattaactgaacaaggtctaaatgatagccaatctaattagttgtagtcacagtcaaagacttagtgcaataggtgatgttgtcaagctaaatggtcttatgggcgagaggggatagatgcatagtactccatctatcctaaagtctttatccaatttcattttttgtatttttttttcaaatgagatatgcttatctgtagtcttcatacatctaaaacttaaataaaagggctgtcttttcattttacaatgctaaattaaatttttgatcgaaactagagcgaccatcttaatattcattggttgcatgcaaacatataatttcttgattttgttatatgagggatgaattaatccctccttaggttgtgttcttctctcaactttcccaacctcttctctcttgttttccgcgcacacttcccaaattgcatttttttcgaagattttctatagggaagtttgtcagggttacggataaggtataccctttatccttggatgtatgttgtatactgatacggtatacccgcgcgtatacgaatagtttccgtatacgttaaggaaatctatcacgtgatagagacggtatctacggatggaaggagttctactcggacaaaactgggtctttaccatatcgtgaggggtccgatatctccgagtcctacttggagatcaactgacccgcggtatataagggaccccctgggcaggacctaaggcatcaaatatcactgccaacacacccaccacagcctacggagctagagcgtgcaggagccaagtcgccgggagatatagtcggaccaactcgactgcggtcttatcggtatcatcgagttctgctattccctttgtaatctgtggtttccatcatataatgccataccaactggattagggctattacctaccaagggacctgaactagtataatccttgtcttttgtttgcttgatatcgtactacgtagatcctcataccaacggaccccaataccctctatatccggtctacgggtatcccccgtcgacaaagttgttttaaaaaaattatattaatctatttgtcaagatttttttaactaatacttcatcaattatgtgctaatattttgctttgttttccgtggtggtgtttggatccacggattaaactatcacatcggatgttttgacattaatttggagtattaaacataggctacttataaaactaattacataaatgagagctaattcacatgacaaattttttaagcctaattaatctataattagcacatctttatagcatcacataggctaataatagattaattaggctcaatagattcgtctcgcgaattagtccagggttatgaaatgggttttgttaatagtttacgtttaatagttctcattagtgtcaaacatccgatgtgacaggaatatttgggagacttcctcattgcaaggctgttaacagtcatatatttgagttgaattaatttagtcggtctgaaacgagcttaaagaacatacgagtatttttccctatgcaaaaaaccctttttaacctttgtatgtggctgtgtttttgaaatgtacacaacatgcaactttttgacaaaaggatttgctaatcaaatccttctctcccacacaacgcactccgaagtccaaggaagaattctccccatcaaagctgtaattgcaaagccagcaatctcacgctgtcacaaaatcagctaaacttgatgcctatcgcacaatgccaaacccaaaaaataaaaatatcaaattttggattgcctcgagcccctgcattttgtgcggatcaatgcatcggcctgtagtagctgtaggtgccgtagaaggtctgcgtcatggtgagcagcagcaacaagacaccggcgaccaccgagacgatcgcccatgggttgctgaagtagttgtgcttgaggctggcgatccaggtgctccacttgtggtcgtagtacctgttcacctggtccgagagccccgagaggtagctgtcgttgatgtcgaacaccacctcctggcacagccggttgaagaggtcggccacctcggcgtcgctgcccagccagtgctcgatgatgccgcggtcgtggaggtacttgacgtcgtcggcggagttgatgaggttgtccatgaagatggcgtaggaggtgatgttgttgccgcccggggtggcgatgtccatgtggcattgctcgaacgcgatcaggttgaggaagagggacttggtgccgtcgtggatgaggatgcgcgggatctggagcacgccgtcgtggaacctgatgtcccagaagcggtccgtgttccgccgccggcaccggatgccggcctcccggagctccgacacgcagtggacgaactgctgccgccgcttgtccgccacgcgccggagccccgaccacttcttgagccacagccgcgcggggggcggcggggtgggctgcagccccgcgcggaggaggctgcgccggaacacgtcgaggcaatggagcatcgggccggacagcgggtcgaactcgaacgccgccgccgccggtgaggcgccgatggaggactccagcttggaccggtccttgcggagcagcggctcgtcggtcggcatgagcgggtcgaagaagcgcacagcgaggccggcgacggcgccggtctgctccgggttgccgagctggaggccgagcaggaggtcgagcacgaacaggggtatctggttctcgagcaggatcatgtcgttgcggatggcgtgcatcgcgccgcgcatggcgaagatggggtcgtgccgcgagtaccccaggtcgtcgccgaaccccttcccgccgtcctgcgcgccgcggaagagctccagcacgaaggtcccgtccagcaccaggcactcgacgagctcgttcccctgcatcccggcgacgcggccgtcgtagcaggcgcgcgcccgctcctccatcggccgcagcgcgtcgag

SEQ ID NO: 15357 - DNA, 2683 bp, Oryza sativa
ggagcgggccgatggacaccacctgcggcatgtacgcgcgctcgtcgccgtcgcggagcgacttgggcacgcggtacacggacagccgcgcccacgggcacgctgcctcctcggcgcgcgcctgcgccagcttcccgcggatggccaccacccattccgggtcctgcggcttcgggctgtgcgccggcgactgcacctggaccttcacctcccgctcccgctcctggcgcggcggcagcgcgtcgcctcccgctccggcggcctcgccgttggtgagcagcggcaggttgcggttcagcgcctgccacagcggcagcgcgccgggcggcggcgcggacttgttgaggttggcatcgacggtctccttgagcttgaccgtgatcaggtaccagctcaggacgtccttgttgaagacggcgaccatcgagatggaggctggcagtggcaggtgcagcggcttcgccggcggcgtggggctcgccgcagtagcgtctcgtggttgccaagatcagtggccccgggacagagagagcaagccaactcgagagggaggcgaggcaagcaatgtacctatgaatatcttagaacgataattttatcagctgatgatgattgatagtggaatttttgggattgcttgcttgttgtaaaatattgtgtggtctttgacaaaattaaataaagtttcctcttgcgatcatgtgcaattttcaacgatggacattgctgccagcctgcgatgtgcgctcatcagcaacttacgctgcattgcacgtactccattccgtcgaagactaattggcgactgcacgataatcccaccgctgtaatataaagaatatagatactttggatttgtaatataacgatgtattccatctaattaaaatattttatattttaagacggattgagtatttaactacgacacgtatgatcggtactccctccatttcataatataagactttccaacattgctcatatttatatagatgctaatggactagacacacatatatatatttagatttattaacatttatatgaatgtggttaatactagaaaggcttattatgaaatagaggaagtagttcgctaccctaacaatctcagagtttttcttttccggagaggatctagacatgtagttcgatccagtgcactgtaaccgcacacaagctaacatcgtagaagtacctaccacaagcgactgaccagcgatctgaaccagaagattactctacccgagcaaagcgccaaccagaagcccagaggcaaccgattctccttacgcttcgggaatcgtggaccagcgaaagctggcgaggcagtccggcacatggccgcatgcccgcatacatgtatccccttgattcccatagccgttgggttgcctctcggggatcggaagtgacgagctagtgcgacgccacgatgaacgcacatcctcactcacccagcgaaagccgaacacccagctgaagccttctgccggcatattgtcacgcgccccactggcgaaaaatcacgccgcccgtgctacgaaatgtacgcgtcgatgaagatggccgccaggtcaggtcaggtcacgtcaggcgggtgcggaagcggtgggccgatggtggcaggctgggcctgttggaggcagcctgcgggcaattaattggaaggcctgcagtagcagcatgggcgcgtatttagagcaagttcaatagtataacccgctacagacttcaaattaactataactaatttaatagcttatttatataatagttaattataaaaatatatattactcctattaatatccggtctcacatctcatacacacatacgtcttgaaattcatgctgcagctggctacaaatatatagcccgctttcttctctctcttctatttttttctcgatacgtggttataggtggcttatagcctgctattgtcgctgctcgtatgctccggggccgggggcaaaggtggataagctctttcggtgagacggtgacaattattgaagtaactgatcgtgattgtgatcccttcattgcatgatcaggcaatatttgagcagtagtaatttttgctgcacaatagattgggccttcaaacaggccgatgggcttcagtgcttcaccaagggaataagttcacttcgtgacccttaaaaagtgatcaaaatctaatccgtgaccctaaactacaaaaccggatatctcgacccccaaactcttaaaaccagtgcaatttgactccttcagcgtttttggagagcggtttcgctgacgtggcgcctacgtggcatcccagtcatcaaataaatttaaaaaattaagtggggcccacctgtcagtgactccctcctatattctctctttcttctcgttggcatcaaataaattaaaaaaaataagtggggcccacatgtcagtgactccctcctatattctctctttcttcttgttggcagcggcggcgggaggatgaggggagcggcggcggctggcggcaccggggcgcagcggaactaggggcggcggtcggcagcgtcggcatccggtggtggggacggcgttcggcagccgggggaaggagccgttgcccaatcgacaaagccatcggcttcctccgcctcatgccacttccactcgcttcctcccacggcgggctgcaggaat

SEQ ID NO: 15358 - DNA, 4394 bp, Oryza sativa
ctagctgatggattggtatatagctcggcacgggcagatctcgcggagttttgggggaaattttttttctcttttttcttttggtgtgatactagaaattttttttttttgggagtagtttttggttgcgggatacaagaggccgtaggcggagagcacgcggcggaggcgagactctctcaacggtgggcgaggccgacgggggaaggcgttgcttttatcagcccaccacccgtgggagggaggaggacggagatgccagctacgcgcctacgctagggtttacgcgcgccccgctcgcctggacccggtgtttggtgcgccacgggagcgggtggccgcctggtctacacggggagcaccaagaccgggtccacgtatcctaccgctcgcccgtggttttttctcttgcgtgagagcattcctgtctcggtggatgggttggggttggaccgttcgactcggtcgtcgtcgttcgtagggaggagtgcttcgggttctgtgcaaattggtctcgaggcctgacgtgtgttgcgtcttgaccgcttcgttgggttgggccaacgttctcgaagggccgggccttttgggagaattgaacgtgtttttttctaaccattttattagggcaacaacaatatatataacaaaattagtccatatagatgggacccggaaatgctactgagcgagctcgcccaaggcgatcatattcgggccctcctctccacctggttttcttttttagcaccgcattactttcctattttaataaatttatacatctcgagtttacacatctaaagtttagagactaaaagtttataagtcaaagtttatatatccgattcaaatttgaatttgaattcaaatatttttttatatatagtatttctatacataaaagtttataagtcaaaagtttatatacccgtttcaaatttgaatttgaattatatctgatttaaatttgaatttgaattcaaatattttctatatatagtatttctatatatctaaagtttatacacctaagtttacagatccaaagtttataagtcaaaagtttacatacccgatttaaatttgaatttgaattcaaattttttatatataatatttatttacataaatttttctaacttttgttttttaaaaacaattttgtggtgttctgtagtagggaagagaaggagaggaggggggagaagagggacgtataggggagggggtcagcgatcacccgcttcatacgattaattatttttggaggaatactatccaaaaaaaattccctttcctttggtgctggtttcacaggaaaagtccaggaaaaaatcatccatcacaagctctttttttgcttcctacatgcaagtcctagacagtcaacttactgtgatccgcatgccctcaacttttgtactcctttgtttttcattattctgttttacgcttaaattccttctctattcctatacttttcagatcctatggttttcctatcctttaatccaaacgagcccttatatttacgaactctagaaaataaactagaagctagaaacaagtttttttcttcttctagattgtttctcaagactcatactctcccaaactcaattgtactgcttggagcctttggatgcctactttcattaccatccagtacccagttacccacagaagaaaggcaaagaaaatttccagccccccatgacgaagcatcgaagaggacatcattgactaccaagggaattcgttgcttttccagctcagaagtgccctttaaaaccaatcgtgtctaacacatccacggtatcagaattaatcgacaacaaaatggcaattttcccaaggactaaataaaagtacagcaaaggtctcattattaagaggtgaaacttagggcatgttcactttgatgccaaaaagaaaccttaccaaattttggcattaccatgacaggatttcttatatagttaccaaaatttggcagcaaactaaatgtagccacttttttttgataactttaccaaaatttggtaaggttgaaaatggcctcaaagtgaacatgcccttattttacccagatgccatactaacttccatcttcatacctactattcgctacgcagttgcaaccgagttgcttgcacataaacattagactatcgttaggatacctcgctactatttgatattctgattgaactcattcaattaacactctcaaggatgtactaacagagggcatcaaattggggagaactacaaatacaagaaggcataccatacataacatgaaatcttccactatcagcatatcagtatcacctactgcctttaactaaacttcaaagcaacaactagcatatcactatccaacatctctataattaacgacaaaaaatggcacttggcataacatatgcattatcttcattgtttacagaataccatttcaatagcacactacatgtataacaagctagataaatggaagaagaatcttaaaagagaacacaagttcaattatgcatgtttggttctaaaacctaatgcagaatcggagactgcagtgcaaagagcaaccaattatatataccatgttgtaggctgccctatacagctaattattccaatgtgctcgacagcgatggcagctatttttagtactgaggtagttaagcttgcaggccagatttctacaactcgaagcaaccaaagaaataaatttgtatagatgcatcctaatcatcaacaaaaagctaaaccaaacccttttttttaatcagagaaagggcaacaactgctgatgaaatagcaatggtaacacagaattatccatcatgatgattttgcgagaactagatagtaaaattaataacctaaggaacatgaatatgagattagaatgcataaagtagcaaataggttcatcaattttttttatctcacatcacagagctggaggattgccaaacctcctcctgagtgctgacatgacgctcctcatcctactacttgcctgggcagatgattgtgcattgctggcgttagtcgggagatccatggctgccatctgatcagtaagctctgtaatttgcacctgtccagcctcttgcccgccattttcaattgcacctccagcatcacgctccaatacaatatccaagctgatagagaatgagccacccctaaccaccttcaggttctcaatacattcatacgatacgccccggcatctcttcaatttcaccttgaccaagctggggcagcccccattcagtgcccacatcccacggtctgagactgggcaacccttgatgcaaagcttcttgagcgcagcgcagcgctcagccaggcaaatgatctcaggatccccaacggtctcacacccacaaagggcaagacgctccagtgagcggcaatgttcaccaagcatacggagactctgcacggtagggttgaccccaatcaagacgagctcttgcaggtctggacatcctcgtgcaacagccatgaggccatgatccccaatcctgtttgtgcgccaccatcaatatgtagcttgcgcagtttgtgacatttctcggcaacgctgattatgcctgcatcagtacactctggggtcttgacaagaaacaggacttcaaggtttgcacatgccgatacagcggagaggccgcggtcacccacctgcagcttctcaaggtggagctcaacaaggccaggtacacgcgcggcgatgacctccaatgggagggcccaggagccagagcacctcaagatcttgagcgaccggaggttcggcgacgaggcaaccaacggcacgaagcagagggcgctgtacaggtctttcaggcagactgaccgcagcgacgaggcgggcgggaagaggatctcctcggtgatggcggtggtggcgccggcggtgtcagggaggccgcgaaggcgcttgacggagaggtcctcgaggagggggccgaccggaggacggcgacgaaggccttgggcccaaaactgcaggacgcgacggagagcttgcggatcaccggcgtggcgccagcgagcgacgcgagcccgtcgtcggagagctgccggaggccgcggagcttgagcctggcgagccgcgcggacggcagcgcggcggccacctggcgcgccccgtcgtcggagaggctgtccgtcccggagccccgggcgcagcggagcgcgagcttgctcaccgccgtgaaccgcgcgaagatcccctgcgcggcgtacccgagcgcggcgcgggcgtcgagcgaggggcggtggcgcgtggaggcgtccacctccttccaccgcgcgcaggtgagcgagcacgcgttgcggtcggtcggggtgagcgacgcgaacacgaggga

SEQ ID NO: 15359 - DNA, 9104 bp, Oryza sativa
ttctggcgagcggcggagccagcggccagtgtatgaacctgtgggagcaacaccgtttctgaccggtttactatactaggaatttgtttggtgtcacccgaagtacgactatattaaggtctgtttataaaacccttatcaaattttggcatgtcaaaattttaatatagctgtcaaaattttgttaattaaatatagccactttttttttataactttaccaaaacttaataagattaaaaatagcatcaaagtaaacagtctcttaatctgaagttgttgcgggggagggatcctctctttactctcttttagtacgtgcttgacctaatcctaaacaaaagaaacgggcccgatcaggtcaggtctacctcaacctcaaccggacaattgccgtgtggttgcccaaaatgggtggtctatcgcgtgacgtgccgaattacatcgtgttttgtattcggtgcaggtgtcgatttcgcgtggagagacccacaaagagctgacgaagagaaacgaaaacttgcagcaaccattgttttgttggggagaagaaaaaacccaaccaaacaaacgcattgatgacgtccacccaaaaaccacaaaaaaacgtacggctctagctacagtagcgtaatgctcgcacattgaaacagtaataatcccttgctgttgctgaagactgtgtacatcgtacatccagcatgcgtctacgctactgctcagctgtaccgacgcggatggcagttgcatccccattatttgccgggaccggtgcgcaccgggtcggaatccacgtcggtcagcgcctcagcgggcgcggcggcaacaaacagcgcgaacgctccacgacgcccgcctttgctggagaagagggaaattcggagcagtttgttgccggtgagcctgcagaattcgcgcgcgcgtacactatttctgcagcttgcggctgaattttaacagggacatcgcatcgtgatcaccacgatatccacatccactgttccgttctatagcatcgttccgtgcaactacttgaggttgatgttttcagaatcttcagacaagcaccacaagcctgcatcagcctttcggtccatttttacagactacacaagttaaagaagttgcccggaaacattagcttcggtccagaaattcagtccatgcaatggtgtagtctttatcttgctttacagctcaggcatacacacaggtgtatgtacgcagaagcgtagtaatcagtggagtcaaatctagctaggaagatttcgctttgcagttaactacgctctctttctgctaagtggtgcagctttgctgaaaagacgagcttcccatacgtagtggggcgcactactgcagaacaacaagaagaagagaaatggcgcaggacgatgtgaaatgatgaagtgattatcataatcatgtaagacaaggatgttgcttgttaaatactcgtggcctgctctgaaaagaggaggattctggataagaaaaggagcagccattggttgctttcagcacaatactcagcttatcctgtcaaagaacaaccaacactcgagtaatcattcaccattaactttcagtgaatcctacctacaagctttctgaatcgcctttagcggctctgcactcattagctaaaattgcaaaattactggaataaagaccaaagcagttcatgttcatgttcatcctgcctcatgagtcatgaataaagttacttcgttctacttttattgtcagatttccatttgatgagtaatgagccttcagatgcaaaattgccgagctggagccctggaaggtggcgcgtctgtatcaaggagccaattttgtctcttttttggagtgggatacatcaagaactactttttatacaacttcttttgtgcaattgattgatcgatcaacagtaatacagaggagatagtaagatacagtggtttctgtaagtctattataatctcatccccatttcgtcttgtctgttgggacatgggactgtatcacagtacagtcatgacaatcgcaccgccgtgaactaactgcctttcgacatgctaattatcagttcgcaactgtattattgtaattattgctgcagtctgccgaaacatttcactcaaagaatcgagattccgaaggaacccggttcttttctttcttcagccgaggtggtcaggtgggtgtgttagctatacctggtttccaactggaaccatccacacgaaaaacggagcggtccattagcgcgtgattaattaaatactctattagctatttttttctcaaaaatggattaatttgattttataaagcaacttttgtatataaaatttttgcaaaaaaacgcaccgtttagcggtttgaaaagcgtgcgcgcggaaaacaaaggagatgggttaggaaaaggggcatccgaacacaagtatagccaactactagctctaattcatctatagccaatctaatagcttattcacataatagtacctataagcatatactacaccattaatatatggtcccacctctcatatacacacaacgtattggagtccacgcggtagctggttacaaatctgtattccgctttccttctatattttcttctctcctccacatgtgcttacagctaacttgtagtctgctattgtactcgctctaagggtgtgatgatgtcacggaaactgaggattcgttgggtttaaccgtttagagcaagtataatagtgagctataagcttactgtaaacttatgtggaggagagaggtaacaaaaaatcaaggggtggctctcatgtaagagctagcttaacacaatatctaagacaaatacattaaatgtataagtgagagatagcgagaggagaagaaaattatagccaaacttatagctaattttattatatatgttggcttaaaatgagttaatagtagaagttgagttatactattgtccttgctcttaagcgtcgacggaaggttgatcgattggtgggaatttgggtggtcaatcaccgcatcccatgagatcgttctccaactgatcgaatcgcaaggagttaccggtacttctcgcatagctatttgctgctacgcagtctgcaaagtaacagcaaaatcttcacgggaacaatgaccgaggataaaaggaagtgggctttctgggatggaaacaaaggtttcattccaggatagtacggtataactctggatttcaggattggttttataattctgacttccagtgttgaccttttttcttcagaacgattggtttccatttagatgaacaaggcttcacgtacgattcatccagtgttaggaagggcctgcgaattcggcatgttttctacagttaagatgggctgccaaagtccaacaaccttaaggctcactgggatcagctaattacagtaattgctctaactgtttaattaaacctaacatgtttgaacagtgatattcatgaaacttatttagtagtaaaaaaatatagtacttcatccactcaaaatataacaacttttaatctttaaaatttgtatcaagtataactacatattcatccacattctatttttaactgatcacaacaccattcaaatttccacatacctcatctttctaatcaatcacaacattcttctatttaattctaccaacttacttagcaatcgtgtataattttaaaacttcttatgttttttggacgaagataatactccccgttataaaatctgagctaatataccacgggatcccgtctaaatgggatgataccgatcaagtatcagattgatctgatacccgtaggtaccagtcaccaacctatacctcgttagtattagctaatgcctgctgggaccacgtacctggtcgatacccgatggtactaggcgtggtacctatcagtactagacctggtacctattgagtatcagaccagagcttagaggggaagagaataagggatgaagatggttatatgtgttggttctctcacctggagatgatgacgccaagctcgatcaatgccaaatccaatagccgaggatcttggggtttcaaatttgtcgaacatgagcaacaagaaggacacttcctcccctatcctcccttgcacttggcggcaatggtggtcggtggtggtcttactcgacaacaatggcatcgacactgcctcatcctctatcaacggtgatggaggcggaagctccatgtcttccatcaatgcaatgatggcgcttcccatctccttcggctacgacttcctttgtcctcgcagcgtaagtccacctaattttattgtggtcctacggcacaccctagccgatatgggactgttttagtgcttacctgcatcttgccctccgacttgttgctccgcgttgatccttcttccccgccgtgtcggtccaagtcttctccgctgggcataggtgccggagaggggatctcgccccggatggtagggattgggtgacggtatcttgtattttctaacatgggttatttttctttagtgacaattttgttctttcccctactctaacaccacaaaatcttccccttgagttgtgattcttactatgaacatactacgtccaaaccgagataaatatacacgtctaacagaatatctaaaccgagagaaatcagaaattagaaagagaattcacatcaacattgacacgggtggttttcgcgctgcaccaatcacgaagcacccaagcacgaatctcggagcgccgatgcctcaacgcatctgagaaaccgttccaagctcgccgccgacgacccggccggaccctcccacgccgccgccatcgcgcgcgcgatctcccccgccttcctcctcatcgcctcgcccttctccgtctcccccatcaccgcccccacggcctcggccacctccccactctccaccgccgagctctccaggttcccgcgcgccacctccacgcacaccccccactccaccaccaccatcgcgttgaagaactgctcggcccccaccggccacccgagcagcggcacgccgtggcggaggctctcgaggatggagttccacccgcagtgggtcaggaacgcgcccgtggacgggtgcgccaggatccgcgcctgcggcgcccacccgcgcaccaccagccccctgcctgcgcgcgccatccggtcctcgaatccggcggggagccacccgggatcgaatccgtccttggggtcgaaccccaccggcggccggacggcccagacgaacggccgcccgctcgcctccagccccagcgccagctccgccatctgacggatgctgatgctgttctgcgacccgaacgagatgtacagcaccgagcgccgcgggtgcgcgtccagccaccggatgatgctggtgtcgtcgtcgtcctgcgatttcgaaggatccggcgccgcgaggatcggcccgatcgcccatgtctggacgccgaagctcgctctgagcatgtctagcccggaggtctccagttcctggatggtgttgacgagcacggcgtcggtcttgcggcagcacgggatgacccgccggaagaaggcgtccaggggtccgccccgtcgcggcgagcatgtactgcgggatctgggtgcggtggaggacgacgtcggggaagtcgggcagcagcgggaactcgtcgccgccggccgtgagggtgtgcgggaggtgctcccacacggagaagaagacggcgtggccgaaggcgcctccggggaggaacacggcgtgggacgcgccccgcgcgcgcgcgacgtcggccgtccacgcgaagaaggagtcggcgatgacgcagacggggggccggatgccagcgacgaagccatcgaaggccgggcggagggactcggaggcccggaagagggtgatgaactggtggacgtggaggtcggcgagggactcggcgccgtcgggcagaccgtggtcggcgggcgcgaaggggagcgcgtggagccggatcggaggggaggtggccgggagggagagggagccgaggaggcgtggggtggagacgagcgtgacggcgaggcccgggcggagcgtctggaggtggccggcgaggcggaggaaggccgggatgtggccgtgcgcgaggaaggggaagagcacgacgtgcgggctcctcgcctcctctccctctgccgccatggtgaggtgatgatggggacggggtgttcggtacttcggtggaagtggacgctgagagtgatgcggctcccgcgctgccactgaaaaacaaaacgctgatgcgctgaatggctggaaaggcgccctccactcaccgggtgagataccgagatgtgaccgcttcctttctccaattcttcaatttcgtccaactgaactgtgcactgacgccatgatcaaacaggtccaggtttgagcagcagagcttcatcagattatcaaaaggagtacagaaagacgaagggatggcacattggtaccgatcgatgcaatgtctgcagttctccactgcattctgctggtactcctatatgtactctggcccccggtagtactaataccacatgagtaacatcagtgattatatgattattatcaaaggcgaactttaggaagggatggagatactagctgaattgcttgaagcagaaccgtagatggagataatcagagctttccaaacgggaacactattaacaggtatttggtctatcgactattatttacaacaactgggcaatgaactcgaagaaggaactagaaaaacccacatcaaagtcagataaaaaaactctagaagtaagaactgccatcccgcccatgaagaactctgcggctctaccggtaattcttcgttgttctgaaggatatgctgagagacactggatgtacagaatggcatttgtatgagtcagttttatttatctccctagaaatatgacataaagaatgaatgcaaactcccaaaaaattcctacataagtaaacagagagagggagcaaaagggcattgccctgactagaacatatataaatacatcataagttatccttctttgaagaatgatcagaagcaggcgaggatgaagagctcatcctggccctatctctagactcacttaacataactacaacattccgcatcggtggtctgtcatatggagacatactagtacatagcaatgcaattttcaagacctcaatcatatgatcgacagacgttttgtcttccaaattcagattcttatcaagaatccctggacccaaagaattgtccctgatgtaattctttacccatgttaccagatcacctcccagttctaatggttgtacaggggcacgtccggttagcagctccagcagtacgacgccgtaactgtatatgtcacttttttcagtaaccttcatggtgtatgcatattctgatcaaaggagaactaggttagtactttgtaggaaacaatcacatgtactttctgctagtataaagcaatcaagtggtatagtagcctaggattttacaagcaatttcaagtaaaagagataagagctataacaggaataagtatgcaaagtaacagtagaagactcaccaggtgctatatatccatatgaaccagcaattgcagacattgattttgagtatggcatgtctatcacctttgccaatccaaagtcaccaacatgagcttcaaagttctcatcaagtaaaatgttatttgattttatatcacggtggatgatgcgaggtttgcaatcgtgatgcaagtaagatagcccttcagctgatcctagggctatcatgaagcgtgtctcccaatcaagtgaagacgaagattgcccatgaagtaactccccaaggcttcctcttggcatgtattcatacaacagaaggttggaaccctggtgatagatgaacccatataacttcacaatattacgatgccttatctttcctagagtaaggatctctgcacgaaaactattgtctgtgttgcttccctctctgttagaagccagcttctttacagcaattgtctgtccagctttcaagatggctctgtacactgttccacatgcacctcttccaataacacaactctcgtcaaaattatttgtggcagaaaccaattcctgaaatgtatatgcatccttggtagaaacctgcatgttagacccagcagaaaatatttgcttgtcttgcaaaggagctactgtttctagtggttttctcatatgatacacaattataacgataagaataagtgaaattcctccaataacagcagcaacaattgctatgaccttgcccaaaggggggctgcctgaattggatgactgggaagaagatattgactcagacccacatttgccaagttgtccgccacatagtcctttgtttccaagaaagctggttgacgccatgttatcaaaaagtggtatagtggggagagcgccggtgagattattgtaggagacattgaactcaagcaaactagacagatttgcaaaggtatctgggatttcacctgtcagcttgttattattgagaaacaaattttccaataatgcaagattaccaagctctgatggtatgttgccagagagattgttataactcaaattcatggcgatctgcaaacttgagagtagtccaagctccttcggtattccaccagagaattgattgccaccaatctgtagagctgtcaaatgtgaaagtttaccaagaataggtggtatctctccagagagcctattgtcagcaaatgatagcagctccagctgaggcaggctgccaacttcatttggcaatgaaccttcgaagctattttggctgagatctaggcgttgcaacatagtgcaattgaaaatttctaatggtatgcttccgcctagtctattggatgatatattgaagacgacgagctttgacagattacctatttcttgaggcaactctgatgtgaaatagttatttgttaggtcaagcctttggagagacttgcaattgcctatctgaggaggaataggaccattgaacttgtttcgacccagctcaattgttgtcaaattcaccagattgcagagatcagttggg

SEQ ID NO: 15360 - DNA, 3019 bp, Oryza sativa
aactctctttactgtatgtaaacaaggacgagcttataatataatcgcgtaacctgagcaaagataccaggtacataagcagaacataactgtatgtcagagtcacagtgcggagggacgcttcctcgcgcaaaggggcgtaaagtaccacctgtgctgggagatcggcttctcgcaagcccgcaattgcacgaatcagagtaccaggtagcagctggcgttcgcttaaaccggcttaaaattcagttgacgaaaggagtatggactatgataccatcagccatcaggggaaaaggtcaagcaacaataccagttcattaacacgataacacgaaacattacataacatcgaaaatgcagaggaagcacgccatatttacagttgttccttcccatcagcaccgctacatatttacacggcctaaatacgtgccagcccttcaccactaggccatccatcagacccttcagcaccagggcgaccagacacaccgatacaagcaggactgacgtacagatcactcgagcttgttcttgtgggaatatgtacatttgtcctgctctaagcaggtggatatttacatgtggacacatgtgcagctaccagattactcgggccgcacactgacgagattgggcagggcagccaactggagcttcttgatctcaatcgcggtcaccttgcaggactccagagacaaggacctcaggttctggagtggcttcagatggtggagcccagaattcgacacccgagagttcgacacgttcagggagaccaaggcagtgaggcctgtacacatggaagatatgcaaataaatagataaattgtgtgttgaatgctttcattcctgacgagcgcaaaagacatacgggaaatcagctctaaggatttgtcagtgaggttgccattttgagataggttaagcagcgtcagagctttgaggtctttgatattcttcactccagcatctgtaattaacccaccgcagacctcaagggactgtagattcttgaaatctgaagaatgcattagcaaacagatttaagtgctacgtgatattttgatgcataaaaataacgagaatcccccaaatttccaagggaataataatttcccagtaaaatatgcaccaagatgctgtcatattcaatgctaataatagcaggggttgagaaaaaaaagttccacagaatgctaggttaataggatttgctttatgtgtgcacaatgataagctcggtgctacacaagtgcaaaaaggcccaacgtgccattatcttaactcttatagtaaactagcttgttccgataatccaaaatcaccagactagtaaacagaaccttagcatggaccaactttttatgtgcacacttacatttcaagcagtttgtcccagcatcagttatacgagctccaaatagatcaaggtgtgtcaacccagtgagacctgcattaaacaaatgtcacttcaaggcaaaatacaaccaaaggactacacaacgatacagaactggagaattcagacgataaccttgtagccaaattcttactcctactacaatgcacaacaatcaccatttgattaaagcgaaacatcaaaccttgagaggaaaggaacaccatcctaaacagacataaaaaagaccaacactctacatgccccaaaaaataacgtagcacccaatcatgccatatccaattaaattgctaaaatgggtaagataccatgtctaatgcataacaggaaacccaatcatgcacgccagtattaaacaatgtaattttaccaaaaatgaggacatacatgtaagagctgccaaaccattatctgtgatttggcgattatcaagattaagggatctgagtgaattcaggccagaaattttcttcaagccaatgtccgtaaccaatgtaaaagagagattgatgctctgcaaattccgtaggcctgaggagatatattagttgaagaactgttgtgagtaataactaaaaactgaaaccgcttgaactattcaaacatcatatattttttttaaaaaaaataaagtcaatggcactagcatttgtgcagaagattaaacaaaccagagagatgacgaagtccattgctcccaacttctgtgtctgaaagttccaagcttcttagtttcagaagtcctacagcacagagagatgtacaccaatgatttgagaccccaaaaaaaaagaatgtaaccagtaatacaaacaattaaaccaattaagaattccataaggaacaaagtatacttagtcaatgctaaactgacaattgcggactagtctggtacaaagcactaatactatatgccattaaacaaaagtaaactacgacttactgcatgaggcttattgtgtgattctccgccttcagtgttttatgaaatactagcaaaatgccagtattttaaagcccataaaaagttattcctattgtctaatatattgtcatcatgcaacttatgttgtcactttctagctttgtgcctgataagctagctgtagaaataggcaaagtcttatttcactgttggtgggtcccacactaccatctttcgtataagtatagacaagataacaggaaaaacaaagaaaagacatgacaactaagaaactcacctttcaaatgtgctagcccctcgtcaccaatcttgcatgagtccaagttcaaacactccaaattgatcagttctacaagaacagaagaacatcaggaaagctccccacttcatgtgttaattagcatatatagtatataatgatgtcagacttctgacatgtttccagaaaaatcaatacaatcaagtgggtacaccttccacttggtgcggcgtaaacatatatattgaacaaaaacaacatggcaaaagtgaaacaaaagcgtattctggtatgcatctagtctcatatcatcggcaattttaatgacagaaacaagagaatactggtatattaagaaaatataagtgttatttcttgagtaatagtgatc

SEQ ID NO: 15361 - DNA, 4563 bp, Oryza sativa
aaacttttttgagaatacgcacaaaagccttgtgcatcttttgtattaaaagaaagggagtttttaaaactttacaatcttccgctgaaaggaaaacaagcaaatgagaaagaaagaaaacacaaaaggcgtggggctatatctcgcaacaagtttggcaaccgtttagtgagcggtggctcagatgggcaggccagccacacgccagaccgctgcttcttcctccatggccgcgcttattacccccccccccccccccccgcccgatttcctctcgttgttgaacaccttattgtttctattaatgaaaatatgatctcaccaaacagggagcttgttaagtgttatgtaatcatgaaatagattacatcaaagagcagtacaccagagttgtcaaacatactgtacgctgagtacagagaaatatcttaggcaactaaagagttctataaaccaagcattttaatcgctagctgcgcaacagtaatatggtaagcctacccttcacagagaaatataggaccgaaaaaagaaaatcaaagtgatcgttaagtcgaaaataaaatttctttgaaaataataaaatgaaatcccattaccatttataagcaccaaaagtaataaaaaaatctctcatttacaagaagcagcataatagtcctatagtacttcctccgtttcacaatgtaagtcattctagcatttcccacattcatgttgatgttaatgaatctagataaatatatatgtctagattcattaacattaatatgaatatgggaaatgctaaaatgacttacattgtgaaacggagggagtagaagcaagacactctcaagttacctagccactttgtcattctcattcaacttgcaaagggaatttctaaaactttcatgtcaaatccaccagaagagatttctctggggataaatccatgaggtagttgactatatatagaatgagaaccaaaagaaatgtgtgaaatttcatgacatgcacttcttcaggtccctaaatatccatttttggtaatgaatttaatggattattctacatgagttctggcagatgtggcaccctttcaacagtcaaattaaattaccccaaggacttccctagaataaatgtaagacattttcatggaagcgtgaactgataacatagcactcgtatggaaaagatgcaaaacctgaaataacctccaaacaagcagcagttactgcacagccctccaggtttaggtgagctagcttcgatagacctgtaaagaacaaatacaaaatatgaaacagaggctaactttagatgaaacttcatgtcattatattaatagaaacaacgaattaatcagaatattacagatacaaatggatgtagctttaggtagataaggttccactggaaaaggaagaaatttatttctgggatacctcttagataagaaacaccaagatcacttattttgcagcaagaaagttgaagctctctcaaatttgtaagatctacaaggaaaagggtatttattagacgtgcagatcagtatgtgtgataacatacactgcttgacactagatggtcaacataaaggtgttacctgataaatgtttcatatcagaatctgtgatgccattacaatacctcaaatttagcttttccagttttctcaagcctgaaaaagaaagttattattggatctgacagaagtataattaaaatgtattcacgattgagtagcgtttgaacaaataggtagcatgccagtcttccctgtatttattacaaagaaagatatataaaagctctggatgataaatatatctctgtttcattggggtgtagggtgcggggaacacatggtaaatgataaaattagatcatgcatttataataaataagttggctgtggttacattgtgatgatatattaatgaaatagcaggaaaccttttaaatgaacaagtccaccatgaatcttcggacatcgctcaaggtccaagctacccaaattaaccatgtttgcaaaggctttagctccttcagcagtaacagcagaacattttttaaagctcagggatgtcacatttgagaggcctgcagaattaaaaagcaataccataaatgacaggaacagaatatctagtgatcaggaacattgacaccactcttatcatagagatggaagaaaactcaactctcaggctatcagaaaatcactaacctgacaatgttttaagtccatgctccgatatctgatcacagtaattgcatgacaaactttgcaagttgatgcaatccttgagttgattcagtccaccatcagtcacatcagagcaagagatatcaacagataacaatgattgcccttgagaagccgctacttccatccaagcatccctcaccccagggtagtctgccaaacagatgtcctgagaccaagtagaagaatagcataggaggtcaatatctagtctcagagtaacttatcccagaaacaagaaatactccaaatttggtcctttctttatgtggcacacaagtaaagcgattgcttggcttgcttgtagcaggaagatagaagcatcatctgagttacacagaataagatagcagctgtgcacgtgagctcaactggtctattagtatcagtacccagtggaggcttccttgagtggattttcctcaattgcttacaggataaattttaccaacacattttagtttactttcctgagttagcttataaaaataagctataaaatcgtttacaacatagtaagaattgttccaacaagatgcctttattcgttccctgatactacattgaaagttagaaactgctacaagggaatgtcaggattgcattccatagagtttgcaataattccatattgattttccttgtttagaattgagtcatttttttcgcgaacgtgtttagagctcagtcataattacgtgccaaacaagatcaagcacttcacctgcaatgcacaatcacgaaaagctccaagcaactcttcagtgagaatgttccactccaccagttcattaaatacctgctgactaagatctctaggcagcagcgagaaatcagaatacttcccaatatcctgaaatcacccctcatcaagtcaggcaacaatacacacagaaaactcaatcatccaaggccacaagcactacctcgcggactttggccacacagagctccattagcgatgggcaccgcacaggcactggtccctgcaccttcctgtgtacatcagagccgctgcggggcaaggtgtgcagtagccacttgaagctgctgctcttggagaaccttgcactgtagagatcttcctcatcaacaagcagctggcctctcttcctagagcaagcacttcccatggcgacgatgcgagcaccgatcacaaaccaatcacttcttcttgatggactaaaaagcgcatatcattctagctcgtgactgtgtgattctttgtcatccattcccagcacgattacgacttggcatagacttcgctctctttggccccattctgcacatcaaacaatcgtgtaaattgacttaaaattatcagattatatacagatactgccaaacaatactaaaccccacgagtcctcagtttttggtgggtgtgttcatctttcacgcaacctaggctcttacaataattacggattgctgccaatcctaagtgcaatccaggaaaactaacagatgacactagctcaagaaaaatgaaccatgtcttacgaatcaaagcatcaaccctatctacgtattatcaaatcccccaaacccctaatagttcagtcactgtaccctactttcgattgttccacaccctgttctgcaaatcactccatcaagggagaagaaaccgtaaaattaaaaaaaatgcccaaaattccaacccagaataacacataagcatcgagagagtacgagttgggcagatcaacacgacaaccaaccaacccacccacccaataaaatcgcaacagaattacacagaatacggtggtggagaattacccgattggatatggaaattctcacagggacgcaaatccaccaaaccctaggccaagcaaactcccggattagagttaaaccaatctatcgcgattaaattacctctaatcacacagccaatcctcgccgagaaagagagaggggggaggagagggactcgagaaggggaaggaaaggtggagaagaaatggtttatagcgagagatggagcaacgtgggagctccacgtgtcgccccggaggcccgagctggtacgcctgccccgcagactctgtcactgacatgtggggtaggggtaaaggtggccaacgttgtcagtgggtggagtgggtaagaaggttggtggcgctgtgggggttggggggatgggggccacaggggagtggaagggataaggcaaaagagtaccgggcgggcgctcggcatcccccggattgtgctgccggttttgtgggcccgcgactgttggtccgttctgcggcctacacgtgggccccgcggttttacttctactg

SEQ ID NO: 15362 - DNA, 3273 bp, Oryza sativa
gaaaaatcgggactacaaatgattaccaatcgggacaacaaagcgtttctccaccagtgatagaccatgcttacatttgtcatacgttccatcataatctactaacgaattaacggagaaaacacaactatcagtaaaccaatttatagtgttttggcacaatttgattttcttctcgatgcaagggttagatacagatttgaatcaatatttatatattactaactttttaaataacgttttaccatttatcttatttaaaaaattagtgtaatttgctaaactataagtagtacttaaattttctataatgataaaagatatcacaacaaaataagtaatattatataaaatattttaataaaatgaatgataaataaagttaacgatattatctattaaaaatggtaggagcagtacttgggccctgatcttttctaaccctaaacttcaatttcctcccttttgtttttcatgtttcttaaacggtttaattgatgtgtttttaaaaatattatatagaagttgtttaaaaaattaaattaatttattttaaaatttataatagttaatacttaaggtttacgcatgtagaaaattttccttatatttaaagcaacgaacggggcttaagaagacaagaacctccatgccattatttgttgaagaatttcccaataactttcagaggaaaacaaaaacgatgaaatttcccatttttcacgcttttctaggtgatgactgatgagtagtgcagagcacctgaacggaaatctcccccatatggtccggtcccgatcatctttctgaagactgtaggcgctgccgctgacccggacggcgcggtctccggcggtcgattcgccgccacgcaacgcaaccctccctccctccctccgccgccggtcaaacctccgccccgccgccccccacccgagcagcggctcacgcacacacatcctcctcaccaacccacccgcaccgccgctgacgcgtgggcccccgagcccacctgccagcagaggccggtggcgccaacgatatactagtataaaatatattcagctcgtcggcgtcgtcgtttaccagtcgcctcgcctctcggcgtcccggtcgtcggtctccgctgcctctctctcttctctcttgccctactctactactactaccagcagcacacggtttccgtgaccggagcgcgcagcagccgcccacctaaaggctaaagatccgatcaaatcgaagagacttaatataccttctttttttttcttgagaggaatatttttttttcgctttaccatttcttcgtccctgggggattttcggggggattctgaggagcaagaagcattcggccgcggcgggggtccggcgctaagctcgagagattcttctccggtgagtccttttgctttcttggagctctatcctgacgcgtggtgtttctgtggtggtttggtgtaatcgttattgcttgtttacgcggttagattgcttcatctaaaacaaggatggttttcttgcttgatggtgtggatggcaaaccgtaggaggtttgtcgcatcaccgatcgcagatgattctaccgttgtgttcttgggacatcgccatgggagcctctgtggtagtactagctttcttgatggttaccctgtgccgtcttgtatgcatttttctataatggacagtcacctcgcgttaagattgcgtgttagactttctgaagctctaattttgctataatagcgaggggaagaggggaatacctcgtttggtgctgttctccatttgcgggatagctcaaagtcaactctcagtcaactcatttctttgcctgctttctgtacacatgtgttcgtctatgttataatgatttggttgttcaacaagttcattaattgggaccttatcggtggtgatgtgtgtagtaggagtgctatgcgtactacatagcacgattttgcttttgtaatctgcattcttgttgcatgcattgctcagttgctcaacaagatactcgctataaatatgtagaggtcaaagactggcacttaaaatgcattgtgcaaggcatacgccaaaaggaagtctacctatggtttgggagataattcattcatacaaagtgtaactaatattgcaaaatagcatggatgtctagaaccgaattattcttctactagatggtaaattgttgttccactcattatgaatcttctgattacacgtggagaagctgagagttctcctttcttgattgatcggtgcatattttggtgacaaatatgtctatttctgctattcattttgtactaatgtactaccgtggactcatgttatcgctcctcgtatatcttttagtggcattctttccaaaatgctaaactgaatgcttcgatctttttgcagtttggattgcacttgtcagagtaaaagggctaaggacactatgctaatttaagacatctcatccaaatgaggcgcaccacacttctttgttggcaaactgaaatcagatagcattctggtagccactaaacctacagggatgtttcttgtgtgttttgaagccatgtgcccctgttttggttcaagaaggaaggatgggagcgaagaccctgttcttggaagggatggaaattcctgtaagttaaatagcaagctttcatctattggtgatctaatctgttaacacaatgaaacaatgtagatgtcacgtttggaagtataaatgaccatcatgaattgtgacacattccttcatccttgtttttccagtgaattcttctgagctgaggtcaatgtctgatagagttcctccaagccctcttcgagtacctgcaagtccatctagattttcattgtcttcatcaccaagtagaaatgagccattgaacctgagtcttgaacaagttattaaactgacacataactttgcaccagacctgatgattggtgaaggttattttggaaaggtctacagagcacagctgcgagatggccacattgtggcaattaaaagggcaaaaatggtaggttttattttttatttttatttttttaataaaaagcagtgttggcgcaatgatagggctgtcaacaagcagctatactagagatttctctatttagaatgactgaggtgttttttttcaagtagtctcgctggttgatccatttttgtgtagatcagtacggtaatgaaacagtaatgcaccggtaaagcatgtactcacattgcattctttgcaccagtagggctgcaggaat

SEQ ID NO: 15363 - DNA, 7564 bp, Oryza sativa
ttcctgcagcccgtcttcatcaccaagtagaaatgagccattgaacctgagtcttgaacaagttattaaactgacacataactttgcaccagacctgatgattggtgaaggttattttggaaaggtctacagagcacagctgcgagatggccacattgtggcaattaaaagggcaaaaatggtaggttttattttttatttttatttttttaataaaaagcagtgttggcgcaatgatagtggctgtcaacaagcagctatactagagatttctctatttagaatgactgaggtgttttttttcaagtagtctcgctggttgatccatttttgtgtagatcagtacggtaatgaaacagtaatgcactggtaaagcatgtactcacattgcattctttgcaccagtagttgtggatagttattataatttggtgtttttcaccgcttgatcttgttggtcactagtcaaatttcttttgcaatttatatttattcaaaaggtcctgataaagtattaaagttgctgatagaaactctgcttcctacatgtgatttttcttacaagtgaatcgcagttttcatccggtttctttatgcaggaacattttgcctctttacgggccgaattcagtaatgaaattgcattactaaaaaaaattgaacacaggaatttggtccaattacttggttatatcgacaaaagaaatgaacgaatcgtcataactgagtatgttccaaacggcactcttagggagcatctagatggtaaactgcatactaagattctcttttgttgaattccatatagaacaatcagtaattttcaaattatctttcaggtcaacgtgggcttgttttaagctttaatcagcggcttgaaatagctatagatgttgctcatgggttaacttatttgcatctatatgcaggtatgctttgtcacatgtttctgttgctgagcataaaaacagtttaaaaaaacaactgactgttatttttatttttatttttataccaagtcatgcatcggggtattgtcactaagtaatgcaagaactgtaaaccagtattttaactatattttccccctctaaaggttggtccattggctcataatctgctaataaatgctagtatcagatatcctgactgtaatgttctgtagttcggaaattgtttgtggctgtgcatcaataaaggttgtgaaatgagcctaacaaccaagttgaataaaccatgaaaattagccatgtaatcagatgtgtatctgattttaattctttgatcttcaagctttaaagtagcttacagagattctagtttgactattcctattggcaatttgcatatgtattttatttatttgttctgtacttttatgcttttagagaagcccataatacacagggatgtgaagtcatcaaacattctactaaatgaaggcttcagggccaaagtggccgactttggatttgcaaggactggtcctacagagccagaccagtcacagattcagactgatgtgagaggaacagctggctatgtagatccagagtatctcaggacaaaccatctgacagtcaagagtgatgtattctcttatggagttttgctcctggaaattctttctggtcgtcgtcctattgaggtcaggagagctgcaagagaaaggatcaccgtgagatgggtatgtcttcacttccctactttgtgtttacattggtttagacttttgtttctttccattgttttttctagataactatttaggagcaatttacctttgttctggttattttcttgcccccctgacccctcttgcccctgcatacgctcttgcttttctttctcgagcagttatctgcacatgaattcattttctttgtcgacaatttgcaatcccatcacaagttaaaccatacaacatgtaaacttccagtgtgcatgcacaaacataacaaaaatataatattttctaaacactcaacattttcatttacctgggaagaaaacaataataagcttgattcattttctatagcagttaagctgtttggtcatgggttttgtcagaatttaaggcatctgaggctctctattgttttctaattttgatacaggccttcgagaaatacaacagaggtgatgttaaggaaatattggatccaatgttgaccgagtcagtaaatgaggatatactgaataagattttcgatgtagcattccaatgtgttgctcctactcgtgctgacaggccaacaatgaaagaagttgcagagaggctgtggaagataagaagggattatgcaaaaacccaacgcagagcagaaatggctctgtaaaccatctgatcctagcttctgcttttactcgagagagcatttggtgaactcaccagtgtccagcaaagatccacaaaaacaagttcagttttgcgaatcgggacaactaaaatctatacatggttgcaggattattatatgcgctgtacatggacttgcatgtttaaaagatcaatatgatgtacaccgacatgtgaatcgaagttttccccatatagcctttttgctctatccaagctttcagtaatttgtgtctcaaggaagtgtgaatggtcttgttttgaagcctttcaacactcaacagttcttgatacagctttccgttcttgtgtatattttgctggtcctcctagtggtacagctgatctttttgtcatgttcagtgttgctcatgatgtgaggtgtttttaagtgtaattatggcttttgggatgctatgttgtattcgtgtgctgtaaccagatcttaaggcaatggatgtgcattaattgtgattttttaaaaacattattttcaaccttttacagtccttgaagatgtattgagagatataccgcatttttgtagtgcataagcattttttatgctgcacccaaactattttcgtacaaagtttgacaaatctatcacgttctatatattggatgaagcctggacaggcattcccagttcagtttccctaacacggcttcacacagtccatgaataggcattctcatgcatgcttgaaaaactggccaattgaaggaaattgctctagtgccaaaaaaaaaatcagggatgagtcaaggcataataacaaccaggatttccaacagtgatgaggatctcacctgtggacctattcgccgaaagttgatggcactgtcttacattgctgactatccctgacaataaaaggctgtccagttctggatttaacaattcccctgtttagttgacacaaaacttcccccaaactcctaactttccatcacatcacatcacatccgaaactttcctacttatataaactcccaactttttttccaaactaccaactttccccaaacttctccccaatttcagaaactaaacacagccgcattggacgccagattcttccttcatccaacaagctcttccatccattcattcctctgaatattttagtttgctcctgctaaaatggaaatattacagcagcatacaagtggaaaaacatcgttaaaggtggtggtcatggataaacttcagaaagtagtacattcattgaaacggtggtaacttacaaggaaccatctggcttaaacgttcaattgcataaagcttcgcaagacatcctagtgtacagacaaagctctcaagtctaaaatttctccgagggattcaccctcatatatataaaccctgctagcggttcatgctctagggaatttgtacaccggaatttgcctcctctctaattctgtatcctaaactaccaaataaacctttgtgtcccaggctcatgttgccactggaaaggtctgaacagaaacattgccagagtgaagaagtcaacagcggcataaagaaaccccaaagcaagcaatttaacattgctgatcactggagaatgaagaacagtatgaccaatggaattgtatagtatctaaattcaaccaatggggcagggatgagagcaagggcaactgatagaacaaaggacagcacccaaagtcttgtctgtgacttccctgtaagatgaaacaaaaaaatccaataaatatcagttcatatatactctttaaagtagcaacttctacaaaatttatatagagaagtttacctaagatattaacaattgaaaaccatgagtacacataaactggagtcaaaatgtatttcatcatccagtgaacttggataaccttcctccaaatataaaaggtgtagtgtctattgtcagcaagaagatatggatgagcaatgctgcacaagaaaaggggtacatattaggagttggtaaacataagaaggcaaagtacatcatgctttaagaacaacaagaaagtgcagtcaaggaatttgagaaatatgtttgacaaacatgcttccacaccaaaatttcaagcattataaaattgtacataagctgttactctccagttagattcagtgttgtttttaacgaagtatgagtcagcattggaagatgcacctaaatgttcagcaggaagtacttttagcagtttctgggagaaaaataacacagaagagggaaagagataccaaacctgaataaatgtacagcaacaaggcttaaaccaagagccaccaaaattgcaaaagaactatatgttttgttctttctgcaccagtggaataggtctgatgctcgggtaggagtaaaatgccatggcaggagggcagcagctgacactagaccaaagtacaaaaactgtgcaaagtgtggtgaaacaacatgagcttccttagcacctgcatcactcaaagcacaagggtgtatgaagctttttgtagatcattctgtaagctgccagcgtacaaaggttgaaaggagctgacaaaaataagaaatatacctagcactatgccaccattccagactatgaatgccacaaacaccaaaagaaccattgcaaatggtataaaagcaattaaaacttcacactttgaattccataacttgaagatggcatcccatatttcctctgtaaaacctgcaaattaccaacagacatcagatatggcaacaaaatcattggacacgaaatttgagatcatatggatgcgtttaatttccacctctttttccaaaataatatttcatcgcattcagaatgaattcatatgattgataaagaactacagctagtgttctagcaatataaataaagaaattaccagtgaataacaaataatgtttagaccaaagcataataaaaatgtcaaaacgaagttaagcatgcaacctactgaatctcaaacatgaaatccaaatggttggagaaatataaatgcatctttttaattgacagagttggaatactcactggaatacataatgtttgattcagaaacaacttctctcttgtttatgggattattgtttcgccgccttctcaaacctggagcagtggttttattatccatgtgagatgcctctttgtttgacttatctgttagttcactgttctcgtaacaaacattgtccttgacataaagatattgtgcatgagcgatggctccattggcagcaaaaaatatcatccatattacattagtctgccggagaagtatagaaaaagcaccaaactgcaggcaaaaggaagcatttaattaatattgctaacagatttgtgatgaaaatcaataccatatcttaactcatgccaagaagtatggaaggacccatagaaaacctcaagatcaagattacatatttacatgaaagaatacatacaacagctataaagagttgttttcttctccaaaattatatcaattctggaactagaagaaccaccaacaagtatgctgtggaaaacagttatgaatgtacgactttctacaatctaaaaaaaaacttaagatgtgaagttgtgaacaaaacaaataaacaatagaacacttaatttaaatactcaccgctgcactgacccaaaattgtttcttcaagcagaaaaggtacatcgcaagaactgccgctaatgatgcaacatcagtataataaaggaaagtaaagaaccaatgaatagggtacaaagctactaaaatagcaaatgcagttgccttcctcttgccaatttttggcctgatgcacaaaagcaggtcatggactagaacaccacagatcatcgccatgataacattagtggatctcagaagtgctgtagtgcaaagggcatcaaatgcctctgctattctagtcacccatgcaccaggaaacaaggaagcaacatatgctagtgaaatgtagtacctataaaattgcagagaacaatccctcatcacaaggtaaaatttgagggtgaagtaatgaggagttttgagactcacaggccaggaggggtggtgatcatgggatcccatattaagaaatctccacggcaatagcgctgcacctggggaacatggaagatctcatcctaaacacaaagaaatgagttaagaagggtaatgaatgcttttttgtcgtgcttccaaatgctgcctacatttccaatgagaatgtggcaagatgtgacaataagtgcaaatttagtagagtaactcgaaagcaatacagggaaattgaaaatgctcaagaaattcaacacgcctgcttgccaaattttataacttccagagaagtccatttcctggacagtagagaactcatcaaactcattactacaaaccagatactaatgttctctccacatgaaaagaattattcaaatgctctacctgatacttttatagacacacatcaggcgatagcctagttgcaatttcagatccaagagtctagttcataagtttcatatgcggtttcttccaattcattctggactacatggaaatcaagtaagacattatgcagatctacccctgaaactgcactagccaagcactcgtggaggaggagaaaaaacgctcaccatgtaagggtcgggcacgatggaggcgaccagagcagcgagcgggatcgcccatgcggccactgccgcggcgacggtcagcctccccatcccccacccgtactggctcctccccgctgcgctgcgaaaccccgctccagatccagccccgcgcgccccgggagcacagagcttaccaccaaacgaaccctgagctcgtcacgacctcaccggaggcgctccggtaggccttggcgctggggctcgggagcagtttcccggagtcgactgacgaggtgcggtgcagcggcggcgcagtacaactccctcgccggagagagtctcgcctcggcgttcgttgcggttggtttcaggctaggctgggcattttgggccaggcctacgtacgaggcaggctgcgcaaactcgccggcccagcccagtagcccgaaaggaggaagagtcgaagagagtgcgagactacgcgagtctctccgatctctctcctctcccccttggctctgatctctcacccgagatccgagcacgaaggcggccgcgggcggatccggcgaactttccaacgccgtgaatcgccccctcccacggtgagcg

SEQ ID NO: 15364 - DNA, 2198 bp, Oryza sativa
cccgtgctggcgcaagggcttgtcattaggaagaggccaaggaagaaggaaccatgcttggggaggctcatggggggttataggaggaagcaagctaagctgctagatctagtgatgcctaaggagggtgaaaggggattgtagtttaggggccagatctaatgtgaatccaaaatgggcgagagtaaatgccgatagtagcatgaatacagcacattggctagttcagcttggcccttgacccaggaataattttgtggagtgatctaatgtggaaatggggttaaatgagcaacatcaaaccaatatttgtgttcaattgcagttggagagtaactagtccaagtgttggtggaaatggcaagcacggcgtgcttcgcgattgttagtaagaacgacatcccaatctatgaggcagaagtcggatctgcaccgaaagtatgtattccacgcctcattacttctatgaatttaattaattgcattatgttgctgtttatagtgccttgtgttcaggtcacaatgtcaacattttggttttgttgatataaaagcgacactaatatggaaatggataatcccctctctcaaaaagaaagaaagaaacaggtgttggttgaacataaatcatgttgaatcagactcttgattcccatgaagatgcccaatggaatagttgagttttgtataaaactggatatagatggtttgctacctttctacagcgtagtgatttttgttgttgccattgttttcctccctcccttgtctccattgttttctaggatattgattcatatgtaatagtgtaaagttgctaattgatattcagtaatataatggagccttcatgggatgagaatttttttccttaggtaacatcatactgaattactaatgtgcatgtctaatcttctgacattcacttactgtggcagaaagaagatctggcttatcagcaccagttcattctgcatgctgctttagatgttgttcaggacctagcatggtccacaaatgcaatgtgagtatttattgcttatacatgtttttttttccgtcaggtacacctgaacatgtgtattgtaatttggttgtaggatacatacaagatacgacaggccaaagatgcctttcgaaaacttttatatatatttcccttgcataattcctctacatattttattcaggttcctgaagtcggtcgacagattcaacgaccttgttgtgtctgtttatgtaactgcaggtcatatcctttgaaacgatttgttgttgttgtgtaacttgactgactatgtgaaacttgttaagttttacctgtacaacaatattgttttctttaacttgatgacacatgctagattcatgttgcttcatgattcacgtagtgaggatggaattaaaagcttttttcaagaggtccatgagctttatatcaaggtaaggcaattttgtgtcctttacaataaagtagtttgctaaaaagttatgaataacaaggatcctgtcagtgcatttcatatctaaatatgttgaatcagttatacgttcatatgccaattctcaaacatacatgatattagggtgtagcatgttctatgtatgggcatagtatccaaaatagttgttggctgacacagagttttgtagtttctgctgtccacaatagattctgagaataaacctataatcattgctttcgttacataattttcattagaaatgttcgttgtgcagatattcctcaatcccctctatctgcctggatctcgcatcacatcctctcattttgataccaaggtcagggctctcgcaaggaggtatctgtagggaacagtcatggaggtactataagcttcacagctaataatatagaagcatgcagagagaagacaaaatacactacttttttttcttccatttatttcctgctgtcattattcagactcctgagaaatgctgattgtttttctttgggctttctccagtgcttatgaaacatgatttcaattttcacccattttgttctgtacagggaaaatctataaaaatgtaccgtttcccttttaccgtatagcatggacacattgtattgatttcctgttttctgtggcgcgctaagacactcaaatttagtattgtgaattttactcctacctctcatttttgcattggttggtaagatcttacctttc

SEQ ID NO: 15365 - DNA, 1605 bp, Oryza sativa
tccatgcagcaacaatcccctagcatgagccaacgaggctccttgcggcaatgcctcagtcatccttgcccttacacccctaggcatgcctacaccgaatctaggggtcaccactggagacccctgtcgctaccgccgtcctaactcgctgcacagttttttcaatagcttattctagtggaggcgaggcaaagaaggaggtgggtgtctcgatgatggctagggtttgccccacctagaccactcaatgcaatggacgacgcagaggttttctagctaataaagtatcgatggcctttaatatcggttttattttaactagtaatatcttttaaataatcaaattatttagcatctctagattaacttgtaatagaaagtactttactaatatactacattcaaatccattcgctttgacatcgcttaaaaattataataattactgttcatatactacttttgattaaaatcaataagtactccaaacggcttagtaagtccaactagaaaagcatgccctttgcccgtcttttgtacctgcctaaacgaagaaataaatgggaaagctctttatacctaactagcagacatttaatgatccgaatttatcaaatcagccaattgggatatgaatacgatgaacatgtactgtagtacaacttacaagcttgatcttagtttgaaaaaaataaagttttactcatatctctctctctcttaaaacagaggaatttccaattacaaacctatgtcactctttataagttacggatacaatacatgtactcagtactcatatttacattcgatgcgatttcgccaaaccgaaaatttccaaagcaaataagtaagaaacttatatttgcatttcctttggtgaaaccaaatttacagccgctttcgtgctgtgcttttccagatcttctgtaaatgctgtaatttccattccacgtcagcagccaaagccagagtagatagaatccatcaccagtgaccgctgatgacgtcatcattgaccaagtcaacctaccaactactcccacctcctcctcctcctcactggctcactccttccttccgttgaccgccgttgactcctcctcctcctccggcggcggcggccgccgccgctggtccaccggcaaccggccgtcacctccctctccggcgacggcgccgtcgccgtcgcggaacctcgcgtagatgtcccccttgtagaatctccacgtcctccagaccagcacgagcgagacgagcgcgccgaacacggtggcagccgtgatgatgaggaaggacttcttgaagcagtcgacgccgaggcacaccttgtcgcggccggcgccggcggcgaggccggcgccgggctgcctgcccgcctccgcgtcgtagagcctcccggcgacgaggacgttgaggatgtaggagccgacggggctcgccatgccgccgaagttgtagagcgtggagtagtacttgaggccgaacacctcggagatgatggcgaacacgagcggccactgcgcgccaaagcagaagccgatgatgacggaggcggcgtagagcgcgcgcgggacgccgagcgcgatgaggaggtggccggcg

SEQ ID NO: 15366 - DNA, 5691 bp, Oryza sativa
agcccattccactccccttttaggtggagctgaaactgtttcgttgggctccaggtctaggaaaggtggagctggatatatatattagggggttaagagctccagagaaatagtttagagtagagtggatttctttcttcacttgctaaacccttcctcatcttttggtgttcatatatatattgtactgaaaagtgtatatgaaatgtgaagcctactcaaaagcaattctattaacttttgatggtggattccatggacatgtagcttgaggtcatgaatttctttcagagcgtgtgggggttggggtgtgtagagtactatcaccgccatgtccacgctcaccagcgcctgcagtatcgtgtagtcctcccccctcgccggcggccggaacatgcccttcacccacgacgtctccgccggcgccggggatgaaggccgcggcgaccgctccgtctctttcgacatttcgaggacggtgatggtgtgcggcggcggggcggcggcggcgagctcgaggcgctcgcggtggatcttgaactcctgcttgatgacgacgcagagcgggaggaagaggacgatgaggagcgcggcggcggcgcaggagtaggcggtgcgggagaaggcgaactgccgctgcacgacgatcatgacgaggaggtaggcggcgaggccgatggagatgtagaggaagcagaagaaggggtcgacgctggtctcctgcccgccgcggcggcgcgggtacggcatgatccgcaccgtgtggacgaacaccaccgacaccgccgccggcagccacgcgatgagcaggatcagcgacttggcgtcgtcgccgtagaacgccaggtacagctgcgtgtacacggcgccgctgagccccacgaaccccttgagtatcccgagcacgacgccgcggctctccgggaagttcttgacgcaggtgacgagcgcgccggtgttggcgaacgactgcgagttggcgccgacgaacacgtacaggcacaccagccacacgggcggcgccgccgtgcgcccggccacggcgaggtagaccatgaggtagccggagaggttcatggcggcgccgatggcgagcaccacccacggcggcgtgacctcgttgatgaggccggagagcacgccgaggttggcgccgaggtccttgaagaaggagacggtgttgagcgtgtgctggtcgtagccgagcgacgccttgagcgccggcgagtagatgccgaagatgtacgtcgcgcccgacgccgtcaggatcagcaggctcgcgaacaccgtgaaccaccgccccaccgccacctgccgcgcgaacgccgccgtcaggatcacgcggagagggttctgccacggcggcggcggggagggcgccgccggcgagccgccgccactgctgccggtgcccgcgtcgaacaccatggctgcgcttggggggctcgggttgggttggtgtgtgtttggttagcgaggtggtactattatttatttatagagaagtaaggagggtgaaaagagtgtggagagtcagggggctttttgaggctgcatctctatacacattgctttcttggaatggacttaacatgtgtgattttcatactaggctgcgtcgttctatcacctctcttttggatccatttttttagcgcacgtaaaataaaaaattattatcatataattaattaaggattaataattataaacttaaaaatggatttattcaaaatttttaaataacttttatatagaatttattttggcaaaaaaaatcttttctctttttttcttttttagaaaaacaatataaacacaggtgctcacaacatacgcacacacgcacgtcctattcatgtaagcatctccagaaaattgagccggcatcataaaattgacgaaatcaccattggtgccttattgtcgatagatatgtcatctgccataaagaataattagccgtaaatgcgagtattggtgtcaagtctaggacttagagtcaagtgggcttgttttatcacaagaaacctaatcagttaagttacgctcgcgttctaccaaaactctttttaactgaattgtaatgtatctttcgcaaagatattttaaaaaaagaaagtttaccgaggaaataggctacatattaggctcatgtttttccatctttatgtacctctatttctccgggaaagaaataaataacacaatggagatcacacataaaagtgttttcatccctcaaacaggcgtcgctcatctcttatatgtcacctaaatagatatcaatatttttaaagaaattaacaagatagatgaatatgagatatatcactccacaaatatgcatattcaaattcgacttctataggttataatattaattagtttcagtttaatttagtttttataacttgtagaagtcgaatttaataatgtacattgtaaagcgatatatcccatattaatgtgttctataaataaatttaaaaaaatctatttaggtgaatatactcgcgagaaataaaaatccatctccgagatcacacaacatggcaacattgtcgtacgtcaatggaccccccacctcttgttgtttcttgtgtaatggtcatcacacccttgtccccatgattgatcaatgacgcacaagcttgaccatatagtggcgtaacacaagatgatggcgagggagtggtgccggtgccatcacggttctttaatttactcgtcaaattaaacctataggaagttatattattaaatccgtcttcatttaccttatcactactgactcttactgttttcacttggaccattaataacttttaaatggttaaagtgaagtggatgtcaactgagtctagggatgaaaaagaatacggattacctttcggagtggataattatcatataattaggatatggatacgaatacggatattttctcttggatacgaatacggatattttctcttggatacgaatatgaatatggtatcagggtttctaacggatatccgcctaagtcataaaacatacccaatttgtttataactctatgacctttaatggtagtagtctcttaacactagttcacactattaatattattttaatttttaaatatttttataaattatactatattttatataaaacgagctaattatatatggagatatttgtttctattagaggttgaggtggttttcgtgttccaagaaaaaaatatttccgtattcgtgtccgatcatagtcagtccttattcatattcaagataattcgtatttgtttccgtatcagagctattcgtatgtatttgtttttgtatctggcaaaaaaaaatgaaaacgaatatggtatgagcattattcgtccgtatccactctatttcatccctaactgagcctacttgggttcaagttcttatcgggtgcttgtatttatggctaattattatttcagtagcaagacgtatacaataatgtcgtcaatattaagatatgttggactagttttttgaaaagtactcataggaatagcctaataggatgcatgtacgtatgtgcgttcataaatgagtgcgcccgttgtaagcatctgcgtttgtactatgcattcttaggaaaaaatactttttttggaaaggtaggaaatttgtttaaaatggttaaatagctaaatggaagttccgtgcttatgtttaagatacaacacacttcaaaaacacgacgcccttctaagcagttataaatttttaattaaataaaaaaaacatgagtgatactttgaaaatacgacgtccttttaagcggatatttgtaatcgaggtagtaaaacagtacacttttcacatacttagctgtacgttttcaccaatatatgtctcactgacacatggatccaaaacatcacatgccactctcacaagagcgacataaattgtcaacataaattagctagttattctctcctatctctttcagtgttttcattattattattagggaagaaagctacctatgaagcatgatgggccctaatatatggacgtgcaaagatgagcagctgcttgggcgtatggacacagtagggaggcgtcggcaggaggaaagcgcacgcattgtgtgtgaaccgggatacccggtcgtctttggttatatctggagactgaagagtagttttaatcagtgaaaatcttaaaagaaaattgtgtttgtgagtttttactcttccttttattaattagtagatctgttccaaaatgttgttatgtatagaatgagacataacttagtatctagatttgagtattctctgttcagattcgtaattaatactaggtgatgtctcatcaacaatattttaggacaggtagtatatataactatatacttttgttagaatagaaacaccaggttacctgtttatatttggggaacttgtgatcctgataaataggctaaccaatgaaaatctttagaaaattgtgttatgtcagtttttcctccggtttatttttttatttattagacagctacgtagtttctttaaaaatataaactgtttagagagttggagtcttggagattttaaaagaaactatagccgtaagatataagcttctcaaacaggatccggttacttggatgagccgtcgagaaacgttgggtctcgcccggttacttggatgagccaccaagaaatgttaagggatcttccaactagcttcataaggtgatgggctggatgatttgggtttaaagcctcacctcttctaattagttgatattaggtcctatcctgatattcacgtttacttggatgagccgtcggtcacttggctttgatgtgattttgtcatgtggtaattgccaaggttagcgagtgatttgagggcgtatgggtcatagtcaattccagtccaaacgagggcagcatgatagggatgattaggtgtccagtaggaagggttaattaataagctacctaactattccggactagctacagatcaagacggcagtgtctacactctacaggtggttaattggtcctttttattctgtagatagagatttcaggaccattatctaattaatcgactggccatcttgtgatttattacatttctttttcttttagatctttattgatgtgttgcattcaggtgggttcatcctgtttgatttccaatttaattagagaatttgtttccatgtacactgatgtagttgatgtgtgcgtcatacatgcatagaccttatcaggttatgatgtaatgtttacttcatctactaaaagtgagatcatgggtttaaatccccacataattaaccgcagtagatacctagcaaactaacgaattcctaggttttacttttcttcgcagcaagttaaaaacgagtcgtttcttatcatttgcttgttagtttattagccataattaaaatataaattttaaaacttaaattatgagttgattttaagtttttttcattgtagtctattttctaaccttaaatttttaaaccgccaatagtgcatataaacaagtttaagttttacttataaattatctttgttgcttggtttatttttcacggcttatcaaccatagtccaaacagcttatcactcagcatttcaactgtagatttggaggatacattataaccatgtgattaa

SEQ ID NO: 15367 - DNA, 9979 bp, Oryza sativa
tcacacaccttcttcaatcattctcacctaatttcttaatatccgtgccaacctctacggaggaagtactaccattttcctggatgatgctgtggtagttagagtattgactaatgactactctgcatgacttgaatcataagcgtctttgcagtattattgcagcatctggctttaagactatatggtctccaggtctctgttatcctagttataaaattattgctgatctttttgtcttattcttctcttaaactggttggactgccaccaaacaaagcttttactggtacaggagtagcctttgctgacttaagagttcaggaattgtcatgcctgtctctgctgcatttccacattgtatcctttttattaaattaattaattttcagtaaaattggtgagtgtgagcctgacattgacgtagtgctatgcatcagtagttcgtcatatttgtgatttatgattgtgaataaggagatacagaggatatttgtgattttttttaaataacaattatgacaattaatatgccgaattttcacttggaaacttttgcagaggaacagaatatatcatctgaaaaattgatatagtccaatctaagaatgactaattgggtgaggccaaatggagcaacgtatgttagtactccctccggttccataattttgatgttttaaataaggtttggttaaacaattagagctttatttaaaatattcagtttaaaaatattacaacccgatgtatagattagtcttttaaaatatattttgataaaatcaaatagttacttatttttttgtatatattataacagaaaatcgtagtcaaatatatgttttagaaaatcattgtcatatccaaaacgtcactttgtagtttgtactactcatccatctgttgactctgccatgccatttggttgaatttctacctgacagagaataaggcatgctttagaatataggatttccacataaatttgtagaaatttcataggaatcaaactataggaatcggtaaaaaaaattcccatgctacaaagggggcctaagttgaaggttgctaatatccttgagagctataaagagtttttccatcttcacctcaactgtctagctagtgtcttaaattcttagctaaatactagtactacactgcacaggtggagcaaacggcatacttttaccatttgaagtgctagcagagcatccaaattcaatatttgtaagtcacggcaacctcaaatattgtttgcctgaagaatacatataggccctgtttagttccaaagttttttttttcccaaacttccaacttttcatcacatcaaacctttcacacacacataacttttcagtcacatcgtctccaatttcaaccaaatttcaaactttgggccgaactaaacacagccataataagacgcttatgctaaataccgacgagtccttgtcatcgtcgtcatcgtcttcaccgtttgttttttactcaaatacgtaatgatcttcttgatttgttcgtgtgatagagagaacgcaacatgtctaattgacaatgctgcaagagatcttttcaactatgaattatctgaattttccaaaagaaaaatgtacatgtacacaatcatttgcatgaaaaaagaatatccactcatccatagcaagtccaagccgtatgtgtaagtgtcaaaaacaaattgtatcaatagaccttatcatcttgtctaatctgagtggtttctttagggtctttgagtcgtgtattcagtctcaaaataaattaaagctattgtgcatgtttgacacaaagggtatcttagattctcataaaaacaaatttgccaagaagaaaaattctgatttgttcgattttctctgcagcctatgcttagtacagccatttcttagtcaaggaggttaacttgaccagaaccagaaggtcccgtttgttggctcatgtaaatatataattatttgttttaaaaaataagtatactattaaagataaaactaaggttggacagtgcatatcccaggttcccaatagttcagtattagctgctcttatccaacaaatccttaagctggacacaacataaaggttctagaatgcttgcaagataagataactgtactttcattgaccactaaaatgtttgaacactagatatgacggccaaatctgaaattccccaggttacgtgtgtactagcttgattcagactaagaaggtgactgccactaatcataaaaacttttcatgtctaagtctgatagtattcccttttctctattttcatattgttcgtatcagaggatgatgcctagtattccttccgtcctaaaataaattaatttttacatgttcatatttgtgtataaaaattggtttactttgggatggaagagtgcatactacaagtatgcaacccaccgatcttacatgaaaaaaagaaagtatgcaggtgcaataaccacgatttgttattttacgacaatacagttagataaaagtagcttccaagtttaatagaatattctgtttcacttccatatacggattcctatttgatctgtttgcgcaaaattagcataatagagtgccttttgaaaatccacccaaatacaaaccaacctttgcaagaactcacctgcagatgcaagtaaagggcatttagggttgttcagattataaccaaaataaaccttatcagattttagtactttagtaatattaccaaaattttgacataatttcttatatatttaccaaagtttggtaaaaataaataaatagatacatatatttaacaactaaaaaatggtatggtttaaaataatatcgatctgaacatgcccttaaatattactgcaagtcatgcgacaaccagtttccagtcaacctcatccatgaattgtattggtataaatctgtaggtgagttctatgcttgtaagtgatgctgcctgacatgagcatctctccggcctatcctgaccagaaaaaaaaaatctccaatcaaccgaccagagagaaaattacacgtacaagcaacagtccaacaagaacaacacgaatctcacggcactcaggcatggaagagatgctgcaatcatcagaactttttgtacagtaaagccacgcatgatcttctgttctagcttctagagacagcatccatttcatggcatgccatggacattacctggacaagacaaacaaaagatataacgcactttgatcttcagtggaagatacagacaagtacaaagatgacagccacttggcaacttaactactactattcaagaagcaagaatatgctgcaccatcggatcgtctcgagatttgtactaaaagaagaaagaaggaagagctactctcctccttgattgaacatttgaaccttccaccacaatacatgtcttagttcttcactcaaaccttccaaagaagagacaaaatggagtggcagttccatgatggaaaggaacagtacaatgtgtcctaactcatcaagaacttctcgagtctaaaattgattgatacttagtatttcagaattgcactgtacatataaacatttcctttggttctttctggagaggagtgatccaagaattgacaagggaaaaacttaacttagaagtgaaatatgttgaccccctcttgtggcagacaatcttaaacatgattatgcatgtgatatttcacatcctggcacacaaatccccccttgcgttatatgaggggtgagagaggttcggttgtctgttgtgtggagattcctcatcatgggtccaaccaaacgaccacgcgttcagatttgcagttgaggcatgtcataacctttattttgtcctcgatacggaattattattctgtcctccatgaggaaaaagaggggaaagagagatagataagtggggcccacatgtcagtagtaatgatcaagccacatcagcatccatgttgatgttggtgtgccacatcagattttagacctctagtggttaataagttcaagtgttctaaaaatgtattgtcaatgtttatatagacctctagggatggcaacgggacggggcgggggcgggttaggctggaacggccccgaccccgacccccgaactctccacccggccccggccccgagtggacatgcgggtgtaaaccagcccccggccccagcccctgcggggccccgcaatccgatcggggcccgcagtgagtagcaactccatcaaatgagcacaaaatgtataagacaatcgtcaatttagcaaatgaaaaatatggtacataatagacacaccatcaaaaataacatgaatacttgaatagcatcataaaaagttcagcaaaaacacatattgaactattcacatggctatgctatgctgttgctgccagccaagcaaacacacgacacacacacatgagttcaagcaatcaagccttcaaggttcaacacatcacatccaagcaagcaaaagtctcctgtccggttgtgaggttgtcccctcgccggccccacacttgtcccctcgcgcagtcgcgctcgcgactcgccacaggcagccggacgccgcgcttgtgcgccgcaccctcaccggccgccgccgcccttgccgctcgaccgcgcagccagaaaggagagccagagggacagccggagagatggaggggagaggaggggagaggggcagagggcgatcggcgacggcaagatccagaagttcactgtgcggcgtgcgccctggcgccgcctctgccgatgcagactggagcggtggagcggctggaggggagatgccgagatgagatggggagctagaggctaaggtttgtttttatccctcagtattttgttgggtcacccgcgggtgaacttttccccccggcctctaaccgcaaaaatacggggccccggccccgcctcacccgtgggtcagaaactgtacccgcccccgtagtacggggcgggtccccgcacgggggaaattgccatccctaacctctaatagtgtgttctctctctagaggtacccgtgcataaattcaagccggaccgctatacattttactcgaaacaaaatcagaactaaaaaaacatcctgcaattaacaactgccagcggcttaattaaagctgagttcacatgtacttgtactcacatcccaacccacatatacagaagtagaacacactgataaattcagttattgactaccaaagagaagggggtaaataagcacgtggataaatcccactgcaaggtacaatagacttaaaaatgccactgaaagtctcattggaagtcgatggcattttcataactaccatcagaccaccaattacagtggcattttactgatttacctagataaatactgacgtggtcagatcggcgaacaagtaaaatggtacaacatgaattaggcttggaaaaaaccctttcattatgaaataaaacaacacccaaatgcttgattgcttgaaagataattcaccaggggttctggtcctcaggaactggaggagactccttcatgacactccatggcttggctggctgatgctgccccattggaaagttccagaaggaatcggagcgctcgtagaacatatagaacaggatggctgacactaggaaaagagataagagtatgagccagacttgccattctgcagaagaataacacaaaaagatttcgttagtatggtaaattataccacaggagagccaagaagcattttatgagacatgtacctttccagtcagcagggacattcagctttgtcagctctgctccccattgatgcgatgtggagattacggccctgcggtatcagcaggcatcatgttataacataaacaaagagatgctccggaaattggagaaggacaggtcatttagttttaagagaaacatttcttgcatgaataaatgaaatgcataagggccatccctaccaaacccagcaggaggaagatgttatcttgcaatcttttccaggctaaactaaagcaaatttagtaaaagatgaacattcagactcacatcccacttaagacattatgcagtgcagcctgcaggcatacacagacaattacaatctatgaagcattgatttataacttataagcatggcatttgatagtctgaccatggttgttaaggcggtaaggcgacctgaggcgacccacccacgccttacgctatagcggtaatgcgctaaggcgtggcgacgccttaatctacgtgattagcagcgatcagaagagggagagagaaaattagcctagcaggccagcccacaaaagcccaataaccttcataccagcccatggtcaaggaaacaaccctaatacccacaccaggtgcgtctctcctctcacagcgccgcctccgatgtcgcttcttcctcacgcctgtgcatcgcttcttcctcgcgccagttcttcttcctcgtgctagctctgctcttctatatgtgctcctttctcccctgatctttttcctcgtgctagctctgctcctctatatgtgctcctttctcccctcattcagaacgaatccagctatgcttctcttcccttggatagatctggcgctgctcccttagtcaaaatgaatctggcacaggagagagaggaagagagtggaaaccagagctgaggagtaagatggcaatgacatggagcagagaacagtgaaaaggggtagttgctgctgccttcacctctctctttctctctctctgggttatggcgttaagcccttaaggcggagggacgccttaacccctcggcacgccctagtgctatagcgacgccatagcgacgccttaacaaccatgagtctgacattatggcgcctacatgccagtgaacactaagctactaccttactagaaatcagtacaacagcagtgtacaacaaactagaaatccataagattcaagatgtgataaacatgccatctttacagagttccagtacctttcagtaggacaaaattcaattgaggaaaccggagaaccaagatggaccttcttgctccagtgagaaacatccatcttctttacatccacagcacagaaatcaccatcatggctccccctgaaagaagaaatacagaattcattcacatgtcggtgcactaaatacatcaaaagcaattcagtttagaatatgttagctagtattggggcactgcatatttattaggaaaaaaacattactccagctgatactgtcactattacaatttataatgttaatgtttttcgtccatttttttcagagctacgcaacatccttgtcaactagagtaattctttgttattatttatgtgacagttgtttcaagttgttgatatattacatgtcaatgtgagaatgtaacaaaaaaatgcaagcaagtttttgagctcttcaaaaaggacaaaatagtgaagttactaggagaaagtagcttatgttagtcttgaaatttggcattgtaaatgttcctagaaatgcaatggagttatatacttgttcagtatgataagatcaacagtatttatatgtacttacaaagccagatacttcccatccatgctaactgaaagtgtggagataggttttcccagaagtctcttgtatccaattcgactccagtcacttatgttccagacaacagttacaactttgttacctgttccaatgacaaagcacatatatagaaaaatcatctgatatgcataaatctatttctggaccacaatagaaagtataccttttgcaacggtgcaaaacaggaatggtttcatgccatccctagaaaagcggcaacattcaatcttctcatcctgcatagaaaaccagaacaccaaatggttaaggctttcagtatctcaacaagagaacatgacttgcacaaatttatcgcatcataccgcagatcgagtcaaattgaccaatggtaccccctcatctatcttccatattcttgcagaaccatcagtggatgtggaaactaaaaattctgaatctaagctacaagaggaaaagcagcagtattgcaaaagtcaattcacaataaagcacagggacgaaaaccaaaggttcaaagaatcgcttcggtctaaaaaagagtcttccaagaccaaaatgcttcattaaggtttggaccaacactactgctacgttatcaaagttcttggttactctctcaagataacggctacatgattgcgccatttacaacaacacttgttcaacagatgagaatatcctgggattcttttgcaaataataaaggaaaataattatgcttgcacttgccctaacctgatatccatgtcccggaaggacttatgagccttgggttcatctaagagcacattcatgctcggccaatgaaatattctgagatgcccatcctatagtggtaaaaataaaataaagcattgtaagaaccatagaaagatactttgtacaagttcagctagagagcagcattattatcaaactaaatacactgggcaataacaccagaccataaaaaactgaaccatctggaattctggatggaataatctgacagaatggtacaacagtggatattgtgcctaaaatcacatggcttctataatacacatatagtacttcttaacgatgtataaatgcagcatatggaaacacataatcaccaaatagaagcaaactagaaaatagagagagagagagagagagagagagagaactgatcagtaaaactccaatatcaacatatagcaatccgatacctcaccaccaatggcaaatttagatccatcagtgctaaaagcaagacacttctgcggtccaacggattcaagtggtggagcgtctcttgaaataagtcgaacagtgaactcttcaaaaatcagcttgaatagccttcagttcaaacatgtggtttaattataaagttctagtcttagtgaaagagaacagaaaaaagagaaagcaggttgtaacagtgcaaacagaaggctttgataaaatgataacacaatcagaactaaaaagtacaaaatggcatggaattatatatatatactgtgcatttataatttgattaacaagtcaacatgtgtgctattctaatgatcatttcattgaggtagttaaccctactaaagatcaacttcggtggccctttttattttaggttgcaacatccaagccaacccttctatagaaaacctgaagtgtaaagcctaattgaacgttactggaacagcaaatgatcaaatgaacacagaaagtcaattccgcactacaatctaaacataattagccacattgataacacagacctctacaatctgaagtctaaacagacggattcacactgctttctaaatcacctaatccagccaggcagccagcagcaaccaaaccagctcccgcatcacaattaaccaaattaccaccctcaaatcagctgaatcgaactaataatccgaaatctccgacactacacaggcattagctcaataatctaccggtagaacaccgaactcctaactaatcatatcacccctcccctccccgcctgagaaattcccgcaaatgatagaacagtcaacgagaagagaagcagtggaggcacgcacctgcaccccttggccgtggcgcagacgagctcgtcgccgctggggtgcaccgtgatgccacgcggcgcgtcgcccggctcctccccgagctccgccctcgcctgcagcacaaacaaacaaaccacacaaccacgaccccggaagtcaagccggcgaaccaaacctcgaattccttgggagctcggaggaggaggaggaggaggaggaggagaggggggagctcccgtacgtaccaggggttcggagagggagcactccttggagtcgaacccgagcacctccacggccggcggcgaccccggccggccgtacgccg

SEQ ID NO: 15368 - DNA, 17440 bp, Oryza sativa
tcctttgactgttgggttgtcaacgctggatgagggttttctctgcttatttttggttgccccgttggaagattggcttggttcgttgatgaatttagagaataataaggatataataatcccactatttttagagtctaattgttgttgttaattatttgtgtgttttgatacgtgatatttgcgacattgatttgttataataaaaatggtaaagtgtctttccttttggagtagtgcatcatcgaaatttatctatttttttaaaaaaaaagaactgtctgtttatttcattattgtttttctaaactggaatatgtagctaccaagatttacaaaaccacacggttaccacttgcagtaacctttttagtttttaaaccacggtatgtctcgcggttttcgcggtaaccgcgtggttaccacggtaaccgtcttactgtgggggtgcggtaaccacgctaaaaacggtaaggagaactctggtagctactactattgatgtaggaatgagttttattgctatggtgatgattcgtggtaagagttctttaactcatagacatgggtataaaataatggtcgatggttaccgttcagttttgtttagttttgtaaaattagctatgtaattaatttatctaagagatgaaaactatagcacatatcatcttaagaaaaaaaattataaaactatgcattcgtataaaaactcggcaagtataggaggataccattttagctatctcaatacacttgttgtacaatcccaaagcatccactatactcatgatatatacctaaacgttataaattcgcaaataaaatctttctatcacatgctttttatcaataattaagaaccgaactagtatatgtgaaatacgtgtgtggctcaaatcgagattttgttcttggagagttagagttacaattcgtttgtgttttgtttcttgtgcgttcttttcacagtgtagtctcttcatgtctagtatagttgacaatcagccgagattcaatcatatattcattatatatctgttgactttagcatagtcaaagccaattgaagtttcttttattagtggtatttaattactacttttccctttcaaggctggtcaggtttgtccagttggatggatcagctacatacttgctgtcagggttatggatgccacatacccaatagtaatcaactaaactcggcggagcccactattgttaacagtgaaatttgataagcccggagtagtcatcggcttagagtcagcatcggcttcgaagtcctgagattagccgatgagagttatcaagtcgtcagttgtcggattcttgctatactcggttaaggaaattgatctactaaaggaaacttatccagaagagcccgagttcaaagagaatgcggcatggcaagttatctatgaatagtttgttagtttctttttatctttagtaaagtgtgtttagtgtcctataaggactttatcttttccttttatatttaggaaagtttctttcttgtccgacaaggacttgtatcaacccatgggtataaatgtgtacacccggggggttataaatgtgtacacccggggtctatgtaatatatcttcacgatcaatacaattcggcgcatcgccaccttttaccttttctactttattttatcgtccagcgggacttggcacctgacgtggggctgcatcggtgttcgatctctggctaaggggcaagtccaatgttccaccggcccaggcaattgtatcgtttacgtcggcgtcgttcaaggctgcatcagtacattcgacctcttggattgctctggtttggatgatatatttgcctacctatttatcatatgtctatgttaatctagtcttagcatatcgatttagctctatcggctgcttcttgttttagggtttctgccggtatcggctaaattgcattgctagattagattagcttagacatctaccaccctgaaaactcagtcaacggcttgattgtctagatattatgtttcttttcatacttagtgctgcatcagttaagtttgatctactaagtcgtgcttagaaccataatctctagcctgcttcttgattgccaataagggtttcatcggggtttcagccggtgagttatctggacgttgcatcggctcataagggttgcatatacatataagttggatttagccgatgacaacaaaggtttcactgtttaatctaatcttgtggatttcatggcatcggacctccagccgatgtgtgctttaaccttcggatcgatgcttatttatcatatcattgctagccggttggtttatattggattatattgttattttattatatcatcatcagtcgattgcctctatatcattatctacattggacatatagccgattgcttaaaccctatcgctatcggctggtatcggcatcggctattatcggctatcggctggaactactccatcggcttgtcagctgatcggctgttttgatctactatttgcatatcttgtcagttgcaggatcaaactaactggcacgcccgcatctcatcaacctttggacctgcactggagctaagcagatctcccaggccggtgtattcgattttttcgtcaacaactatataccaagtcttatacggaatcatacctcgtatatagaatgagtttcggataaggaaggacaagtagagttctatatggaaacaacaaggactacttggattatatccatattggtctccctaattctacttagacaaggggacttctataggtataaatacaagaccccctaagggaaagagatgacacaacaatagatagacacacaatacacaagccaacacatgccgccagacatcaacattaaggataagcctagacagaccccgtatggtgcctgtggaggccgacaagagggatctagtgtcatctttgatctcgatgaactcatactcgaggaggaagactaccatgtcatcgactacgtgttggttatccatgccgctaagtcgagatagctagataggttatctcaaatattgtacttgtgtgattcagataattaagagtaccaccggcttcggccaacaggagtagggttattacctatcagataaggggctcgaacctgtataaaatcattgtctccatctcttttacctcaatcttgcatataccctgatatcgacgatcctcataccatgcaaataccgtagtcaaacctaaaacgtccacacttgcctccaacactccttgttgtattggtaaagaaaatatcaatgattatatttaggctccttgttaatcgtgctactgttgatggctgttaactaccaaattaacaccatcaatacatgcataaaaccataaatataaaacatccaatgtagtggtagggtttatttctaaccactttcacgagcattggtgtatatttggatgcaggtggcaaacaaccaaagttgagacaaaatatacatagaggaggaggtgaattaaacttccatattgaagcctatggagttttggatccacaaacctaatgaaacacattcaaatgggccaattgcaagtacatttgggctgaggggttctccaccagagcccacgagaaaattcggagcaaaacatgccagcaagggtttggccgaacccgtagcttcgccgttcggccccaaattttacatgccggcaattaccgacttgttatgacggtttctaccgattttacctaaacaactgtcatcagctggacacatggcaagagtagagtgaagatgctatttagatgcttagcatcttcacaatcccaaggcatctctccacctataaataccccactctcgctcattcacaacacacacctacatatagagctgaattataagaggctctaagtatattttaggttctttatatgttttatagtatacttagaatagggagagagtgaagtagaagaagtcggagaaattccggaggtcatgttgatttaaaggagtgctcattcttgcaatttaaaatgcatgatcttgtcattcgcaattctagcacctaaagatagccataatgaagtgaatgtagctcaattgattatgtttcttaaggtgaaactagtttatccggatttaagttttagacttgataaatgtactcgtatttatagctaactattatttcagtggtaggcaacatatccatcgtcagcgagagcctgtgatgactttgtcaatctcaacatatattattccaattttttgaacgtactcatagcttaagcttttgtctcgaaccgaccatcgaattaacactagaaattggactagttgggcgcttgggctgggcccaactcatttcaggccaagaaagtaagaagtgcccctaccaaaatgacacaatgccatggcccatgggtcaaggcttgggatatacccaacaattttacaaggtgattgtaacatgtaacaatcaaaagtgtaggctcgtatatctgtcagaacaatccttcatatgtggcttccctttgccagggtcatctttgtgctcctctttggtgcatccgctgttcttgtattcactggagctatgcccttcatattcatccaatatgccgaggtggtgtccagggtcaccctcatcgtgggctgcttttgaggctggagtctactatggctcgctggtcacggcttctttggctcgctgatcactgttgctgccgccgtctataggatgcgctatttctggaaagaagatacgtgttgagcttatggcctcggcagggtgcaacgtctgtggcattgtttgttgggcgtttctgcatgcttggggctgtctaccatgtccaaggattatagggtgcggcagtagtatgttatagtagaggggcggccttgtgccgaggtggtgtccagggtcaccctcatcgtgggctgtttttgaggctggagtctactatggctcgctggtcacggcttctttggctcgctggtcattgctgctgccaccgtctatgggatgcgctatttctggaaagaagatacgtgttgagcttctggtctcggcagggtgcaacgtctgtggcattgtttgtcgggcgtttctgcatgcttggggctgtctaccatgtccgaggatttgagggtgcaacagtagtatgttagagtagaggggcggccttgtggtttgattactgatactttggtttcatgtcatgaccgctcacggcatgtaagttattctgtgacctgtcatgatagttggaggctgtgaacatgataagtggctgtcgacgtttgatgtcgcgattccagtatttgcatagtatggggatagttggtactaggatatatgcgagattgtagtaaaagagatggagacgaggatttttatataggttcgggcccctgaattgtcaggtaataaccctactcctgttggccgaagccggtcgttgctcttattcaccataatcacaccagtacaatatttggggtagcctatctaactgttgtcaacttggcggtctgaagtgctgacttgtagtcgacaacagggtagccttccttctcgaatccgcatccggcaagatcaaagacatcgctatgtctctcctatcagtatccgtagacaccgtaggggactagccatacttatctctgaagtcgatatctggtgtcttgttgttgacggtcgttatcgatcaatttcgaccgtcaatattactaaaacaggagagaactagtgatgcttgcaatgcatatgtttgttagaataataatattccactagtattaggtctactaaccttttgcagagaatgacaataaagtggaagagaatcgacatcaacacaaccgataaatcaatcggatgatgtcgagaaccagacttgtgtgtgaataggccaagaactcagaattgacacgatgaattgggccaaaattcacaagtctgaggagtggagcaatagaggaggccactagccgaaactgggctggattgggctagccccaggttcggccgaacctggttcggccgaaccaatcctggcaccgttggatccaggttttggcgtggacgtccaggattgcatcccaatgacggttggagggcacttcagacaattccccttccacaaccatcatacctacctctatataaggagctcactctcttcacttcaacacatacctcaagcaagaactctctcattcctctcaagtttagtttagtagtatctagctggtggaatagaattagaataggaatcaggagtccggaagccttcggaagagttcgggtatggctctagtagctttcctttcctcttttgtaagccttgtacttttattagaatactcttctaaatacatttctggtattggaatactttccgagtatatgagtacctactttacattatgttcatgttatactgaatatgctgctagcttatctgggagatgcgttggtgcaggtatagtgtttgcttatgcaattactctatgtcatgatgatgatattagagtagtatctggtagtttagacgtggtgtctagattacaggatattattatttggggttatatactgcagatgagaggtgggccgctgatggtgacagctcaatacggatattcctccgcgcctatatataatcctaagttaatttcctggggagggtattcctccgtatttagccccggttggatggtcatgacgggctgttgtaaggaactcggcagtcaggggtggcttctcgaagtaccaggagggcatcggatagagggtattagctagtataccagttaactagaatttatgtatactatgtatattggaagtataggaatagattctctttctcttttctttccacctagcttagattaattattatgaggatgagtagtaatgcttgtgtgtcactctacccttggatttatcttaacccctgcttagaatatgattatcacaattaatatataagttattagttgagttctctttacatgatcttcccacgggataaaataaatacgatacccttggaatactcttgggtgaaatgctacaatattatatccgtgcgcttgcggatgaactctgtaaccataatataccagaagtatttctgcgtcattgctgggaattatatttctaataatgtcgttaagaaataccaacacttgtcttgtcgtatgttggcttgcatgttgatcttgtgtcttgatctattgttccgtgtcccctctcctcctaaagggctttgtatttatacccataggtgtccccttgtccaagtagaactagggaaccaatatggatacaatccgagtagtccttgtcgtttccatgtagaactctattcatccttccttatgcggaactcctcctatattcgaaggttgtttccgtataagacatggtatgtggtgggtcctgccgagatttagtcaactactattaggtatgtggtatccataaccctgacagtagcccccgactttaatgcaaattaacgagttcatattctcaatccgaagacctcggaataactgttatcgagctcacatgaccgttcttggtaagttcagagataacgttagacttcccttatcagcctcgtgcgggcaccatatatgtcacgcccagaaattcacgaaccagaatttctaagctgaatgggtattaaacccctgtccaggaccagccagggtacacaaacgacaattgttgacatacagatccacgtcttacaaaaatataaaggattacaaatgcagcggaaaaggtaaaagcgagctaagcctgaagacttgactcctgcagcgggcgattccattccacgggcaacccttgacggcagcgacgaaaccaacctcttcaagacacctccaactgagaagaacttcaactctggtgtgggggaaaagagcaagactgagtactacccactgtactcagcaagtcataccggaagaggaggcatgatgcaggatataaccaaaggaggctacggggttcatttgcataaagcaggcatttaaaaccagtagttgaaagatttaaacagttgtaataattaattagtatcaactatccactgtccaacactaacccacgttgcgacaggcccaaccatccacctaaactatccaaattcaaaagattacactagggtgagactaatcacggtgaatctggttgaccgcccataaccgcgggcacggctattcgaatagttttactctgatcagaggtgtacaactgtactcacaagacacagccccacgacacgtttccgtgcgctgacatgccaccacgacatatcggaaagaggccgtgacaggacccttcgcataaccccctctagccaagcacaccacacctcaggtttcacccccatccccagtgggcaacgggcagtcccctctcgtgcctaggtgaatccggaagcgacagaggccgtcgcagggcccgccccgctccatcacgcccacccttgcctggatgcgtcgactagaggaaagctacactacaagcccagccgttgcccacgctggcttgtggtaagtacgataagttcttccagggcgtcccgcgaaccggtccttaactgccatgggtgcgaccagcaaaaccatgcacccacagcccaccatgtgatttattttaattaaccaacaccaaagcggtgtcactaatccaacaaaaccattagaaccaacagtctaaacattaataggattttccccaatgtgaactagttgaactaggcatggctaagcaatccctagtcctaactctaatcatgttagaaccccaagttgacaaagaaacatggtacatcaacagcatggctacggcaataggtaaacaacccatagtatcattctaaaaaatgcaatatttgaaagaaaacaatagagcatttgcaatataggatcaacatgttcaagtgacaagcatgacttgccttgctctcgcactgatggaaccacagcaacgtcttcgagaaaccacgaatcgacgaaacgggcgaaatctacgcgacaaacaaagcacacaagcaaaacatgctataagactactgaaacaggaaacaaaaccatttttaatggattctatacatttttatgaatttactgagacttgaatggacttaatcggagctcggatgaattagttatgatttttagaagattatctgtgtttttactaataaagaaaaacccttaatcaatttattgcgcaataattcatcccagggctgacgtcagcacaaggaggggtggcgccgacacgcaggccccactggtcagcggctcaagggggagggaggggtactggcaggcggggccctccgggcggcggctcctgggggaaggaggaaggtggcctggctcggctcggcttcaagccggccggccggttatggcgagggcggcggcagcaagcggccaccgacggcggcggccgacgacgcgggcgacggtgcatcgcggcgacgcgcatgtggggagcggcggcgcgcgcgggaggaagagagagggagttctcaccggggttcggccggcgcgggaggagacgacggcaaacggcgacggtgagcgaccgaagggcgacggcgaacggcggccgagctccgggacaccttaagagaggaagtgtgagaggttagagggagagagggtgcccacgacgagcgagagccatggccgacggcggcggctatggtggtactcaccggcgcgcggggagaagcgggccccgacggcgggattggatggggatgcggcggccggggtagcttttgcggcggcggattggctcggcggcggctccagcagcggcgagcggcggccggaggagtggaaaaggcggcggcggcgggtgtagcggcgcgggagcgatagagggcacgggagggagcggtggaaagaggaaaaggtggaggggagtggagggatggtttatatgggctcgggaggggcggacgagcccggaaaggtgcccggatttttcgccgacgtgcggaatggagagaaagagagagagagagagagggagagagagattcgaattcgaatccctccgttgcggggtgcacgcgcgagtggaaggagtggggatggtggccggcaacgtgggcacggggcgcggagtggggcccggaaggcgggggaggcggccggcgtgggcggctcggcggttgccggcttggggagcggcggcgggaggttagggaaagggctgacaggtgggccccacctgtcagcgcccgagagggagaaggaggccgggtgaacttcgggagtaggagggaggagcgggccggcgcgggaaaaaaatgggccggcggcccaagaaaaggaaaaaggagggaaaagaaaagataaaaaggaaaaaggattttcccagggatttactattgcactttgcttattttaattggttaaaattatttccaaggctctgaaaattccactaaaaatcctgttagcatattttgacacgtagaattcaagaaaaattccacatgtcgattccgattattatttgcatttattaattagggattcatctctaggttaaattaaacaatttcttcggacgatttattttatgaatttagagcaagggaggggaacttcagggcgtgacaatatagggtttatctgagtcaatctccgacatcaaccaagaaagtacagagcatacgactaagtctctcgtcttgctgcaatcgagaatttggattgaagtcaaaaaattttatctcggcgggtacaccatcttttcattctgtatttcttatcgagatccaccaaccgttctcgaatggtcgagaaggcgcagagtctgcgacgaagccttgtcaacatttgtcgcactcaccttagtcgatcttggtgtagaaccatagagatatggagtcttcgacaatgtcgaatagaattttcctgaaatcaatactcagaaaagaatattagatagaaatagcccccgagcgaacgctcaaagggtgacatgttataatatgtatggaaaactagaaatgaattaaatttacagaccaatgttttgtgtacgagcatcttctcttttatcgacttcgatcagtcagtttgttgagtcatacactctccctagcccccagcctttcatcggagataagttctcggaggagaatgctcttggaccgttgacctgccttggttgaaaaaacgcttaccctaacccccagccgtgaagttggaaaacccaatttccgaatatacggcggagggcacaacaccaccatggctccgatagtattctctaattaattcctcgacgactagctagctagcttgattcaattcactgaatggctagcgatcgagctggatcaacgatcactgatgcctggctgccatgttactactactcccatcgcgaaatctatttcgagagcgcttttggtttagctctatagcgcggcgtatctcagagccgtctaactgtgcacgtcgtcatgatgtcgatccacgtgggtgtctttttcctttcaaataaagttcacgtgggtgtctttttcctattcaaataaagtttcctctcaaattacttatccaatctacaatccgattacaccattgtgtacgttacaattaaatcttcacaacaagatcttacatgattatgttacgatgaaaaaaatatttatatttgtaaattacttttattatatacataagttacttttatcatatatatatatatatatatatatatatatatatagttacttttagatttgactaaattacttcttagacatataaaagtaaattcaataaagtctaaaagtaatttacatatattgtaaaagtaacttaaaacaaaacggaagtaactttgtcacgacattagaagtaaattcgttgtagggataaaatatgactttttagttagttccataatttgtgctgattaatttaatttttagatagagttatgtttttatctctacaatggatttattcaaatgacatgccaaagttaccttcgttttgttctaagttacttctataatatatataaattacttttagacttactgaatttacttttatagtttaagaagtaacttagtgaaatgtaaaagtaatttagacatatcataaaagtaatttgtgatttttcatcaaaatataatcatgtgagatcttgttgtaaagatttaatgcaacgaacacgacggcgtaatcggattataaatcggataagtaatttaagagaaacttctctaagaaggaaaaaaatatatagatattgagtgtactagtaactttttttttttggaaagaagggtgtctctctagcactatccagctagtactctcggtgtagtcgcgtcctactccaatacatataggatggagaagctagcttacagcgatccgcttaggagtcgaacgctactgatcgcttcggacttcgaccgtgtaccggatggacgtctactatatatacgcttggctcgtgtggtattcctcgactatagatggccataagacccgagacccgacccaagtatggcacggcatgattgctatcggacccgtgccggcgacggcgaggcccgacggcccagccgatgtcacagcacggtgggctggctcagcactgtacggtcaaagtaaaatagttgagggagccaaaataaacttaattaagctatataacggcatgggccaaagagtagagggatgcaaaaaagtcttatttatccatataagaaactcgccaaagagtgagaaaggaaaattagacttaatccataaagaagcacgatgggcagccgtgccttcgggccggcccgagtattattgggcttggctatgcccaacaattgtacaacacaatagaggtgattgttacatgtaacgatcgataagtttaggctcaaatctctgtcagaacgtgagaggtaggtgactaactggaccgactgtcacaaattcatcgtacctcgcttaacttgctaactggttgctatatgttcagacaacgatttcaaaatagcatgcacccagtgtgtgaaaaacaaggagaaaaacagtggccacatctctgaatttaacacatatgtgctgtacacaaaactttgacgattgatcgtattggaactgagagagacagattagaacttagcagagatcgagagggtcaaacacaaaggtattagacacacggcaagcaaccttcatgcatgcacgaaccaattcattatgatctgactcctctacgaacctgcgctgcatggagccaagtctcagaactatttacgaaatgtattttttttcttttgtgaaatttttatatgaactggtccagttccttgcaaatctctccaaaaattcctctgttccaacggatgtttgttttttttaacgaagaaaatataacttttggtctttttaccaacttcatcccggtgcaaaatttatggtttgtttagactatggtagctacgaatatggatgcacctgtttaaaattcctataaaatctatgaatttagacaaactagttattacaccaaatttcgtttaattgttcaacaagagtttgaccacgatggttttgcccactggcaggtgatagatagctcatccaaggagatgctctccagccaattgcatttttgtaagtaaaataaaagacaggtggcaccaaggaatagtggaagccatggagaggaccaaatcggaagcagtgagaagaggccggagagatgaaagggagatgtcagcattcagcaaaagagaccaatctccaaaagcaacccgtcttcttctcctccacagaagttgatgccctggagccccccaagcatctaccctcttgtgccttggatcttacatggacctagctcatggaccaaatgctgattagttgattttctcctttattccgcttaatttgctgtctatgcaatattgcaatatgcttgtggtttatatagtactccctctctctgtcccattttaagtgcagctataattttctatgcccaacttcaatcgtccgtcttatttgaaaattttttgaaaaaaaaattaaaaacataaatcacgtataaaaaactattcatgttttatcatcttataacaataaaaatacttattataaaaaaattcaaataagacagacgattaaaattaagcacggaaacttatagttgtacttaaaatgggacggagggagtacataagagatattacacttgtaaatttcctaataaccacatttaaaacttgtattattggacttgttgctaatgaaagtatggagcgtggattttcaaatacatcatcatatattgaggtactcgataacgctatgcagtgttgcacagtagcttacagcactgcaacaacttcgtaatcatgctagcacactgcaccagcacaacactgtatagcgcaaccgaacaagtcctatataggtgggtgaaaccatgtatgtttatcatatcgccaagctagttggctgctttggcaagtcactgataaaatctaacaagcgagcaattggcattagagaattggaattttctatagtacatgtgcatttagtacatgtattcctttaaaactttacagtttactgctcagcgcttaaaaactaagttaaaattctcataaatttgaaaattaaaccacatacacgtaaaatttagctaatttaacttgtgcctatgagcctatcactatatacatactttatcacttgtggagtttaacttgtacggttttctgaaaccttccatttaaccttgtccatagacagcgtccacccagcagattaagcaggttaacggccaagaagagtccccggcgtccccgcatctgaaaccaacgctcactcctccccctccactcgcccgcggaatcttccttcctccgattccctcctcctcttcttcttcccctcctccacctccgcgccctccacctgttcgacgaaatatcccacccaccctccccctctcgccgcgcaccgccgctacttatacccgccattttcacctcgcccccccgcgcttcccgccactaacattcactgacttagctcgtggtagtttgtagtttggagtcgtactgcgatgctcaaggcgctcaacacgccgacgccgccgctccggctccgcccggcatgccgcgtcgcctcgcagtgtggtgggcggccgagcacgaggcgcaggggggccggaggcgggccgcgcagggcggtgccgcagccgcccgtgcgccgaccgtccggggaccgcgcgtgcacgccgtggcgcggcggggtgggtgccgcggcaccggcgccggtgacacccgtcgccgcggcgggggcgagggatgagctggaggcgttcttggaggtggtgccggcgaggatgaggcgcgggctggcgcggcacccggaggtgagggagctggtggaggtcgtcatggacctcggccgccggccgctcgcgcggttcccgtccggggactgggtgatctccgagcaggccgtcaccgccgatgatctccaccaggccgtctcaaaggtgtggaggcaccaactaattcacaaagattttgtcaatcttgaaatgggcttgagctctacaagtctagatcaatgatcatgatgtatgataatacctcagtacctcagaatttgctagatagttaaggtcatatcaattgtgattttccccccttttgtgaatatgttgtgtttgctcattttgaagatcggtgattcttgcaggtaggcgacttctctgaagacaaccgatccgggatcaaccactcgttgcacaggatcagcgccatccggaaccgcaaggctcatataattggtctcacttgccgtgtgggccgggctatatctggaagtgcagagatgatccgtgatctggttgtgggaggcggttcaatattggtgattggacctccaggggttgggaagactactctgatcaggtatatcgctagttaatgctactaaaatcttgtagatcaggcagtttttgttgtcatgtaatttacatcataagctaatttggcactttagttggaaagttcgaaaataagttgatcagtgttgtgatatgatgctaacagtttgagatgctttcaacaatacagggaaatagctagaattttggctgatgagggtaagaaacgtgtgatcatagtggacacgtcaaatgaaataggaggtgatggggatgtgcctcattctggcatcgggcgttctaggagaatgcaagttcccaaagttagcatgcagcataacgtaagttttcaatattgttttatatgctttatattatcaaagaattccctgaaaatttttttgaataaagttatctcttattagtgaagtataatgatatataggaaactttctttctgtaggtaatgattgaagctgttgaaaatcacatgccggaagttattgttatcgatgagattggtactgagcttgaagcaatggcagccagcaccattgctcaaaggggtgttcaacttgttggaactgcacatggggtgacaattgagagcataattaaaaacccttgtttgcaagtgcttgttggtggaattgaggtacagttttttcatcaatgttatctattcactcattgtttgtattctgttgaagcatttactatcttctgcaacagagcattaaagcaccatttgtttcagttaatttgatagtgaaaataataatcataagttcattatacagagtgtgactcttggcgatgaggaggcgaaaaagcgtaaagttcagaaaacaattcttgagagaaaaggacctccaacattttcatgtgctgtggagatgatttcaaagactgagtgccgagtacaccacaagttagaggctactgttgatgctattcttgcaggtaatcatcgaactctttactctttagatgtataacactcctaaatcgacacctcttacatgaagtagaacatttatatatatgttcaggttttcatggccatcaattcattttttatttcacactattacagggaagcctcctaaatttgaagcacgtaagatggattacaaggctactgagtcaggaagatcgttggtgatacctgaaagagaatatgaaacagaacccttgccttcataccaggaacatcattttgccaaggcaatgccatccgaagataacttcgatgatgatttcagcacccggagaacagaaagcaagagtgtaccatcaaatgataatttcaacgatgattttggctctacaagaaaaacaaaaggcaaaacatctgtacctggaaaatctccagtccatgtgtacacgtaccaggtaagtctgggctgcaggaat

SEQ ID NO: 15369 - DNA, 18643 bp, Oryza sativa
aaaaccaaagggcaaacatctgtacctggaaaatctccagtccatgttgtacacgtaccaggtaagtttgagataaagaacatgaagttctggattttacctttttattattgggtattgtattcatgtaaagacatattaaatacatcattgttatatgacctcagtaactaacagtcacatcctggttgggagctcaccactttgccttagatcggccttgttgtgggcttaggactggtgcaatgcccatggcagacatcaactgcatgttcttctatactgtttaaattctttcttaggttctatagttcgcagtatacatttttttaatcttgtttacaattgaatgctagccccttagaaaaaacataacttaggaaaatcttttatttgttttctagtactttggtgtccccaactattaatgttgaatgatatggttctcctatattttcttataacggatgtttgagttatactataatctggttcctgatttagtgagagataacaaagatctatttctattttcttctttcagatttcagaagctgatatcttgcaagtagcaacagtgatgggattcgatgatgaattagatgtgacggatgacattggagctgccaatgtgattcttgcatcgagttctgagatgaagcagaatcactggattcgcaatgtcgccaaataccacaagcttcccatatttgttgttaaggtcattgcttgatctttgtattttgtggtttcaagtgtcaaactctgttatgctcgttttaacatactcggttttacattggcacaacagacaaacacaatggctcagatagtaaaggctgttagaatgattgttgggagggataaactcaatgcaccaacacgcaagcagcctaaggttgtggtgggagagatagagattgaagatgatgctccaaagaggaagccatcattggaggaaattgatgctctggaggtaattactttgccatacattgtcttgaaaaataactaaaactatttcaggttccatgtaagaaaaactgatgccatgtagaagtactataacttattgaaagatgcagcctctgtagtacaggaattttcctaacaaccacatttcattcactacactcgcaggaggcccgcctcgcaatcgagtacattgtaatcccaggtggagagcccgtagaactcctcccaagatgttcagaaatagttgcccggcaactggagcttgttgagagctaccagctcctggccgaaacctttggaactgactccaactcgaggttgcagattcttccggtgaaaataaccaagaagagctcaagcaaaggcagtgcaggatcgatgcccaagcaaggcagctctgacctgatcgtcagcgacaacggaggcggctccagtttttctcggctgccctttctgccgaaatgaccattgctagattgacactctgatctgatcaccgttgcccccaaactgtacatcattcttctttcctctgcattgtttttttgttgtacataatacatacctgtgcagtgttgtaaatagtgtttgaatgttgaagaatcgaaagagcaaagctaattgtaattgccttccattcttttacagaaataaaaatatcacatttctggtgtcttagccagattaactcacagttgtaccctcatttttgtttggctgatgtttactaacgctctttgcatttcttttgtttggatacccggatgacaacgcacacactgttaggcctcctttggaacacaaaagttccccgcatcacagcagtcagcagtgacatcttcaatttcccaataaaacgaatattttacctttacgaaacccgtaaaacgaatatctcattatctaaaaaaaataaaacgaatatcagtattcttgtatatatgtatgtaagaagcaaaaaaaagaaaaaaaacttttttttcttaggaatgtctcaggagtctgcaggaacattgtttttttattctttggagaaattcaggaacattgtttatgtaaagtaggagagtaaacagtgtaagacctttgctacgaaagcaaaaaaaaaaaaaaggtttctcaaaaaaagaaaagaaaagaaaaactcaaagtagaaagaggtaacgtaccactcccgtgggccggaccaacactccttcccaaaaaagcccaaaaatatccaatcgtctcgtaaagggggctcaaaacaaaaaggcccacgaaccaatttcgcatgtgcgacccgtgcagcccatctcacgaccatctctctctatatatagaaagccccagatttttctcctctcctcctcctcgcctcattccatttcatcccctcctctctctctcaaaaccctaattccccgacccgagcaagccctaggtcgccgccgcgccgcgaggtaggtctcgcctcccgggagctcgcggaggcgcgaattggtgccctgattggttggtgcgcgtttcgggttctgaggggttatttggtttttttttggtggtttgtgtaggttggaggagttggatttgggtctgatttgattcggattgggcgtggtggagatggcggagaaggaggtcgggaggatcttcgtgggcgggctgtcgtgggacaccacggagcgcacgctcgagcgcgccttcagcgagtacggcaaggtcatcgagacgcaggtataatgattgaaataaattttgttcaagcggatgcgtgtgagcctcttttcgtgcgggaggattgttttgtagggtcgaggaacgaaggttctttttgcttaatttttgtccaattcttctgtctgtttatgcatcgcatggttcctaggcaattcctcatggatttcaattatggtttaacttataacctagaggtaacctcttgctaatttgtctcttttgatgaaaagatggtaagtgtggtagatccgctttttgttggcccgattatgtgataaacagagtcccggactataccttaacttgaatagagtatcgatgaaaaccgtttttagcaatcaattaatttttcattaataaggaaaaaaaagaagaaaagtagcagtggaaccatgtttattgagattcacgaaaaagggtaaactgttgcctacctgttggtaactgatatattaggttattaggtggatagctaataaagtcctatcgaattcacgattacaggaataaatgctctacgaagcttccaaagatggagcacagggtgtttattttgtttctgcttttagtaaatgctcttttggctttcttcattttcattctaatagcaattattgattttcagagcctgcagtcccttccagttctatattttaggaagttaatgaagttgaagggaaaagaaacacattaatcaattgggcccatggttatacattttcggggtgatgggttcagtaaaaatcaatttcaagtatccacaccgttagtcaattgacagctgtgctctgttttgtgggcagaagcagagatctgtctttgcgatgctagttctgataactgatgtcagcttaagattgcagcaaatgaattatcattgctattattaatgaattcaacagaattaaacatgactgcgagtgtggatgtgacatactgcaaaaaaattctgcataatggttctggatccgttttgataagaaaggcagaggcagatttgtttgaatcctatgattagtcaggtggtacagatgatgctgatgaatgagtgctatatgctcttacatgcttctcatttgcctggaagacaattatacggtgccttgacattgccacttccttgaaatggacatgcttaactgtgcacgacaaagaaacagcagaagataagaattaagaattagtttagatactgcaagtattttgccttgaaggtatatggcagacccaactaacatatgaccatgttcttattagaacttcatctgtaactcctttctttgcgtctgtagtgctggccaaatacttgatctttgtgtcagttagtttgatggtgagcttacctgttcctgcagcacataagacaaagaagcctacatgttgttttggcagtgtgcagtgcctaccgatatcctctagactctggcacatacttaaagttctgatctggagatcactagcatactgtaccattgggcagttaacagatttgaacttccatagggtgtttgagcagtggtaaaaggggatttgcctgttatcctttcagagttgtctgagatggtttgactggttgcatgcatgaaatttgcttcagctgttgtcacttcatgtgtcccaatttgtatgtgcatgccattgttagcgtttgattttttaggttcattatcattacagttgctatgtacccatcagttcactttcattgtatgtataggtcgtattggaaagagacacaggccgctcccgtggatttgggtttgttacattctcagaacctcgggctgtggatgctgcaattcggggaatgcataatggagaactagatggcagaaccatttctgtgaacaaggctcaacctaggatgaacactgatgatggctatggctatggtggtggtggtggtggtggtggtacttactcatctggtgctagaggtggatatcgtggtggaggtgatgcagttccctctgcaaatgatgactgcttcaaatgtggccgtgcgggacattgggctcgtgaatgtccttattccagtggaggtgggggtggtagaactggaaggtactcacccccttccagatatggcagtggaactggtggtggacgtggtgaccgctttggaggatcagaccgttttgctaaccgctatgttgatgaccgatatgatggtgggcgctatgttgatgatcgctatggtggtggtggacgtgatcgatatgccactgatcgctatccaccaactgccgatcgttttacaggtgacagatatggtggttctgatcgttatgcatcaagtggatttaccagggaaagaagctatgaaagagatggaggacggtccggtggaagttactatcgtgatgaacctagaggctctggtggttatgacaaaggtggcatgcgcatggggagtggtgacagatacgggaccggtggacctgctcgctttgctgggagttacagagataggcctgccccatatgatcgtcccagccgggcagcagcacgcacttatgatgaccgctactgatggaggttacttcggagcattgcagaagaccagaattacaaatatatgttccagttcgcagttcctactttatttgccttcctgtattagtacatcgactctttgagtgttgttcttccatgcagtttgtttaattactagtgagacaataaggcagttcttgaattgttagtatgttggcacattaagctccaggcagtgggtgattctgattccctgttatcgtggtactgtgtaattaccctccagtgtaataatcgtgttccgagtgtgctgtcttatataattttattctggatagcattgaagattactgtgacacatgtggtttctggaacctggatagatgttacatctgctggaaagaaaattcatactgttcttatctgaaatgctcatttggcatcaacattccgtagtccatactacatcagatttgctcttttctgatagatattatgggctgagtagaaatggtgttatcaggccttatttttgtgaagacagtggtaatcagtgaggaatgtatgtctgcttccagttttagatgagaacagttcgttgagatcagaaggagcaaacagaatcatgtacattcaagcatatgaaatgccacactgccaagcttcagcttcacgcatgcatcattgaagtagtgaagtatgcatcccgcaaaactgaatgaagaaaagcagaatatcatggtagaatttatttctagttgccaggttcacatactggagatgagtacatgtacatccgacaacagcacatccgaaactgttacagcacctgaaatttattaacttgctgggttggctacaatccagtgccgttctaactgtttattattgtaaatcagttgagtagtgaggcagtctctcccgcgatctctctgtccataatgactaacttcttcgcaatcaccatcttattctctcgaggattgtatttactgatttgtcttctgtagctcgtagtaacctgctggtatataaaatgaacgctggaatgattaaaaagcacgctattttgtgttggttggtagatggccgatgtaagaacaacggaagacttaccgtttccagctacaggacggactgtgggagaaccttgtaggggttcaggattgaatttgggtcgagcaacttcttgatggaagccatcagttgcacctggcaacattagaacattagttgcacaattaaatggcaatacatagctagagcttaatggagaattcaatgtcaaagttaggttggtcaagtaatgcacaatgaggattactctgaagaaaacaaacaaacaggccctaagcaggacgaacagcccttaattgaagtagtttgccaacataaataagcagtccatggtgacttattgttcactaagaaaaaaaacataaataagcagtccatgatgacttattgttcactaagaaaaaatgcagttcatgcttgcataaaattcttcgagacagaccttccacacaacgacttattggtggatgccaagttggaaggtaacacgtaaggacttactgcctcagatgacttgctgtagtgaatcttctcggctttcattagacccaatccatgctctgcactaatgctccctctctgtttggaggtccactcgtagacaaatggttcaatttgtgccagcatctaacattttcagtaaagcacccaaaataagcaggctgtccacaatcttgagataccgaactagcttgactacatctaaattaagttacgaaccacaccttgtcgctgtactttgttgataagatgttcagatgcaggttcccatcaccaaggtgcccatagcccaatacttgtcccatatcacctacaaaagaaaggtaatcagtagcttatacactattaatggcacaaccaagtagacaattaccaacacggctgcgcatttcttcaacaatatcatatagcttctctacgggtatggacaagtcatacttgtagacagccccaactttgacggatgcttttgatataccctacaacaaagacatactaatttcaatgatttttgcccattattagactgattacacgagcaatcttaaaaggtgaggacatttgatacaactaactttggacctgcattacaaggtggtaaggacgtaaggtttcatttgtttattagatgcttcaactaaagagaaaaattacacataaggctaaacatatgatcacctcacgaattctccaaaaattagaggcttggctaatatcttgtgctataactccatcagctaccaggccatcttccattgaacgcaacaaaaaagcttcaagtttggctctacaaaagaaatgcaacataatgactggatgatagcacctctgcgatgtggaaatctacataaattgttttccagcatagctgcatttatgttatttcaagtagaaatagtaaatgtcagttcataatgactgatatgttaaaaattcaaactagaatatgctccacggaccattggcttatacactcaggaccacatttttctcaaatcactttctttgcagcccaaaaagcactaaaagaagagaaaaaagacaccctacaccttgatgaaagtcttaaatagatcaaaacgtcacaggaagaaaacaaccaagttaaattgcagtagtgttctcctaaagataaaatcagtggtaacttagaattagcagtagcaactactgacattgttagtttattacggtaataaagaattagctacaagagcttacttacttatcatatgactcatcacttcctgtcgtctcgattagaacataaaaattgaacggtgatacaggtagaggattgtgaactccttccaaatatttcatagccttcaaaaccaaataaactatcaaaagccaatctatatacacaagcatacatgattagtgaaacgtatttcttatgtagagcaacacaataaagaagcgcaagtagtttcttctcgtctgctaattgcatgaataaggaacccaatatataataaattacattaaattgatcaaaattggtaatgaactcaccacttccctactttacagaaagtccacatggggccttaaaatgaatatataaacatatttgcatgtaatttcttctctatgaggggtctaagggttaaaatttgctcaggtaagtaccagattaatacaatgacgatccatgaactcaaatgcagagagaatctcaccccggctcctcctgggtgccagtaataatttctggatacacaaacagtaagaaatcactatcttcaagatcacatacacatgaagataaagggcaaacagagcctagaaacggaccgcctatccagacctgacagcttatgtagtcattgcaggaaagaaatgcaacattagttgatggtagctttgcaggagtaagtattgcaattttagtgacaattcctagtgagccttcacttccttgaacagctggaattagttagtgtattcattactaaccattgaaaataatcaatgtaagcatatagagaacagttgaaaatagttattgtatccaatactaaccaataaataagtgcttcagatcatatccagtgttgtctttccttaaagtagtaagcatatcgagaacagttccatcggccaagacaacttcaagacctgaataggacgaaataactcaaggatctcctcacagttgtctttaaaaaaaagataaacgtgcagaaattttatacttgcaaattgcaattcaaagtcttaggggatgggtggagggggttctctccaatcccatgctgccatgcatcaagaacttgtttcaattgtaaaataatttagaaaaggatatttctataagaataacagagagagagagagagagagagagagattatgaggaacataaaaacccctttcaaatggaacaaagggacagcaaaagttcaaaatacaactagcactaggaaaaaaaaaggaaggaactactttaacttaccaagtacacttccatgaagtgaaccgtaacgtatgaaacgtaggccaccggcgttagttgaaatgttgccacctatgtgacaactaccttttgctcccaggtcaagcggcataataaacctgaataagtgatagagtatcttgagttttctttccttgcaataaaaataatcatagatggatcttacaaaaacacatactggagtaacaagaatgacaaaggtactgacagtggcataccacaaccatcagttgactatgagcagactaatgagtatgtgtgagtattatgaaatccaacaactcaaaatagccaacaatatatttatgaacataagaaatccagtgaacataatttcaaacaaaataataatggaaataagacaggttaccccttattttccacataggagcttaaattctccaacacacaaccagcttcacaagtaagaataccatttacctacaacatataatagccatgctcagaacttgacagctgctacgtgaaatttttctgtgattgctcataacaatggatagataacatcaatctcaaaaaaccaatcgatgagcagatcacagaattcaacatattgaatacaaactgtaccaagtaccaacattgtcaaaggttattattttgtccataccaccaaggctgatgataacctgcaaacaaggggggagcacttgtgatctcagggcttaaacataagagcagtagtaaaacagagaatgcaattgaactgaaaaggaaacaaagatgtaattgatatgcatgttacatcgacaagtataataagagattctataaactggattgaattttgttatcaatgaagtaaagataatattaatcacaagaatggaaactgaatgagttcaaataatatatactgtgtttctaaaaatctaatagatcatgcaaaataaacagttcatcatgtgtcacagtacaggacaaagtaaaaagatcaccaaggcagcatcagcaactgaaagcaattcgatagaagtaggataaatcctagagaaacaagaaaactagctgaagcaaattcggacctaaaataattaccaaataatatatcttatcattaaacagagcttgtgctttatagttacctcatcataaacaggcacactgccacctacaagacctgtgttcccaccctgagggaccacagccaatcgtctggagttgcaataagaaaggatcttagaaacctggaatagaagaatggtttaataaacaatctgaacatgaattttgttgcgtctgaatcttaatacaaagatacgcaagtcttaagcatattcccccaaaaaagaagatttcttttattgtgtctaaccatgaatagaactgaactagaataagggagtgtttgaagagaaggggattgaggagattgggaagatacgcaaaacgaggtgagccattagctcatgattaattgagtattaactattttaaatttcaaaaatggattaatatgattttttaaagcaactttcctattgaaattttttgcaaaaaacgcaccgtttagtagtttgaaaagcgtgcgcgcggaaaacgagacacaatctctcctatctccacctaaagaacactccctaagtgagctggagaaaaaaggaaaaatacctccgcagtactttttggtaaaagcaataactgacttgaacccttgtatttacccatccaatccatatttgcaactgatactctgtcttcatcctgaaccacaccactatcacccaagatactcttaaagtaggagacatcatcagaattcagcactgaatatgcaggattcctctgaacgtgtgctgctgcagaactgaatgaacgcttctggacttcaaaattcatgcgtgcgctttgttgtgtgtcatctgtttccacattagtcctgaatccatacaaagagcgttgctgaccttgaatcgaatagaatctgctaaaagcatggtttgcggctccatattgtttaggatacatgcctagaaagcaacattgatcataatatttcaggtaaaagcatctcatgaagttgcaggtatcatccaatatatttattgcaactcaactttggagttttaacaaagcatggaaactagtgattttctgtctgataaaataaattataggaacaaaaatgctataaaaataattaaattgtacaagattatttaggaaatctcagaaaccttaatgctttcaccatgtcgaaaactagttgcgaacctacttcagctagaaagattggagcatggatagtgcaaacaaggatatgcgactgtttcaacatagaactatacaaaggcaatcgtacttgcattatttccaatggatgtgatgccatatatacacatttttaccaagacatttaaccagcgagaacaacctctccaagcccatatacacaaaattcgagctaataaaacacacattataatagtttctagtacacaatgtacacttaactacttccttataccaaactagaatccggtcgcaaactaaatcccatttaaaacaacaaaacacacccgagatttttctcctcgagactaaagtgaaatcatccgagatcaccaaccaccaactgctgtttcagatttacagcgtatgtgttgctgcaactcaaagttagtagttcacagcagttcacgaaccactaccactccccagtcctcacttccccgcaccacacacacagcgagcgagcggccatgaccgaccggatcgttcgaaccctagcagggagggggggagagcgagagggtcatgggcaggcgaagagcaaattaagccaatctcacctcgcgcctgcagtgtctcgccggcggcgaggggccccaggtggcggcggaggagccccgccgccgcgcgcctcgccatccgcgcgccctcggaaggaggagggagaggtggtggtggggggagcgagctcgagcgtcgagggcagcgcgcgcggcgtctctgcccctctctctctcgaagaagaaaacaaggaagtgaacgctgtggaagagagagagagaagaggcgtacggctttgtagcttgtccagctggcatgatctactagctattgtgtcattctgacgtgtaaagcccttatcattactactagtactactcttttctaatttgattgattctatagtttacccggggacagttggtctcaaaataaccaattcctatgtttttttaaaaaaatttacctactactactacataaaaaaacgaatttctagctataaacctagacacatgtgtgtctagtttcgtagatagaattagtttttttagacggatgggatacttattaattaattgtgcactatttaggtgcctaggaagggccccaaacaaacatggccttatttttattttatatatagagtatcttaagattaaagagtcgaaaatgacactccttccgttttatattacaagttgtttaattttcttctagtaaaacttctttaagtttggttaaatttatagaaaagtatattagtatttacaacacaaaatagacatattatcaaaatatattaaatgttgaatttaattaaactaatttaaaatttttaaatgttgttaattttttctataaacttgatcaaacttaacaaagtttgactagacaaaaagtcatacgacgtataatatgaaacataaatagtattaaactggttggcttatagtcatagccgaatttaaattttaaaattgttgattttgagtgtttttatagtagttagtttttttaacatttctttaattgctaatatcacacatcaaaagaattatctataaataattataagccatagtgcttattacaagcagttattataaactgcggtccgggttctaattgttttgccaacagaagattataatccgtttagtgcaaacaaataatttacgccactaataatgttttatgtgacatttgattatttatcttatcaaaaagtgttgcttattttgttgtgacttaccttatcattaaatgaactttatgcatgatttatatttttatatatttacactaaaatttcaaaaagatgaatgatttttttaaaaaaaaatcaacggcgtaagacaatccaaaaaataaactatttcctccgttttatattataagactttattggcatatatgcttagattcattaacatttatataaatatggacaatgctagaaagtcttataatctggaacggagggagtacgatgacaaatattgaaatcaatctgtacgagagctcggaatcgctgaagtccgtcgagctcgttcttgcgtggatccggccctgactcggaataagcgagatacacatatatattgcatctggtcgattgttttctaccttatatttcttcgtcttcctcttgatcgagagataacagtgtgtgagagcgtacgtactgtgaggcggcagcatgatgatgacgacccttatcgccccgataatcatcgccgccgcgactacgccgtcgtcggtgccatcattgtcgccgtcgtctacgcagctgccgccgccccaagttatcgccatcgccgtggcgccacccatttgtcacgttctatgggccgggcttcgagcactgggatttggtctaggcaaatagggtgcatacttttaaaagagaaggcaacagcaacagatggggcatcgataaagaaatcaacacaactgaagccaaggcttcttcctcctccaatttcctctcttctctttgttcttctaatcctaggctctgctctcttattcccagtcccctgcttctcttcccaatctacattgctaattccttccaattatatccaaattacttgagtgattaatgctgtgaattatcggttgcttccggtgttgggcattgatcggtgggtgggttgaggatcgtaacattatggtatcagccaccgatccgtgggattccaaacaaggacactatgtgggggacacgggatggaaggggcgacctctgggagcgggatttgagccatggaagtgttggtgctagtggtgcccgccaggtgttcggtgaaatgccgagctggctgggaggtggcgcaggcgctactcttcgtgtctaagtgagtcaagtcctttacccagtgaccggcgaggtactgcatcaaatttataacacctatggagcggtggtggtgcaggtcctcaccacgagctcttagggtgttgaggctttcgtgtggttccggtcatgctgtgatgcagagatgactctttctgtcaccaatggacgcaacatctatgatgggtgttacctgcttgatgtccagcacgtgcatcctttcaacgggaacggtgtcgacatgacgcccaccaagtgtttgacgttgggaccaagcagcatcaccactaggccagcagttgagagttctcttgctgcaccagaacatgtgtttccagccactatgaactcatccacaccctcaactaccgcagctgctattgcaacaccgtcaccatccatcaaaaccaacaaagccgagggcgacatggctcaagttgagatgaaaccaaaggatacattccaggagttgtgtgccaagattattgccacgctcaacaacatgcttgtgacatgccgcaacatcaagcttgagtcaatcacgagcgttggtatcaccagagtggtgacagctaaaagcaccaacactaaatctgtccccaacacattggaggtcagtgatgaggccaattcaatcagcttggttgatactaatgagttctacatggtgacaactaccaagtgtttgacgaaaggcaatgaacaaatgatcaatgatgatgacgatgacatggccaccgaggatttagttgagctcactaaagtgaattccaagttcacactactgcaaacaggtagctctccaccagtatcaccttggagagcggcaattccatggtacaaagctgagatgaccttaggttatcgtcctttaccatggcatgatccatggttgagtcaagacagcggaagcgtggtgatgacgaagctcttacatccccagcaaccaccttctcaagcagaagttaaagctgaagttggagcactacaattatttggctgtgtacactacaagaaattccattgaggttgattgtcaaggtgaggcttcaaagacaccgatttcagagaggacgtgttatattgagttgaggccatggccaccaccttatttcctgctaaatgaggtgatcaaggaagtattggagatatgtcatcaagtaaatatgaatgggatttccagctatgtatgggagaatattcaaggactattaatgctggatgatcaagtctttcaaagctcgacacagtggcaatctgctatgtataaggaaatgaactgcttggaattgttgattggattagagctattgcgtggacaaatacattcttgttggagggagatggctcagctgaaaataccatggacacctcctcttaatgcatgtgttgttacattacttgcgcatgctagagagagtttttcatgcaagtgcaagatcaaaggaagttatactatcgtggggttatggaagcatgagttctggcaggtaatcaggtgtcaacagaagagtgcaattcctctcttagctggcaaagtgcataattggtataacctcaagtattcttggtcgcgtggaacttttatagaggttcaggattcagttttcactctctggtctgcagagtataatgagctccaactaacaatacatgcactcaatccatccttttgctccagttcagtagttgtgccaatggtgtggttgtgtagcagattccttgaaatattgatggctttccatgacaaacgacaattcttattggtgaagactatggcattgtttggagatgctgcaatttggacattacaatgtgagtttctctctagtgcagtattgcaatgtctacagcctactgtgaagactagtgactggtatacaaagagttgcacatattcatgggtatcactgaactccaagttaattaatctgaatgaagtgattccagttgacatgttgcagctaccaacttcagatgaggagtttgtaatatggcccagacccattggatggtttgcaacaagtaatcagtttgccaatctcgggttgggctattcttcttatcatctagtcagggtaacaactaagattgtttcactgaagaaatcttggttgtgggaaattgttgaggagcattccaaaccaggaccacaggacaaacattggaaaggcaggataacaagctctgggagtcactgttgcttagtgatcctgatacactatgctccttgcaactaatatgggattctggaggcatcaaaggcatcggcttggggacaagctgaaactaaaggaagggagaatgtcacgttctatgggccgggccgagcactgggctttggtccaggcaaatagggtgcatgcctttaaaagagaaggcaacaacgatagatggggcatcgataaagaaatcaacagaactgaagccaaggcttcttcctcctccaatttcctctcttctctttgttcttccaatcctaggctctgctctcttattcccagtctcatgcttcttttcccaatctacattgctaattctttccaattgtatccaaattacttgagtgattactgctgtgaattattggttgcttccggtgttgggcattgatcggtgggtgggttgaggattgtaacaccgttgccgtcgatgatgaccatccaccggccgttccacgccggcaccgccggaagttgggcgagaagatacactcgctcctctgctgcgtctcaagcgcagcagcatgaactaaccatgaatacttcacttgttttctgtagcttagcaatagcatgctcagacaagctaggcgttaaccctacaatttgaattcagtgtttttgccatgctaatccattcgatttctcaatgaatccttgcaaaaaaaaaaaacctgaatgatgacagggcacaagtgttttttttttgttgttgttcagcctttcaagttcacataggcttggagtttgagctgctgtgttgtaattctaaaagattcaaagatattttcgggaaagtgatttcatccctcgaggggatatcccctcgtttcgtgcatgtaacctaaatagtcataaaaaatatgaaaaaaattggcaacatatattaatatgaaatatatcactccacaaacatacaaatttaaattcaacttctacaagttgtaacaaaaataacaaatatagttacgaatgtgcgatgactattttcagtttaatttgttatttttgttgcaacttgtagaagttgaatttaaatttgcatgtttgtagagtgatatatttcgtattaatctatgttgccaattttttttttcaaatcttttgataacatttagatggcatgcaaacaacaaggaatgtcctctggagagatgaaaatccacatccgatactctctatattagcctttttattttgctaggtcaaggttgcgcaagtgcccacctagatgtactacgtcaaacggtatattcataaaataaacctgctgtgttattggattcaaaaactgcaagccaacgtcatgatttattacgttcaaatatgtaatgtgtaaactttttcccattcacactttgattcatccatcacctcaattcattggtggagtccgggcgacgaaaagtgtttatgagcaattgaattttttttttgcatgtattgcccaaaaaaattagtgaatacactagcgacagagctaagaaggccgcctaactactagaaaaagcattttgcagatgtggggcttttttttcacaggcggacatgaccattggagccaaatgaccacctacaaaaaatataaaccgggctgaaactcgttatcctcctgcgaaaatagaaccacttaactggtccgcctataaaaataccctcttatgtagtctgcctgtgaaaattggcgtggaatataaatagaggcgacatcggccgattttttctaagtaccatttctcctctcatctcccgttcccacttccccctcccctccacctctcctctcctctcccctgccgccgaccggaggcggctactgggtggtggcggcgcactccggcgcggacggtggaaggggcggacgcggggtggccggcagcggctcccctccctccttccctccctcctagatctggccggaggggggagggggaggccggtgaccggcggcggggtgcgtcatgtgcttgtcggccggcggcggctcccctccctccctccaagatctggccgaggagggagggggaaggctggtggccggcggcgcgggggggg

SEQ ID NO: 15370 - DNA, 29670 bp, Oryza sativa
ggggggttgcgtctgtgcggcggcgacggcgaggagggtggaggcggtggcatctcccctccctcctagattcggcggcacggaggacgatcgcggcggcagctactggcggtgacggtgaggagggtggaggcggcggggtttgttttgattttcaaagttaatttgtgatgcgtttgatatgattgtaaactactatgatgtttctatgttaatttgtgatggttttgtgaatttgatttggtttgacggggaatgaaaactggattggatggggaatgggaggagaatgagaagctgctagtaccggccgaaacggtggtgggcggtggctgccctttttttttaatgctggaagctattttcgcaggcgaactagttgcccgccgcaggcgtttttttgcaggcggacaatagtccgcctgcgaaaacctgtttagtccggaaaaaaaaaagctttttctagtggtggtaattgaccagccccggaggtggctccaccgttgccttgattcaacaacgaatttcatttgttcttggttctattatcctccatcagacgtgcatcatcgtatttgtaaattatgacgaaaacgtatcaatggctcaatgccaccaaacaaaactctagatcccatcagcgcgtcccctctcatcgcaattctcttaccccctcttattctctctggctagattttagtactgcgacatcatcaaataactctccctctctccttctgcgccacgacctcgctcggccgtctgtggaccatgttctgtgttcctcaactttcttgcattttcttctcttctcaatcatattcaatgtggaaggtcgtgctaaatggatataaggcactaaaatggacagtgagtgaaaattgatgttatgccccaccagtccctttcaattgggtgtgagagagtttttttttactacaaaacattagtatatgttaaacctaccttgctatatttatggcaccatattttttaacaaaaaatagtcggcatatatttacattgtaagttactaaattacatgtaattttagtatatttacaatgtaagtctcaaaatttataggtgtaattattgtgtaagtgaggtgtaagtgtggtgtaattggtgtgtaagtgtgatgtatgtgaggtgtagatctgtataaaaatacaattagagaaacaaagtcatccattgctcttaaccaacgtgagcttttgcttcagatagcggcagccatgcttggcttgggtaacgagcaagtaaagcacagcgaggagaggaccaactggtgccgaccatctgtgtccaaggttggaaatctcgatcatttcggttacttccgatacgatattacttcagtcgaattttttttaactttttcataaattttggtaatatttattcaaattcaactaaattttgttcaaaattttggaccgaaattttggtatttcgatgaggcccgatcaaatcggcctaaccgataggattaaccctgtctgtgtcagcctcggtcaacagcacgcatctgagcgtcaatttaatgggtctcgtaccacttcggtcgatagcacatatcttaacacaaagatccaacgcaccaaaatttgactgaaatcacgtaaaaaagatgccgacataattttagcaaagctgtatatatatttaaagaaacatagtataaaaataaagctcatatacacgtgcgcacacatgcacaccctatatccctatccctataagaatctccgtatgactattggggtggatcgaatatcccattgtcacgcacgggcaatatggctagtaaaaagaataattaaatcctataaaaaaagaataattaaacaaatcaatttgctcacccccggctctcacacacgtacatgggcctttggttcatccacaacatgtctcatatataccagcgacaggtaggccgcctcggcacaggcaaataccaggaagatcaagaggaaaacccattccaacgatgcagcaggaagcatcatcgaaatacggagcagaaaggagacgagaacgaacgccacggccatcaccattcccctcttctgcaccttggttacggcgagtttacgggcggccggtgccaggatggagaagatggagagagcgaggctcgtgagcaggccgaggcaaatcaatgccaggtttacactataaagtgcgccgccggcgggcaatcgcggcggcggcggtgtcgtcgtcggtgctttgcccgccgccgtgaggttggcgaagagcagaagcgacgccgacgccgcgaagagggacaccgtctgcacgctcttggaaacgcgcttcgcgtcggcgtcggcgtcgtcgtcgtcgcgcgccacctggtgatcaccagctgcggctgcctcgatgtctagcgctttattgccgctggatgtggccgtcgctgctgcgcgtgcctgtggacgagatgcggacgaggatgatgatgcccggcccctgcttcgttcagcttggtctggttcccgaaggagacgaagaagctgatgacgacgcagagcctgcagctagcgtaggttattcgagaggaaattgaaagctagcatagcttggtccggactttttagctgcgtgcctataaacagaggtcggagatgtaacccatttccattatctaaaaaaagagacaattgaaaacgtaagatcggaaaaatgatacacccatatatagaggggtgtgtagccagaatttcttaagcttagagctaaactaatctttatcttacatattctgaggttttaaaatgtaatttgtaatggatatataggctcaggagtcaggagcaggactaccctactcctgtttcctccactgcatatatatcacttatccatgacaataagactggttcttctgtatatatgatgggagtatatatcacatatccatggcagcaaggccggtcctgaacatacggggcctaggcgagataaaattcgaggctctgtatttgaatgtatgtatgcactaataatggttttattctagtggaaaaagtattgcttcatgaaacttgaactgcatatgctaatcatgggaatattatagttccttaattaaaattttctgaggaaaatataacacactagcttagctaaaaggaaaaaagagctgtagatcatgttagtgtatgacattagctaaagacagcattttcgcacgaataattaatagtataagatttggtaggagtaactaaagaacaaaggcacacctggatgctcatggttatgtagaaatcaaaatagtacaaagaagaatatgtacctagaagccaaatcctcaatcttaaataatctgtgagagaagtaacaaatattacaaagaaaaaaaggtgcattaccttgagaaaattagtgcagaggagaattacaagaaacttttggatcgaatctctggggttggtcttaccttggagaattattaaccatgaagataagaaggaattactggtgttgatcgtgcaaaattgacagaacaaaaggcccttcaacggaaacgcgggtggaaaggaagtattgacccatctcccaacatgaacgcttcttaaaaacaaaatatatagaaaaaaaaatggagcttctttgcgacgggagagttaaattattcatatgatctttttctttttgtgtcataaattggataaggggttgcgatcgcatggacgacgtaccatacgccgttgaagtcgtcggagcctcgtagcaagggcgagaggcgcagcaccgccgggacggggttcagcagcgccgaccgcagcgctccggcctccggcgcgccgcgatggattgatgcccgtcgtgttgggcatcttcggcgacgaccctgagatggcgggtgacgatgagctggccatggatcgagtcatcgaaacgcgcagcaggtgtgtgcgggtctagggaagggatgctttggcctttttatagaagcagtactctgctctctctgtgttccttctgaagtccgcgcgccgtttcgtctctttctgaggtactccgggactgctcatattgcagtcaaaataaatcttaccaattttagtaagatggtactattgttaaaattttaacaggatttcttatgtatttattaaatttggcaacaaagtaaacgcagacatttttttgaaaactttaaaaaaatggtatggttgaaaatgacatcaatctgaacagcccctccctccgtttcgtctgattttttttatcaaatattttgaagtttgattaagcttatagtaaaatatagtaacatttttaacacaaaataaatattgtatcaaaaatatattcaatgttaaattgtagtaaaatacagtagcatttttaatataaaataaatattacatccctaaaaatatattcaatgttaaatttaatgatactaattaaatatcatagatgttactattttttctataaacttaatcaaatctaaaatttttaactaattaaaaaaatctgacaacttctaatataaaacggatatagtatttataaggaaaaaagaatgctaagagacacgtagacacagctgggtcccaaaaaaccgatgtacacactgcaatcacactcagaaaaatcgatgcacatcttacatcgatttatggatatcatatatgagagcagctccagtgtcaacccaaaatcgatttcggtcagcaccaaaaaccgaaccgtgcacattgtggggggcgaccagggtttgttttaccgccaaccgcacggttaccgtggttaccgggcttaccgcggggtacggtaatataaatgccacggtaacctccttaaatttaaataaattgaaaaaataatttaaatttttgataaattttatacggtttttcacggttaccgcggttatcacgtggtaaccctggctctggcagtttgggaaacttgtgggcgactggttcgtgtcagatgaaaaatcgagttcaaacgagaggtcgaacacagaccataaaaaaatatttgttgctaccggatgtgagagcgagaggaaaggtgagatcgagtttattttttctgtgggtcccagaaacatcaaactgtgagacataataatcgaatcataccactgcagccaccgaaccctgttgtctgacaaccaggagccaactcaggtcgagttagttctaaaatttttcttccaacttttaacttttctatcacatcacaacttttctatacacataaacttttagctttttcatcgcatcgttctaattttaaccaaatttttaattttgatgtaaactaaacatatctcggttcgaaccaatcaaataaaaatatacttcctccgtcccagaatatagcaacttatgatgggtctcccatatggaatactaccatatggaataaataagtattatctatctctaattatctctcttttcctaatattacattgtatctttatacattatagcacatgtatgtaggtctaatctatatggtttactttgggggggcctaatgggcgatcgatcgccaggggatcgcccaagcgatcagatccgccccctcccctatactactcgatacactcctccctcctctccccccttcgtcctccccttcttctctttctactacagtacaccacataaaaaaattttaaaaaacaaaaagttaaaaaaatttatgtatagaaatactatatataaaaaatttgaattcaaattcaaatttgaatcgggtatgtaaacttttgacttataaactttgggtctatagactttaggtgtataaactttagatgtatagaaatactatatatagaaaatatttgaattcaaattcaaatttgaatcggatataattcaaattcaaatttgaatcgggtatgtaaacttttgacttataaactttgggtctataaactttaggtgtataaactatagatgcgtaaaaatactatatatagaaaatatttgaattcaaattcaaatttgagtcagatataatttaaattcaaatatgaatcgggtatgtaaacttttgacttataaactttgtgtttataaactttaggtctataaactttagatgtatagaaatactatatataaaaaaatatttgaatcggatatataaacttttgacttataaactttgggtctctaaactttaaatgtgtaaacttgaagtgtataaactttagatgtgtaaacttgaggtgtataaactttaggtatataaatttactaaaataggaaagtaatacggtgccaaaaaaggaaaccaggtggatggagagagggggattgattgctacccctgtccccaggcgatcgatcgccgattaacacttccggtttacttttactatatatatattggtgatgctctacttcttacatcctactaaatataagagattttgaacggataagatgctctgtttagattcgtagtagtagaaggtatcttatctgttcaaaataacttatattttaggacggagaaaataaatgtatcagcatgcaagggaacccctataaccctctaggggcatccacaatgtggtgaaaaattcagccagctagttctattgtgcacctagtccatatgaaaaaaaatatacacataaactacctatatgaaataaataatattatctatctctacttctcttttcttctagtgttatcttgtagtatctatatacattgtagaaattgctattgttaaagtttatatatatgcgatctcatctatataagatcattttttgcattaacgatgtccttaccgtccgattgctccatcaaaatacctctcatctgggtgagggtggtcgtgtgtcagataatgcgatttgaatattcgagcacacagcgtaaactattcgagctctactgcctctataaatttttatcagcatgagggacggagccacagatcatccgaacttaccgaagaaaactctattaaatttttatgttgttgaattaattgatgataaattttttttagtaaatactaattatagtgaagtttgcacatattcaaatatccactgtctacacagtacgtactaggcataacgaaattaatcggcctcgttgccaacccaaccgatggaacatggaagtacacggtttgctacgcgctcttgcttttttttttattcttttggttgcagagcccgtccgtctttccccatctctgtttggttcggtacttcggttgctaaagtggatgcgcggcacgccggcacacgacacattgcttcgcgtcgcgtgcaactgcacacgagggaccgcgttaaactcactggccattgttgaccaagggtgagtttgagaggaggggaaaagagaagattgggaagatacgtaaaacgaggtgagccattaacatatgattaattgagtataaactattttaaattttaaaaatggattaatatgattttttaaagcaattttcgtatataaattttttgcaaaaaacacaccgtttagtagttagggaagcgtgcgtgcggaaaacgaaacaatctaactcacaaactcctcctgccgaacgctccccaaatgttcatcaggtttcatttaggttaataaaatatatctacacatatcataatttttaggattagaaaccagtattaagaaagtaggtataattaaataggataatgttatgattggttgaaaagtgaagacatgtgagaaaatgaatggtacatggtcataattgtagagaagagaacgttggtgaaaaagctattatattttaagacaaatcttatgagctagaagttgttatattttggagttgttatattttggaacggagagagtatataagtaaaaactagcatggtgaccgacgcaatttacgcggctagcatctttatatttttttcctcacatattagcatatatattttcactttttaattttgaattttagttctttctaagtggtatttttatatagattcgaacctctactcgtagtttccttattatttaattgcgaatttcaattagctctaaattctatacttttatggacatctactatttcaatattctttattttttaaatttgtaatttaaattatttttaaattatatttctatatggactttattttctttttttctatgaatatgagaatttctatgacgagagaaagagagtgaatgtggaagttttttttctgttactttaataagttgatagattagaatcgtgcatattaacatcattgttggcggatggcatgaggcccttcgactaaatctgccgaaacccgtggcgaaggctatggagtaagaacggcgtgaggcgaagagtcgtacgagtgccttgccaggccagaggcgtttcaggcgaagggtgcaaggcgaagactacctgccgaaggaagacgacttcgccatggcaagttcgcccccgcgagggccgaggaagcctttccggcccatcaagcctaagggctatagggccggcgatcgctagacgacccatcaggggcccatgagcccctgtaacattatgtacccctataaatgtccctttcgtaagggtaatcatgtaaattcccctgtacaacctaaaccctagtagcaagaacctgtaatagggctataaatagtcccctagggccatgtaatggggggatccccaagtgaaattcgaaatttaatacacttagtttttccaaccactgttgagtaaccacgtctttcgatgtatgcggttgtcgtttcgacaacagctggcgccgaccgtggggacctccgagcgaaaccactaagagcgaatgccaccgaagagggtcgtgaaggagaaggttaccaggcggaaggaaagcgacgccggaccggacatggccgccgaggaaggagcagagccttcggcgcccgtggctgaagatggaggaggacaagcgccatcacaaccgccttcggcccctgcaacctctatgcaagtgccgaacgcggtcgacgtggtgaaggcggctgcggcggcaagggcactccagaccagggcggagatcctttcgacaagccaaccggtggtgccccaagccactccatcgcagccggcagtggccccaattgcgctcgccgttgtgcaggcccaagtcagccctgaccccgaagcacaagccgaagccgacatggaagccatgcgacagaacatgacacggctccaagacatgcttcgccaaatgcaaaaacaacaacaagcatacgaggcggcaagacggaccaaggccacgtcggctccaatccttcagtattcggcaggttatgtcccacctcaagtccatccgcaagtgacgacccagccctttccgccacaagccgctcaagcgccggtgtacttcgccgggcagcaaccggccgtagctgtgcatctggcccctcacgtgcaactgcaagctcaactagtcgctgcccaagtacaccatcaaccacctggccaagcgccacaaacagtggtggaaggggcttcggctctgcaggcgcaactccaagctttccttcagcgactcaaccaaccccactgcatttcaactacaaccccatcggcccacccggaggggaatacaagtcaaggtacgcctaattggttgccactgattcagccgggcctgggagtttcgccgtggaatcaaggaccgcagttcgacttcgtcaacgctgctcaagcgccaaccgttcggcagcaagctccgactccaggcttcggaacaaaccaagcaccaatccaagctgccatgacgtggtcacagccgatttttgacccatccatggcggctcaacaagtacctccagttggtgccgggcagccgaatgccatggcccaacctcacgcacaagctacgatttcgcccttcgccacaccgtacccgcagcaaggtgcggtaaacagggcgggaggcgaaaaggggctaccgctgagtgggggaatcaagactcgtccaatcccaccccagttcaagtttccacccgtaccgcgctattcgggcgaaaccgacccgaaggagttcctctccatctatgagtcagcgatcgaagcggctcatggtgacgaaaataccaaggcaacggtaatacatctcgctctagacggcatcgcccgttcttggtatttcaatttaccagccaatagcatttactcatgggagcaattgcgcgatgtttttgtccttaactttcgaggcacctatgaggagccgaagacgcagcaacacctcctcgtcattcgccaaaggccgggggagtcgataagggagtacatgcgtcgcttctcgcaagcccggtgccaagttcaagacataaccgaggcgtcggttataaacgccgcatcggccggtctgctcgagggcaaactcacaagaaaaatcgccaacaaggagccacagacgctcgagcacctacttcgcatcattgacgggttcgcaaggggcgaggaggattccaagcgacgacaagctatacaagctgagtacgacaaagcctccctcgtcgctgctcaagctaaagcacaagttcaagttgccaaaccacctcccctctctgttcgccagtctcagccggcgatcaaaggatagccgccaaggcaaggccaggcccccataacttggagaaagttcagaacagaccgtgcgggcaaagctgtgatggtggtcgaagaagtgcaagccctccgcaaggagttcgatgcccagcaagcgagcaaccatcagcagccagctcgcaagaaggtccgaaaagacctctactgcgcctttcacggacgctcttcgcacaccacggagcaatgctgaaacattaggcaatgtggcaacgcgcaagacccaaggccgcagcagggaacaactgtcgaagcaccctgcgaagcagttcatgagcaaacacccccagccgaacaacgccaagatgtacagcaaagggtaatccaagtgattacaagagctgacccgccaagccagttgtccaaacggcagaagaagatgcagacccgtatggtccacagcatcacttcggcgggtgaaggggcgccgcagtatctgaaccaactaatttcttttgggccggaagacgcagaaggagttatgttcctgcatcaagatcccctggtaatctcagctgagatagctggtttcgaagtccgatgaattctggtcaacggagggagttcggccaatgttatcttcgccgaagcatacgccaagatagggttgcctacccaagcccttaccccagcaccagcatcgctccgcggtttcggcggcgaagcagttcaagttctcggccaagcacttttgctgatagcctttggcttgagggagaacagacgcgaagagcaaatactgttcgacgtcgtcgacatcccgtataactacaacgccatcttcggccgtgcaaccctgaacaagttcgaagccatttcccaccacaattatctcaagctcaagatgcccggcccgacaggggtgatagtagtcaaggggcttcagccttcggccgcttcaaaaggcgatctagccataatcaacagagcagtgcacagtgttgagaccgaactgcatgaacggccgaagcacacgccaaagcccacccctcacggcaagataccaaaatgcagattgatgatgccgaccccacgaagctcgtatcactggggggcgacatgggcgaagaggaagttgagagtatcctagaggtgctcaaaaagaacatcgatatcttcgcctggagccctgacgaggtggggggtgtcccggcggatctcatgatgcatcacctagcagtcaacccggacattaagctaagaaaacaaaagttgcgcaagatgtctgccgatcgccaagaagcggcgaaagccgaagtacaaaaattgctcagggcgggggttatctaagagattgaccatctggagtggttggtgaatctagtgctggtgcggaagtcgaacgacaaatggcgcatgtgtgtcgatttcacagacctgaacaaagcgtgtccaaaagacgacttccccttgccgcgaatcgaccagctcgtggattcaacagctggatgcgagctcatgagtttcctggatgcatattccggttaccaccagatccacatgaacccgctcgacatccccaaaacatccttcatcactccattcggcacattttgtcacctcaggatgcctttcggcttaaggaacgcaggagcaactttcgccaggctggtgtacaaggtccttggcaagaagttggggcggaatgtggaagcttacgtcgacgacatcgtcgtaaaaagccgcaaggctttcgaccatgcgatcgacctacataagacattcgacagcttgcgcgcggcaggcataaagctgaatccggagaagtgcgttttcggcgtccgcgcaggcaagttgttgggtttccttgtttccgaaagaggcatcgaagcgaatcccgagaaaatcgatgccatccagcaaatgaagcctccgtcaagcgtacatgaagtacaaaagcttgcaggccgaattgcggcactcagtcgattcctctcaaaggcggccgaaagaggtttgcccttcttcaagaccctccggggcgcgggaaagtttaattggacaccagagtgccaagcagcattcgacgagctaaagcaatacttgcaaagcccgccagttctgataagcccacccccaggaagcgaactgctattatacttagcagcttcgccggtggcggtcagtgctgcactcgtccaagaaacagagttcggacagaaaccggtctacttcgtctccgaagcactgcaaggagcgaagacaagatacactgaaatggaaaagctcgcttacgccctagtgatggcttcgcgcaagcttaagcactacttccaggcccacaaagtcatagtgccatcacagtaccccttgggcgaaatactctgaggcaaggaggtcactggccggctcagcaagtgggcggcagagctatccccgttcgacttacattttgttgcacgctctgccatcaagtctcaagtgctagccgacttcgtagccgaatggacaccggtacttgcccccgaccccgagcccgccgaacaattctgggtgatgtgctctgacggctcgtggtcgcacaagggagcaggcattgcggcagttctattttcgccgaatggtgtgccgatttggtacgcagcaagactgcagttcgacacaaccaacaacgcagcagaatacgaagccattctcctgggcctaagaaaggcgaaagcactgggagtccggcgcctgctaattcgaactgactccaagttggtagcaggccatgttgacaaatccttcgaggcaaaagaagagggaatgaagaggtatctggaggctgttcggtccatggaaaaatgcttcaccggcataacggttgaacacttgcctagagaccagaacgaggaagtagacgccttggcgaaatccgctgcttgtggtggcccacattcgcctggcatctttttcgaagtcctacatgctccaagtgtgccgatggacagctccgaagtcatggcaatcgaccaggagaaactgggcaaagacccatatgactggcgaaccccatttgtgaaacaccttgaaactggctggcttccggtagacgaagcagaagcgaagcgtttacaactcagagccacgaagtataagatggtctcgggtcagctttaccgctccggggtacttcaacctttacttccttgcatctcttttgccgaaggcgaagaaatggcaaaagagatacaccaggggctatgtggcacgcaccaggctgcaagaacagtggcctccaaagtatttacacaaggagtttattggcccactgtgttgaaagtctgtgttgagcaagtaaagaagtgcgaaagttgccagcgtcatggctgaagccaagccgcgccccagtatgatctgtagcccattgcgccaatatggcccttcgccagatggggactggacatcatcgggccgttcccggtggcgcgaaacgggtataaattcgcaattgtagctgtggaatctttctctcgatggattgaagccgaaccccttggggcaatcacttcggcagcagtacagaagtttgtatggaaaaacatcgtttgtcgtttcgaagtaccaaaagagttcattaccgacaacggcaagcagtttgactctgataagttcagagaaatgtgcgaagggcttaacctggaaatcaggttcgcgtcggtcgcacacccgcagtagaatggggcggccgaacgtacaaatggcaagatcctagaagcactaaagaaaagactcgagggggcagcgaaaggcaaatggccagaggaattgctatcggttctctgggccctttggacgacccccacaagacctaccaagtttagtccgtttatgcttctttatggcgatgaggcaatgacccccagcagagctaggggctaactcaccaagggtgatgttctctgggggcgaagagggacgtgaagtatcgctcgaactcttggaaggagtaagagtcgaagtgcttgagcacatgcacaagtacgccacaagcacttcggcaacttacaacaaaaaagttcgacccacggagctgatgcccggtcatctcgtcctaaggaagaaggcgaacccagtagcggttggcaagcttgaatcaaagtgggaaggaccatacctcatcaaacacaagtccaggacgggatcttttcgcctagcgacactcgaaggcgaggagttcgaccattcctggaacgccgcctctctcaagcgcttctatgtctagaatgggtgtcacccaaatcgccaaattgtaaaaatgtacatactgtcatgtaagcccttcggcactatgtaagcccttcggcactatgaaagcctttcggcaagaaaaaaaaagaaaaaaagaagaagaaagagagaaaaaagaaaaaagaaaactggatgtagggctattatccaacatggaggcccgaaccagtataaaatctctgtgtcctccgccttctttttatttttcgtgtgattgataatttgtggaaaaacctcaaggcaaacgcctgatcagcgaaaaaggccaggggggcgaaacgaatcggccaaagcattgctcgccgaacgttgaaaccgcaacagcttgtctcggaaaataaatagccgaacgacgttacgtccaatcagcataaaagctacagatcaaaaacgaacgacgaaaagctgaaaagtcagtacacctatttcgctaatatatgcaaaggggccggcatgttccgacctaacaaaagcacaaaaagtgacgatgcaaacaatagcgaaaaggaaataaaacacgtctttattaacttcgaaaaaaaataatcgaagaatagaagtttcacaacacgatacaattcaagtaaattacatcttcatccccataatcactatccctccctaaggaatgataaggcgaactaggttcgtcatcactactaatattgtacacaaccttaagaggagtagggggcgaaacacagactaaactgtaacgacgctgaaagatcgtttcctgacgtttagtcttctgatggtttcgccaaaagcgagccatatcctccaaacgtcttgaatgaacaaggtcgtaatcttctaaggttcgcccggggtgcgcccgcagccagtcggcaaccttgaaaaccttatagctgcgaccgtttatctccatttcgcaataaataggccgaaatggacatcgcaccttcggcaggtccttcaatgccacaaatttctcgttttgacttcgccagctcccggaagggggccgaatgcacaactttcggcgaaccccctgatagacagcgcagaaaaagcaaaacacagcttacatagtaagaataggcggaagaagggggaggtatggcataatgcgagatgagcgaaaaaaataatatgccaaagacctcgatcatcaaaaagcaattaagattgtgtcatatattccaaatgtacaaaaaaaccttttttaaggttcagcggcagcctgctgaatgtacatcattcgcctctccaggcaaacgcaaaagagggaggaaaactacaaaaatccaaggaaagggcggagggcctcacacctctgggtgatcctgggcatcgcctccagcctcttcgcctgccgcgccctctccttcgccccgatctgccgcctccgccttcgtcagttgctccagaaggcgcgctttggcagcggaccggccatccttctgccagaactgttttcgccacgcgcgaagagcgggcgaaatgttctgcgcactaatctcccagtcccccttcgcataggtagggaactcggcgacgtgctcgcagccgaactgttgcaaaaggcctaaggtaaaggccgccgatacgcgcgcacagcaattgccgtacgtggtggcacagtccgaaaccgatccgccagcctgctgggtccactcagagaagtcgaaggctgaggcatactcggcagggaccccccgcaccttcgcgcccatgtcggtaagggcgaggcggagcgtttggcaagccgttctcgtggattcggcggtgttcgccatctcccgtgaaaaccgctgcgactcctccgcggcgctcgcttcgaccctgctagccttctggcgaagagcctccatcttcggctcagtaaggttgtagtaatcgatgagcaccgccgaatggtccttctccttctccagttcggccttgaggcgatcaacctcggcccaggcctctttccccttgtccaattcggaatgaggcgtttgacttcagttttcgcctccttgagggtatgggccagggactccacctccaggttcttacggcttatttcatcatccttggctcgaagacggctcttaaaaccgtcaaaacgggcccgcacggttcgctctgtcgaacagtgagccgcaagaatctagatgaaagataggagcgggcgaaaagaacaaaaggttaattgcgagacgtaaaaaaaaagagagggaagaggaaaacgaagaaagaagaaaaggcatacccgaaccgccaaacttttaatggtggaacacccctcgtcgaactcgttaagttcggtgaacaggctcggggtgccgacgggcaagacaagattgcttactccctccacaaagagaataaggtctgcccgggtctcgaagtcaccaggggcgaagtggggcgccgcaagggaatactccgaggcagatgcttcgacggccgtacacttccctttcgccttgaccagcggcgaaatggctggctcgcgcacagggctcccgaaaaccctcgccacagccgacacgatccgttcggcggaggtggcagcttcggcggcggcgctaccgcctgccccagcaacgccgagcagagcaaggggagcagtcgaaaggtccaaactgcggccagcaggtgaagtcggagtctcgacagaagactcgtcgtcgctgaaaacgcgagcgatgtcgacgagtcccttcttctttgagatcttcttgaccagacctcctttcgccgccttgcccgacgagaacgcaactagggccttcgccccttccaaatcctttcggcgaaggggagagctgttcgactccaccccggtctcgttgtgacctggacttggggtaggagtgtagccgggggtgttgacgcggtcttctatcgccttgttcgcggccttatcagccacagcctccacctcctcttcttcctctccttcctcctcccgtcacgttcttcggcatcatcctcgtcgtcggcgtcggagtccgacgaagcaggaacccttcgcttcctgggggcaagcttcacttgtccacgcatccgctttcgcgaaggccctacatcgtcgtcggctttttggggattcgcccggggaggcagttcgccgttgtaaacccggttcgcccgcccagctgcttgtcgtgttagcagctggctatactcgacgaccgaaacgtcgccgatcatcctgcgggctttggcttcagcctggtcgagggtcgacactgcaaaagtaaagggtgtagctgcgttaaaggtcagacaaggcaaaataacaaagcacaggagtgtatagcaaaagaacggtcttactgttcgtcccctcaggaagaaccaagttcggcaaaccgttagcctcttcgcattgctcgaccgtgacttgccatgactgggagaggggaaagatgcgaagcatacagaactcctccaccaagtcacggcagctaaggcgggagcaaaccttgcgcagcaggacgaaccgcgcctccatagccccgtccacggcgatcttgggtttccggttcggcgcaatcgccctacgccggcaccgaagagcttttgccgagtcagaaccagccgcgaaggggatggtgtgatagaaccacctcgccatccaatggcggtcccacttcgacatggcagcgttcaccggccagagatcagaccgctcggggcgaacgttaaagttcatgctcccgaacactgtcttcttcgttccagccggggtaatcaccgtcttcgagttcatgatggcgaaaaatatggcgtcgaagagctcggcgctggactcaaacccggaagtccggcacgcccagtcaaagatggagatccgaactagcgccgatgggctcaactgcggaagctccacctggaaaaggcgaaggatctccggcaacaacacgttgcacggaaactgtagccccgcctcaaaaaagacggcgaacaccaccgtccgattgtcgacaagcttcggcaccacggctttccccggggcgaaagcctgcccctcaaccaacgccccagagctgaccaacttcgccagttcgacgtcgtccacgagagaaacccccaaaaaggcggtgctgtcatcatcgacccggccgggatccggtccttttgccgaagctgggtttggcttgcgaggggccatggcaaacggcgtgtatgcagtggcgaaggaagataatgggtgaaacacctgaggggtcaagaaatgctgtggaagaggggaacagaagaagagagcgcacgcagtaaaaatggcaagtgtaccagtgaaaagaaaagaggggtgggaatatatagctcacccgagcgaccgttcgcctacccaccagtaataaagcgccacgtgtcgcaaggataggcgaaacggtaaattcccaccgtctgagcagcacagtaaaaagcccacgatgggaaggcccaatactgtttcgttcggcccgagaaaagaaaatatatataaccaccaatcgcaggaggcgaagcgcggcaaaataataccagccgcacaagtaacaaacttcattcgtaggaataatgtaggtttcggcaggagcatcggtcgaaagggggcgccgcataccataccacatggtttgcacggtctcggccgaagctccaatctcacccttgcccgtgaggggcttgttggcggatggcatgaggcccttcgactaaatctgccgaaacccgtggcgaaggctatggagcaagaacggcgtgaggcgaagagtcgtacgagtgccttgccaggccagaggcgtctcaggcgaagggtgcaaggcgaagactacctgccgaaggaagacgacttcgccatggcaagttcgcccccgcgagggccgaggaagcctttccggcccatcaagcctaagggctatagggccggcgatcgccagatggcccatcaggggcccatgagcccctataacattatgtacccctgtaaatgtccctttcgtaagggtaatcatgtaaattcccctgtacaacctaaaccctagtagcaagaacctgtaatggggctataaatagtcccctagggccatgtaatggggggatccccaagtgaaattcgaaatttaatacacttattgagtaaccacgtctttcgacgtatgcggttgtcgtttcgacaacaatcatgatcacgaatggcccttcttaacaaagaagttctttaattaaattagtaaactcgtggagtatggactaaaaagttgggcagcaaaacatgggagtgtgttgtagttcaagcttagtgttgtagttcaagctgagctaggcgcctaggtgaggtccgtgcaattctctacattgcatatcttgcagtcgcgacatgcgaagcatgatatttctttcaaataagtgtcactgagagggatgaaaatccacattcctttaaaaaaggaaagtgatttcatccctcaatgggatatccactcgtttcgtgcatgtctcctaaatatttataaaaaaataaaaaaaattgacaacatagattaatataaaatatatcactacacaaacatagaagaccaaattcaacttctacaagttacaacaaaaagaataaattaagctgaaaatagttatcgtacattcacaactatatttgttatttttgttataacttgtagaatttgaatgtaaacttgtaagtttgtggagtgatatattttatattaatctatgttgtcaattttttaaaaaaaatttaataactatttagatgacatgcaaacaaccagggaatgtccctttgagagatgaaaatccacatatccctctcagaagtatacattatttgttgcgaaatctatatctatatacctaataaaaaatacttaaggttttcgttgtattttttccttcggtgtttggttctgattcctatttcgtcgctgatccgggcaatacaaaattgggacacacgtgaccaaaaaaaaaaaaaggaaagctagctagcaactagctaaagcagcagtaggccagcccagcaaaaagcactcggagcccagcagcaagccaacatagcccctgtttggagaactagtctagagttattttaagagttattttttagcacaagaaaatagtcctccaataaaatagccctaagttgtttggatccaagggctattttgaaagctatttggcttttaatgtaccttctcatggagagagatagagataaaagacactttttcagtgggccgcacctgaaatagccccaattagcaccctttgggtgggatagttttttttgggtgggctatttccaaatagccttcaaatagctcacccttttggatctttttgagctattttgactatttgagggagggctaaaaaatatcctttggatccaaacaggaccatagcagaggagcagtagcccaacacagtactgcacgacactgtagcaacttaggaattttttacattcttttattaaaatatttaaaaaataattttttttcaaaattttacaaatctaaatgcctctcgctctttgggagggcgtttttaaaaatcgcccttccaaagggcattaagggacctaaatgcaatttttttatttgagttcaaacccttcctttttagtgttttaattgcttaaaaagttttttttgacggcaggcaaataaacttaaaaactaattaataatgcttattcgacactctagataatgttaaatagaaaattaataaactctaaaattgtagatctcattgagatctataacttttatataaagttctagaataccctatatagtttgctatatattggaacggatggagcattttacgtgtgttcttttggagtattttgcctccttaagtaaaacaaagagacggattaatatatgattaattaaataatagcttaaaaattaaaaaaataattaatatgattttttacagtaacattttataaaatatttttaaaaaacgcattgttgtgtagtttggaaaacgtgcgtgacaagaggaagtgaattgggaactatgagttaaaaaagaacacagccgaattcatcgtcttcctctcgatcggctggcgagcgaacggacgtgtgaggcggcagcatgatgctgacgatgaccttcgtagccccgataatcgccgccgccgcagccgccacgcctgtgccatcggccaatcgtcgccgtcgtctaagccgccgccgccaccaacgccaccgccgtggcgccacccgtcgggtcagagatgaacaaggaggaggagggcaacgtacgtcggtgaccattcaccggccgtcccacgccgccgccggatgttgggcgagaagataccgctcactcctggagaaaaccagtaaaacaaaattttcatctcccacgtcctgttctaccgggcacactcgtcctgcgtcttcttcatgtgtctcgtcttctgaaccatcttcttccgccgacgatgtgccctcccggccggactgggcccaacgcacctctcttcccgacggggccttccattgtttcgccctacatccaaggagaaaatggtcgatgaaaaaccatagaaactattggcgaacccataaaacaattcatcctttcttccattgttctagatctactagttcttctcggctgcaactgcaatgtgggtgtggatggaacgaaggaagccgaatctcttacctggggtggggtgggcagcgccgtcgcggagcgccgggatacgtcgttctccaccggcggcaacccgtcggcgcttcttgttcggtttggcacggccgcggaacgtccggtggaatggggaaagtggaagtgaaaggggtagggaccgtcgggagcacaaccttgctggcttggtggagtgggctccacgcgtggggccaggccagtgtatttctcgtatgcgctggggaaagtatggaatacagcagatattcgctgatatacctcgtccgtatagagtgtacgcacgaatcttggagccatctaatggcggtgagcctaggtgcagctgcacctaggttcagaaaagactttcccgctcactcctttcttgtctcaagcgcggcagcatgaatattgaatgcttcacttagttttgtgtagctaccagcatactcagacaagggcattcatgcatgcatgcagagcaagatggtcttatagcaaaatggatatatatattatgcactgcatgttatatactgcaaattaatctgatcattatgtaataatcattttctgcgagggcgctaaccctacaaattcagtgtgtttgccatactaatccattcagttctgaatgaatggatccttgcaaataataaaaagaaaatcctgaataatgacagggcacaagtgttcttttgttgtaattcagcctttgaagttcacatatgactgggggaagcatcagtgatgtggtggtgaatttgtggatgcatgactccaccaaccagggtacaaatcctgatgcccacgaatattacacatatgtagatgggctttcaataggattttagtgaaatcagggatgtgcgctggttttcgtctcttagagcatgtgtgaggggacgtattcgcgggggtgtgagtgtggtgttgcgtgtatagtggagtgtgtgtgcatctgctgtgtaatctcaaaaagaaaaaaaaaagttcacatatgactggagtttgagctgccgtgttgtaattctaagagattcagagctactatagttattagtattactctctattccgcataatgggtcagaataattttcatttcacaggtttcgcaaaataaacctccagtgttattggattcaagaactgccactattgcagtgtgtggcataaattagatgacccttcaaaattgcattaaaacagattaagacaacattttttcttaagaaagcctccaatccgatccaatcatgaaatttcatacacagtttatcatgcttgtgagggtagcagcgcgatcacgggtctccgatgtaggggatgtgccgaacaatccaccgatcgattccctctaacctcctgtggaactcttcaggcatcaatgatccaatgcacagctgctggagtgacctaagatgcacaaagccctgtggcacagatgttaagcttttcaagctccaaagctcaagtctccacaagcttctcatggcgccatcctcaacctcaacctccctgagctcattcatggagctcaggtacaggtgtttcaggttagggaaccatccagcgcgaaatgtcagtttcgccccgtcgaagcaccggtaaaggttaagatggcctagattctggaacatggcagcaaaagaagcgagcggatcttcatgaagaccagagaagcagaggctcaagcttctcagtttggtgaagctggcaaaaacgggaggaattgctcctttgtgtagcctgccacttatcatcagcttctccaggtgagataaaggttttaagttgccgagatcaagggcgtatcgatcacgatcttctgcgagaacagacaatgaattcagagatgtcatcttgctgattgaggtccatagatcagtgttgtgggactccagcaccttcatgataccgacacttctcatccttgtcaagcatccaaggtttttcactatgtagctattggcttctatgcttctcagagtctgtagatgttccaggcaacttattttgctactcgctgacttcccaaaccgcccgacatctataagtagatggtgaagcttagttaacattgtggtctcactgggtaactccagcacagaaccattgagataaagcgtttgcagattgctaagcttccctatcgaactcggtatctctttcagttttgtgtatcccaagtctaggtagtgcaagttaaacagctgagaaacagaatctggtaccttgtgaacattgcaatttctcaggcacaagacccttagcaatctaaagctttggtagcaatctgtgaaccaagacaacgatatttcctctgtaaacatgagcatggaccgaagctgagatgaacattttgctgcttggactaaattgccatccttttgtaaagaaacacgccgtgatccatcggtaactccatctgagttaggacagtcccatgtagtagcaaatttttccttcttagatatggttagggatatttccctaacaagatcatgcatctggaatctctttggccttccatattcattcctattcacaacctgaagcaatgatcgactagcaagttccttcaggtaacatgcagctacatctgtcaatgttgtctcaggtcctctatcctgaacaaatccttcggctatccacaatctgattaaccgttttctctcaattcgataatcttcagggaacaggccgcagtaaagaaagcaattctttagataactagggagatcattgtaactgagattcagaacactagcgacccagctcagctctggattgttactgagctgccacctaagttgattatagaacaactcccactcatgctcatccatttctttgtacgataaaaggctccctatagctacaagagccagtggcaaaccttggcatttctccacgattctttcagcgacggtcttcagattatgggggcaacttctgtcatctaatcttgagaaagccttttgacagaaaagagtccaggcttcctgctttggtagaagtgtaagcttcagttcatagtttgcatctgctagagatgctaccgtttcgattcgagttgtgataactactcggctgccattgttgttcttaacaaatgcattatctagtaaaggccaggcctccctactccatacatcatccagaacaattaagtatctcctcccttttagatatctttgaagttgttccacaagactcacacaatccatggtatcagccccatccataatattttcagttttgctcatgagttggactaagatctttttcaggagatttttaacaccgtgattttgtgagacagtgatccatgcacggcaaataaatgttcttttaatttcttccttcttgtaaatgctactagcaagagttgtcttgcccaaccctcccattccacatatggagattacactgcgatctttttttgcatcacataaccattctattaatcgcttcatctcttctgcattaccaactaaatcatcatcatcattcaagtatgaatattcagataaatgatggtgcctacttggataactcgctgtattctctcttccactgcttgcaaatgagatatcaaatctatttttcgcttcagaaatcttttgtagacgatcctctactagttttgcctgagctgaaagcttgcgccatttcttaacttcgattgcttggttgaatgctttctttaggaaactgccagtcccttccgtttggccaacaagataagtgtattcatcgacaatgtcctcagcttcatgcgctgctagccttacctgttccatccaggcctcaagtaccatatcattggacctgtccacagccacttgagctatgaatgcttgcaacattgagaagtcgctttgaagtagtctcattttattggttacttcaagaaggtcaggtgcttgcttcttcaacttagaagcaagtatcttcgatccttcttctgcaagtgccgatgaaatcttttgaacaactgctatgaccaaagcttctaccatgttcaaattttagctttaaacctataactggaagtctggaaccttggctatccttttgcgggtttaatcctgcaaccagagaaaaccaatttacatgagtaaatgttgagaataggaggcattccatagctggacattgtggattatggaaaagccagcacccttatggacttatgcttgcttgaacaagtattccttacctaagattggaccctgagaaaacacaactaatactaggttggcttttttttcttaagactaatattagattgacataacctagatagtgaaacactgccattaactcatcacataaacacaactgacatcgacaccgaacgagatagtctcagcaggtgtatcatccacaacactgatcatcaccgcaatactccgatctccactgaaatgcatgtgaagcaccaacaaaggactcttcatgtagcctagtggttgcagtgacctgaatagcacctcaaggtcctgagttcaaatctctataggagtgaatttcagattgggttatttgagggctagttccttgttcgataggctaagttcctattagaaaaaaggctgcatatatccggttggatatagaggccgggtaaaaaatactcttctctaaaaaaaaaaaaggactcttccaatttgtgtttcagcatcaataacaactccacaggaataaaaattactcatctacaggtgattctttaagccccagcatgccataaattgcatagaaacaagaatcaacatcgccaagccgatacaactctccctgcaacaggaggatctccagtgagatccctgaatcaaacccttcactcactaggatccaccaagtggaagccaagaaattaaaacccaaacaatcttttctctaccagccactcactaccaattatcccactaataacaggcaatccgcaagatctgatctggttcttgagatcatctcgaggacaagtacggccacaaaatttgacaaccgttcaacagatgcaaccaaggagaggtggggaaccaaccaacaaaatctctatacctgacgctgcagcttccgttgcctgtacgtgctaccggcggcggcggcggcgacggcggacctcgccggagccatccacgcgaagggcgggggattgagtagacgacactacagcagtgtggctgcactgcagctgtcatctctgacttgcagaaaagtaatcgcgaaatgtcggcttaattgaatttccggacataatttgggtcaacctaacagttaacacagatcgaatttttttcgtttttagatttttttttaatatttacataaataatctatcggccaaaaaaaatcgcaaaaatagaccgtgctgccccaatggtgggcggcaagctgacgtggcagacggtgggtcgaccgcgccgtctgccgccatcggccaaaattgcgattaggcccttgccgcccatacagaggccggcaaggggctaattacaattttggccgcccataaagagcttgcggccgtactttttgcatctgggtcccttgccgccccagtaaaaagtacggccaaaagatttttctatgttatgttaataataaataaagaagtatttattggtaaaacttgttaatattgttataaaaatgtattgaagttggttgttgcgcaatttcatatgttaagtgaggtattattttgtacctcattcgacgtattagtactcggataattaatataggcctatcgcaatctcggtcgtagaaacattatatggacttaaacaaggagaattatgtaacatgaagaaatagtagtacaatttgaacatgatacaactattttcattacggttacatagatgatattagatttgaactaggagggaggtagtgcaatagttgaacacaacgacgatgtagtaatgggacaaggaagcatgacagtagaaatttcaatatgccaagttgtccgataatagctaacccctacgtgaggatccctctcctctctcaaaccgcgctttagtaaccctgtattgttctggtagttcaaactgcacaacacggctaggtggagttagaacccttctggtgtctatccattctctgtattgacatctccttggtggttcctgggaggaaagaatagatgtaaagcgagtaaagttagtaaatgttgtgagaaaataaggattcatgtaatcaaaatattcttaccatgaaatcgtcgtcaagaatatttggacaaacaaagaaccttcgatccaatgttgtaggatttatggaacgaagaacctgacaacgatcactacacctgcatcttggacgggcttcccatggagggagtgccgtagttagcacccgccagtcgctctgttgttcacgacattgtcgttcataagccgcttttctctgtaagtattgctcagtactttcggatgcgaaataccagcgaccttgtaaacaagtggttaggtcgagaacgggattttctgtatcgacccactcgatgtatgcgcaagccgtagactataacattgattgttatgtcacttgtctgtggatcaactctcaagcccctcattaaccatccttttatagaaggtacactcctctcagccggtctatcaattcccctttctgatacaataaaatctgacagatctaccccagttggcccgtaacggacgtttcctggtccatggtaaacttggaatatttgtttgttcgacatatctgtcaacgaattaactagatcatattactctttcatgcaataaacatctacaacgtaatatcttcttgtgtaagccaatgcaacggtaatgtattgattccaaactagcagatgtacgtagttaccgatatctacaatacgcacttctagattagtacaactaaaaccctaaaaatataatgcatttattcaaacaaattttttaaaaaatacacactatttaactcaatagtcacatataggatctatgaatattacctgaaattggcgtctgaatccggcagggcttcgccccttcttctcttctcctcccctctcttcttttattttcactggatttgaggggggaggaatgagggctgggggctggg

SEQ ID NO: 15371 - DNA, 12201 bp, Oryza sativa
gcccggccagagggcggcaaggggccgcctgcaaaatgcccggccccgactggcttttttgcattcgggcccagggcggcaagggttttcctgcaaaaaaccctccctccgtcaccgcccgttcctcccccgtttgtcacgtcagcttgccgccctagaggtgggcagcagggtctatttttgtaatttttttggccgatagattatttctgtaaatattaaaaaaaatctaaaaactaaaaaaattcaacacagatccagcatggaattattgcggccatggtgctctcggcccgattaaggaccgggctgaccgctgcactttaggcccattaggaggtaaaatcagcccactcaactttcaggtaagaaagccgttgctcatcaggaacttgttcttatggtgtgttccccttcttggggaaaaaaaacatatcaaatttattaccaaaatcaaccttatcaacatttagcactaggggtggacaaaaagcttggactcgtgagctcggctcgggctttggctcgagctcgtgaagctcggctcggctcgaggactaaacgagccgagcccgacctccctccacagctcgtttgcaaatcgagccgagcccgagctagctcgcaagccgctcggtaggctcgtcgagcctatgaaaaacatgacctgacctggcccattaacaaattgtctccgtctggcccataaaaaacagagaaccctaccttaactgctccgtccgaccctccccatttcccatcccacgcaggcgcaggcacgccgccgcacgcgcgcacgattggcgtctggcggcgactagcgagaggagttgccggccgccgtctccggctccatcccctgcgccgccgcccgccggcccgccgcctctctcctttatccccagtcgcccgtctgtgccgccggctcgccgcctccctcccctgcgccgcctccctcccctgtgtggctgcacagcttcggccttcctccccagcggcgctcgacggtcgacggctcgacgctccccgtgccgccgtggcgccgcctccctcccccgtccccagtcgcccctctgtgccaccggctcgccgcctccctcccctgtgtggctgcacagcttcggccttcctccccagcggcgctcgacggtcgacggctcgacgctccccgtgccgccgtggcgccgcctccctcccccgtccccagtcgcccctctgtgccaccggctcgccgcctccctcccctacgccaccggcccgctgcatccctccctcccctgtgcagctgcgctggctctagcctccctccccagcggcgctcgatggtcgatggtcgatggctcgacgctccccgtgccaccgcggcgctgcctccctcccctgcgctgcctccggcctccctcctcagtgccgctcagcctccctcacaagctggctcgagccggctcgagcttttaaatgagccaagccgagctgcactttttgctcgtttcatttatcaagccgagccaagccaagcctgttcttgaccaagctttcacggcttggctcggcttggctcgtttccacccctatttagcactataaaaatttggtatattttgatgctaccaaattttgatagcattggatatgtttaatttgtaatctttttaaagtttggtagtgtttttgtgagaggaaacttcgaaaacttacagtaaattttagtaaggtagagatgagaacatgtttattttgttaccttaataaaatttggtaacacaaaactgataaggtcagaaatgaagtaaatagccccttaataagataaaagtaaggttaggtgatgtttggtttaatacctcacaaattttagtagacttttgtgagtggaaaatttcaaaactaacaaaatttagtaggattgtacattagtactaccttacccaaaatttggctggtgatgtcaaattttcatttgggctgagtttatttccaaactttttctttaaactttcaacttttccatcacatcaaaacttacctacacacacaaacttttaacttttccgtcacatcgttccaatttcaaccatacttcttaagccatttctcgcccccgttagctgactacccacacagaaatgcctgcattaattacgaagcgtctcgaaaagaatcaaagttcacatgatggattgatggtacaagaattctccaaagacaaacgcagatgacagactcaactgcatccaatgtagtatcaatgtatgatcagtgataacatccatacgggagtcctaatgcccgcgaggggcttcatcacccgactctaccatgctaattctgacgctgctaaaaacatcatgcaacaacaacaggtcgtgtcgtctcctaatacaacagtctcaggttgaaaagtttatgtacaccatgcgactgacattacaggaagggactctcgtggtcgtgggtcacacacacttgccatgacaaataaatagcattacaccaacttgagaaggctttgtacatccaggtgtatctcgtcaatgaatctggggggcagtcaccttctccgtctttttgactccacctgctgaagagattagtccaaatgaaatgtttgtctttcagaatcgcagaatggtgattaccaaattaaaaaagaactaaatagtgcatgtaccttggatgggttttatttactgtatgattagattatgcataatataagagtgaaactgtacaagctaaagtagggcaaattgtgcagtatccaaaaaaaaggttacagcaattgccacagtaatcaacatgcaaaagttccccaatcctttatagttgtaaaatcacaccagactttttactgccatatgaataaattggtactgtttcccaactggtgctttgtgtcattaagtattggaaatttgttcaactacagtagcgatacaacaggacagacatctcatatattataataatattattaagcagcatgcctcaatatcattgaaaattatgtgtagcctatgttattaagacgacatggtgaacccgggagaccctggccttgatgtattaccatcgcactactgatagctaaacaaatcattaatgataattcagtaatcccaacatatcatattttaccttttcttcggattgcgctgtagcttcatgagaattctcagccatctttccattttccgcagtacagctctggcagaaaaaatgctctagtttttttgcatctttaatagtcattccaatgcaagaagggtgaaacctggaaagcaaaagcagcagatatttgttgtgacaaaaaaatgataagaaagttcatgcaaaagtaaaagcagaagacaaaacaaattaaatgttttattatctcaggaaaaggtccattttactccagtgaaccatcctcttcccaacttctttttgctagtacttttaagttcaaaccacgatggttgatactatcatattctatgctaagaaatattttcaaagttgtaataatcatttgcatagaagttcatatctcagtccttaaaccggtattaggtgtttccaaccaagtgaaatagtcaggaaaaatcttaaaatattatagaacacaatagtacgaagtaatctgtcatacctcaaagttactacttgtacaagaaaaacaaaatagacaaatgatgttgagtagtagtgtggcctagttttaatagtttgccatgtgcaatgaacaaaagaatatgggcctgtttgacaaggctccaactcctagtggaatctggagtggagcggtggagcggcccaagccccgcttcacccatctagttcattttttggaatcaatccagcccattccactccccttttaggtggagctgaaactgtttcgttgggctccaggtctaggaaaggtggagctggatatatatattagggggttaagagctccagagaaatagtttagagtagagtggatttctttcttcacttgctaaacccttcctcatcttttggtgttcatatatatattgtactgaaaagtgtatatgaaatgtgaagcctactcaaaagcaattctattaacttttgatggtggattccatggacatgtagcttgaggtcatgaatttctttcagagcgtgtgggggttggggtgtgtagagtactataaccgccaaggttctacagctagcaaaaaacaataactcagtaggccatatggggtttagcttgtttccttatgtttgctaggatatatatctctctatagtttttaccagcgcattaattgtttccttattttaaattagaattaggacaagcgaacaaggaaattttttccttcgtctctgcattgccacagcaaggaaagagttaagagagtctagtgtggcaattgtaatagtgcttattcccattaacaatatataagcacgacctacattattggccaaaacatcagcccaaaacacatgtttcaacaaattaatatggcgatgtaacaacaaagacatgccatgcatattgagaggcccactttgtagccttgctctcaggaatttagagtatagacattatgcaatggttatgcctttatatctgcacaaatctctttggggattgtgaataaatagagccaatgagtgatttgttctggtgtaaaaaaaatggaaaagcatttatttctctgacggctaactagttgccgcccatcccaataggcaagaataagataagggcaagacacccaaatccattaataggtaaaaaaaattggttgtcctattcacccagtggcaagagggataaaaccataaaatgtacaccagcgcagttcaggaaaaagatgaatttaaatgaattatttcattactcaccaatcagagcattcctcacattggatcataaggtcatcaggattgtatggcatctcacacttgcagaacctgtcatattgttagtaaagggatgagaaaatcaaataaaatgatgatattaatgcaatacataaatcaatttaatagatagcataggccagcaaagcatagcaatataagtgatatttggttgagaatgtagcaacagtaaataaaaatggtcgcagttcatccactacagccaaaaatctttattcatgttattcggatagaactaccataataaacaagacatccattttgtaaaatgaggaatcatggtcaaataaagaaataattgaaaccaactaacatgataaggaaacacccagagtggcatacagcattacaaagtgtcatatatgcttaggatttggcaacaccacaggctctaccgaacaggtacgaccatgctgatggttggcagcagcatcgcaagggcagggagataagaagaacgaaggtaaggaaccattttgttatttcttgcttaatactaatgacacagtcacgtgtccttatataagctagctatgcgccaaacatccttgtcaaacttataggaaggataagagatatgcctatccaaaagttagctaacaatcttaatgacagtacgacagcaatctggtggttcagcctatgatgcatggatacagaccgtaaacatggcatggtactgatacagggaattcgccatccccccccccccaacacccacagacaacacaaaacgcccacccacccaccaaaagggaaccacaatatggtgacacactacatatttaaataaaaatattatgtatacattattttcaattgtttgacactgaaataatgtatggcaagctgtaaaaaaggaaaacttatctcaaagacagtccatagctcctagaattcagtcaatactcaatgcatgcccatatgttccaaaattccattagcctggtgagggcacacagggatgggattagggttgagtatcctggctatgtgggctgggccgtgtcgcatacgagtcagagaaaagttgaccacatatttgagaagaaaactaattatttttttatgtataatcgaccaatacttggtcgatacctatctgagttgaacatgtcattggacattcacgtgcactgtgcacaccagctcctaatctcttgatgcgttagccagtcagcggcttccgacagaaccatgcacattcactactgctgctgccttcagaacattctataacctctcacattatgacattgcacccctcctttcgagcagctcatcctcaagcttctaggtggcggctatggctgcagtccaaggagggcccctcatggacaaaaaggctgcagcactggcaccctaccacatgagagcaccaggttgtccagatcgtgtctctaacaaatacgattggagacagccctaacaggcagaagtaataaatcataaccaatcttatctctaacctcgctaacactacatgatccggactaatctagtactatggccagcacaacctatagcctcatctcaaacaccaacagctagatggaaggtacggcatgagctgcttccatgagcctggcacgctgacccctcataagccttctaccagccgtgatgcatcatgcatgtgactcgaaaagaatagttttaaatggggcaaggtgcagaatgcactaaattggggcggtgtagtaagcaatgggttctagctgtcttggtacttatgtgcaatatgggctacaccactacacgagcctaccatagacataccacataatatatcatggcatgcagtggctcttcggtaaaagaacatctcaagtttgtaagagcattttactgtgcctctattttctccaaaagcaagtaataacagcaaatgtggcaagctgaaaataggcacaaaaccttatgcatcccttcatattccacttcaacacagggaaatagttattgtgactctttggaaagataaaactggtgatgcactgaagcctatagaatctagacaggtcataaggatacatatatcacatatcaactcatcagaattacgaacttgttgaccttgggatttcacatcaaatataaaaggcatgtgtgaaatccctaaagaagactggaaaacataatcaacagataacatgatatttaaatatggaaaatgtcatcgacataacagatcaatattgtgcagatgtcaacggaattaactgcaaatacgaaacaagttcttttcagggctatcacatagcggaggttgcattaaattcttacacagcaatgcggtcgggcacgaagcttcctgtggctgatttgtactcaaagcgacagaagaagtcctcagcattgacagaatcaagctttgtgtagctacggaagctgtgaacgttgcactttccctctatggtgtcagcactctgtacgtcatagtgatccgagaggaacacctctttggcaccatgaaatggacgccttccacccatggactcctctggccgatagtaccaccgcacccgtactctcacatttgtgcctcgtgaccctgcagcctcaatagcctcaactcttgccacatagggtggctttgatgtatcagatgccctcattagcacacagtccccagctgcaagaaacatataagagaatcagacaggtatcgagataattttatgcttataaaaaatagtgacatgggtcatcatcaagatgtaaagctggtattggatagtactggcatcacagtgataatctcagagcaaaggaaatgcaatctgcttacagtaaaacaaagtgtactaaacacaaggtaatcaaagcatcaaggttcatggatgctgtcaacatctagatatgaattataaaattaaacaaagggctgacactaaaggaaccaattaagtctacagatatcggtgtaagtagtaactatgtttatctgggcaggtttccataccaaagaatttaacagatatcaaaacttcagaatctgacacctctaacttgaatataagttagattagcagaaggcatgaatcaaccttgaacaaacagcacaaaaggagttcagactagaaagactatgcaacatattgattttgcatttaaggctagagaacactatctagccaaaacaaaactttagggtgcctaactggatagtattgattacataactttaagcagttaagcaaacattttcttcagtaaaaagtccaacagtagctacattgtgtagaaagagattagtcttcatgcaaatgtcaaaaccaaccagaacttagatgcaacataggctagaaggtcaagactataagcaccataaacaattgtaactacagctggtatttgcaacacatgaacacagccattaagatggtaaaaaaatctctaattagcaaaatgacgatcagaaggcagattctagattatatctagcagaagggttctgccagtagtgctaaattgtagctcacaaacagatacaaaactacttacagactgaactcccataatctaaaacaggaattcaggaaatcaaagtgcatttaagatcataacatagctcaacagcacatatatgtattaccctcctagaaaccatgaaaaatattcgtctgttcatcaaggtaatcaaaagttcaccaaacacaaggtaatctgttctcaaaacacacacacacacacaaggtaatcgaagcatcaaggttcatcggtgctatcacacgtctggatattaaccataaatatagaaaaggaggctcaagctagaagaagcatttaagtttgcatagattggtgcaagtaatataccggtaattaaggtttatctaggcaggtttccatcccaaagaatcccaatgtgccaatagaacaatgtcagaaatctcagaatctggcatctctgacctttgcataagctaagattagtagaacgcatgcatcaactttgaataaatagcacaaaaaagagttaagactagaaaaactaggcaaaataatcgtttttcatttaaggctaaagcacgctatctatcaaaaaaaaaacttaagatgcctaactggatagaatcaattagttagcttaacacaaggtctaagccatgagataaagattttcttaaataaaaagtcaaaggtaagacacattgagtagaagttattgttcttcatgcaaatgtctaatactaaccagaactgaaacacaacgtaagctacaagaaattttttttttcgaggggttaagctacaagaattacagcacgactataagcaccacaatgatcataatgctaactgggattagcaacatatgaatccaaactattggcgatcgtaaattgcaattaaaaacgctatatcagcaaaatgacatagctcatggtgctaaaactgtagctcacaacccagacaaaaccatgtaggggctccactggacataatctaaaacagaaaatcaagatgagtttaaactcataacataactcaatagcacatatatttttttctgtattaaccgtcctaaaacccatgcaaaagagagataaacccatgaacaatcaaaaccacaaagagttaacgctccaacagattaagttaacatgctcacatatccctaccatggtttccttttctgattatgaatcgagcttacatcaacagtaaaccagagacctaaacaccatttcatttcgcacggaaacatcagggaaattaaaatgctcccccgaaacagagcaaacatttccgcgacattcaatctaaccggagctaaaaccccagaattccagacctcaacaaaccgcgacccaccgaaacccacgcccccacaaaaaaaatcccccccaaaaaaacccccagaaattccggatcgaagggagcagcggttggggaggtgggagggggagcctcacgcttgatgactttgtcggagcccttgatggtgtaggactcgaggatccgcttgggcggccgcgacttcgccatgggacgcgacggcgacggcgagagggggtgggagctagggtttggagttgggaggagacgaggagatggggaattttgcctatttctttattgggaattcgtggttttctttttgggtctcgaaaatataaataccacggatttcttcgcttccttttttacccgcctcgcccgcgctccatttgatgcgagcagtaaaagttggtaaaaattcggagagaggagggcgcgtcttagccgttgatgagtggatgtggatgcatcctagccgtcgggaggctcctcttctggatggttcggaagggttcgaggaccagcctgctctgacgaggctttcaattacgatgccgttcagcctgctactccagataggctgtactccataaaaaaaaaatcaacctaagtaatagatttgatgtgttatttgttgtattagaaaatatctcatctaatattacgttgattttttttttacggacggagtactgccattttctattaaaaaattacctcatttcattttcactttcttttatccggatattcatatgatgatcacttaaatattagtttaattaacctcttcaataatcaaacagatttatcagtggtgcactggtgccgtaacattatttttttataaaaaaatactcaagatatgttgtactagatacattggcgaatcatctttggtatcgtctatcgatattatagtatgctaattatatttagaatataatgttataatatatgaataagcattttaagcataacttttgccgaaagtcgtcggtgtcacctgacaccggtggtagcttttactagttcatccaaagagtgggagtccaaggggaatttagtgtcatcatttattaatgtaagcatgatgcttagctgaattaaatgccattagatgcgtatttgcctcacggaaagtgaggtagagagcagataatgatagctatgtccatcctttgtattcatgtaagattacatttggtcgtgaggtttggctgcgtttttctgagttctgaaaatttttgtacctttttggcaattaagaatattttttatttatgtgattatactaatataataaaaaaagtacgtaatatatatgtaaattctgttgtttctcatttctcttctttttctgctacagcaaggctggtccagaaggaccaatctcaagctcatagcctcactattccctcaatgacaagcaagacccacacgttagaaccatcttcttctttgccttctttttccatgccgctggaatgagtaaggctgtgttcgttggagggggttgggaacccatctcccatgcacgaaaaaccaaacggtccattagcacgtgattaattaagtattagctatttcttaaaaaaatggattaatttgaattttctaagcaacttttgtatagaaactttttataaaaaacgtatcgtttagcagtttgaaaagcgtgcgagcgaaaaacgagtgagaggggttgggaacttgagttccgaacacagcctaaagcgagccacgcacaaggagttccatcaccgcgtgtccgtgttgttgtgaaaggaagataaccctggagagaaagatgaggataaagatcaggttacggttaagtcattattagtatagatggccatatggcccgaggcccacggcccgcccaaggcacgtcattttggcccggtcacagccgagccatgcttgggctgcaccctcggcacggtgggttggcccggcatggcacgatcgaagaaaaatagtacagggatgaaaaatagacttaaataaccatataaggcaacacccaaaaaggagagaaatacaaaatagatttatttctagccatatgaacatagcccacatagttgagggatgaaaaatagacttattctgtggagaagcacgatgggctatcatgccttcgggccagtccagcatggcccgagtcgtattgggccgtgcctaggccgtgtgtgcagcacgtgtgtgcaacacctcggcccaagcacagccggacctgggccgtgccgtgccgggcggcccatttggccaactatagtcattaggacttggttgtgtcaataaatttccccatacagatctcacccctgtggaattaacagtgggattgaagttgtggtacctcaagaacggtaaaatttctcttggataggtgctatgaaattatcaagtctgaagttcagatccttcatctcttccttggaccagttttttcagaacttttaacaaagctaatggaaggacagctgtttg

SEQ ID NO: 15372 - DNA, 35366 bp, Oryza sativa
caattcctcactcccaagagacagaatggccttaccagccatactggactcctgacaaccaggatcatcatggatagtagcaacaaggctggtaaatagtgaagatcaataccaaaagaaaactaaccacattctctttcaccttgtgtggtctctgtcttcttgaatatacaacattgctttcttgaagaatgtatgtactacggttgggagaagaaatagattaaagagatctgtatagatctgcctccatgaaaaaagggagatcaaattaactgtgcaaggacactccaagatagaagagacaaagttgttgaaagaaaagaaaagagaggacaaaaaaagtttgggcaaaggtattgttgtgcttaattacatcagaatgaaggctagacatgctagatgcagtcaatattaatgcaccccaatcgaagcataattataattacattttggtttatcacagcttttgatatgcattagatatttttcaactgtaaaaagtagtattgtttgcatgtactgtgatgtacattacaccccctggccggtcccttctctctctagatgggtgtgtgcgtgtgtgtttttcaccttgcttaccttgtgcttcaaatgcatccagggggactaaattcccaacttaataagttctttttcctttctagaggcgcaaaaattgtttagcgtttgggtactgatgctacttactttgtaacgagagttgaattcatctgccatgcatgttggtttcaaggaataaactggcgttgacatgcatgatttttgtggtctatatatatcacatatatatcagattactcgatgatctaactagttagtttactgctgtacctgtacatatggatttaagaatcagagtggtgttggctatatattaagagttatgcttgcatactgatactgatgtacatatacgtaagcacagaaaattcctttgttcatgtaaaaaaatatcagctctcaatatagacatgtgttgtatttatacaattaatgtgcagtagtgcacctgtacctattggcatttcaagtttcatttacatattacggtgtatatatatagctactaaattaaatacaaattaattaacagctatttaattattgcatatcaatttaatgttatgcatatagtgtgctattttttgacaagtttgattacagttttaggctagactattttcaggaggtacatacgttttttttttaccaggggaacaattaatgagcattattagtattgttggatatatactattacattttagaaatacaaatattagtatattctaatttatcactattgcatatatagggagatctctgtgcatcgtcatactattccacagaatatattttttttgtgtgttggggggcactaacaaatatcacagtataattaacacaccctgctatttatactttaataccgtgcatgcatgttattgtcaatttatttacattaagttgcatgccctacatagaacataaggctttgtttaatttaacaaaaatgactcctttcaaaaaaaatttaacaaaaatgatgatttttggagtacttgaggattaaactgaacgaatccgaccccagcatgtacgttgcacacacatatatatggaatgaaaccaaaattgcattgttttttactgctccttccgtttcataatgtaagttattctagcatttcctatatttatattgatgttaatgaatctagacatcaatatgtatgtgagaaatgctaaaataacttacattgtgaaatggaggaagtagctagcatcactagatgtactgttttttttttcgggtaatgcacatatcactggtggtgtactcctacctattgttccaaattaaagagctagcgcttgtagttttcaggcaaaagtgcaacatatgaatatatgtcgatggaagaagaaaggtgcaggcatatgtgctagctgcttgtttaaggttgtcgctcgcatattctactgtgtacatttgtgtgtgattttgtgcacgtattaattctcattcgatcgtacacgcgacgtatatatatgccaattaattaatgcacgcatgttagagatcgacaaaaacatgtggttaatgtacgcatttgcatatatagtagtactatatgtttgcatatgtacagtacaccatttagaacaaaattaatctgcgaggacgtatgtgggtagctctaattaagtcggaacacctaacataagtgctagtattagcgcgcatgcatgcaacgccaccttttgtacgtagcatggtttcatcaattagtttcgtttccacattatgtgggaactatgaaacttttgggtaattagctattacccatttaattaattaattaggctgaagcatgcatgatatatataattttcttttcataatcctccaaaatgaacagcaagttattttcctacatacctttttttatgaattagttttgataattacaaacgggcctcaagaccaatacagcaaagtgctcttttttaactacttaattattgtattttgcgtttctattaaccataaacctcgcatcatgatagatcatcctatatatcgtacgtgctggctaatactgcattcaagtttactacgcatactccatatatatgcatatttaattttctttctcaattcgatcacatgagagatgcacccaccacgtcactgcttgatggggaggaagcagcaacgtgcatgccagtaattgcctgtggaccatgcatgggcggctctcgtatactcccgcgttttaaaatgtttgacaccgttgacttttaatacgtgtttgaccattcatcttattcaaaaaaaaattaagtaattatctattcttttcatattatttgattcattgttaaatatgcttttatgtatatatatagttttacatatttcataaattttttttgaataagacgaatggtcaaacatgtgttaaaaagtcaacggtgtcaaatattttgaaacggagggagtatatatcttggctgccggaatagatatcttaattactcgcagcaattttaattaactaattgagttaaatcaacactgtaactgaatctctacttaattagacgtacgatctaaatttactatctccatcccaaattaaaatacatggcacaactaccattgacacaaatatcaagaattattatcacctctggatcactctaataaaatataatacatacacccaaaaatattagattagagatttttaaggtgtatgatttaaaaatgaattaaaaggaagaggaatgtgctagttaactacatatatgcatgcgtgttttgtattaatattaaaaacaaatggttacgtgtcttactcttgtaccctctccgtcaaaaaatccaatcatacgtgtacccaggttcgtagctagagtttgctcttttttttttttgacagagtagtataaattaagatcgagtacctaggaagcttctatcttctgatcattaatgcagggggcatattgatcgatataggagggtttcacgtacgctaggtataaaatgtgcgtgtgcagtagtacatgccacatgtgatagtcccaaaatataagggattttgggtgaatgtcaaatcccttatatttttggatgaagagagtgtatacttagctatagctagtagaatatgtgtatatacaccaagctagattaccgttttatctagctaattgggatgagattcgtgtgcgctaatatatcctaatataacattgatgtttgatgaaacacagtacaataccttttttttgacatgaaatatattcaaatgacttatgatatgaaacggagggagtactacctatacattatatattagacatttatatgttagcacctcagaatcggagataaccctatactacaattagataatggaggtattccgatccctaaaaaaaattaaatgattggaggatcgatagagattattccggacctcagattgtacgtcaactcgatcctaggacctaccatgcatcgatatcagggtacgcgcttggaatatgatctcttcttttttactagctactatgcatacctttctttctgtaccatcatcgaattttatctggaagatgcttcttaaatatcactcggtctgatcatatatatacacacgaactgatcatggagttcgtctttctagggcataatgctacttctataattgctgctgagaatctcagtgctaaggagagaacatatgcatcgcctttcctcataaaaaacttgatgatgaacgagttaggtaaaggaaaggttcctccttgtttgttttgcagttaatgtcccctattatttgttctcgcatttgtcttttagcgaatcataataaactatctctatctttataattctacctttcagagcagctaaccaaagaagtaacttgcccatttgtgcgtctgtgtttgtaacctagctaaattatgaacattattcgtttcatctctaaattaagactgaaatatatagttcttgtacaatctgttttgggcaatttaacactagttaatatttactgctagatctctcagccgatatgatagtatgatatgatccaagctactgatcatgtgttttgttgcctatgatatgctcagagcctcagagattaataaaaaataatggttaggttcagacagtttcaggttcatggaacatcatagaacaaaccagatgctcacatgtccctttccacaggagatagaaaggataaaagaaagagtgaaaaagagagagttcggccatgtctcatgtctgtcttcttcactctcatctatttcttttatggccatgcaacaaaacaaaacaactattttgttaacaaagaaattgaaaagagatcgatctggggatatattctctctcacgcgcacaagcatatatacaataagaattaatacaccttaattatattacttggagacgatactatagaaaagaaaaagaaactaaaagtgcacatgtgtgtaggtgagttaacctcttgttaagctctcccatgtgtcgttgattcggtcccaaaaagaagttgcaaggcgaattgtactgttagatagtgggattgagaataacacaacatggcctagctaagctagcctatctttcctttccggattattctctcccaaatgtgatattgatctagctttagtttcttcttttcttttaagcaattgttccctaatcatatttaattatctcaaaggagtatgcctatctattcctgcctccaatgcgacgctgtttccttacccacatttgtggttttagtgctgtgtaagtaattaaacctagctagtaatggaagtaagtaaaacaactttattttcttgaaaggtacccatgtgtgcgatatttgtggggaattcggattttagaaccatgatgaataatcatatgcacccaacttctcaactgtacctcgatctgtcggtctatttaggagagttttagattcagataagcagcttgagagaatagaaaaaccatgtgaaaaaaaaacacacaactgaaaaaaaaaacatttttgcaggcgtctgcttcttattattttcctgaattttaaaactatataacttctccaaacctaaataaaaaaactaaactatttgagtagcttttgattgtcggaagcctctcctaaaatagccatgtgtttcccgccttcccaagtaagtaaaacaactttgggctatagtagtggatgggaacagaagagtggactaattttgtaataatattttgtgggaaataaaatatatgctggtgcgggtatatcttagattctgttggctttgcaattgtcgcctgttgtttgcagatgcgcgctccgcttagaaaatagcagcagaattcctcccaagaatatgacaaatccgatcatccgatgcgtcatggaactcgtggcgtcatcacatcagcaaatccaagtacggtgaactactacgcttcaatcaatttcccttttcttccaatgggcctcacaacgcaccgcggcccaatagctcttagcccattgccatccgccatctcggcccggaaccgcatgggccggcccacgccacgccgtccccatcacatcacaccggcccgcttctctctcgcgcgcgcgggtgaagcgtcgcgcggcgcgccgtggcgtggcgtggcgacaggtgaagcggccggcgaggcgaggcgaggcgaggcgaggcggcgtcatctgcgccgcgtccacacacatgtacgtcgcgctacgcgcccgcggcgccttatcttgacaccagaatccacatgattcctgagccccagctataggctatagctagctgctgttgctgcttggtcccggataacgtgacaaatgcgacatggttcatgcttgctcgattgattgattgcaatagacaaaaactcttcttgtctcttcacctcgccaccggggccgccatacaattacctccataaatcttggatagaatgttaggagtaactaactctgcactgtgccattgctgtgtgtcagtgtgtgtatatatatccagctgccagctgcagagtgaagcataaacatcagtagacgacggcgatggcgcccaagcgacttgtctgcttcttggccgtggccgccgcgctagccaccacctgccacgggtggggcgccggcgccggcgatgtcgtgtcgtcgtcggcggcggcgctctcgttcgtggacaggctgaggcagatgatgatcccggcggccgtgggcgacggcgactactgcgacagctggcgcgtcggcgtggaggcgaacaacgtgcgggggtggacggcggcgccgcgcaagtgcgacaactacgtcgagaactacatgcgcggccaccactaccgccgcgacagcaaggtcgtcgtcgacgaggccgccgcctacgccgaggccgccgtcctctccggcgaccccgccgccgacgccaacgccacctgggtgttcgacgtcgacgagaccgccctctcccacgtcaagttctacaagaagcacggcttcgggtaccacagaaccgacgagccggcgttcatggagtggctgatcgccggcagagcgtcggcgttgccgaacacggtgacgctgtacaagaagctgctcctcctcggcgtcaagatcgtcttcctgtcggacaggccggacacgccggagctgaggaacgccaccgccaccaatctcatcaaggaaggcttcgactgctgggacgagctcatattaaggtcacgttacaaactaattaatctctgaattcctgcgtgtactccctccgtcctaaaatataaatatttttagcatagtgacaaatcaaatattttaaactttaaccattaatagtaaaaaaagatcaatcatgtaaaattgatgttactagatttatcattaaacaaactatcatgatatgtaactctttttatttaaaacatcttacttatatagatattgttggttaaagtagcatctcgcagaccgtgtataagagtctaaaaatgcttacattttgagacggtgcgagtataaaattgatgaaatgaacgaacaggtcggagaactcgacggcgacgggatcggtggtggagtacaagtcgggggagaggaagaagctggaggaggagaaggggatggtgatcatcggcaacatcggcgaccagtggagcgacctgctgggctcgccggagggccgccggaccttcaagctgcccaaccctgcctactacatcgacaactacaagcgcgccggcgccgccgtccgcgccgccgtagccattacagcctcctcctcgtcgtcgtcgtcgtgaagcaaacgatgcctagctagctatagtactcaactttgaattgcatttttttttcagacacataagttcagttaataatcggtcgtgtacgtacctgccgtgctgtgcactgttgtatctttttggtgagacgattgaaatatctttgggtttatcttttataattggttttaccgtgaattaattaggcttgctgctaatgacaaatttctgaggagatatttctctctgctggtctatatcctgcctccggtgtcgcacgcgtgtgcatcggctgttggcgtaggcgattgcagatgcacaaccttatcctgatgaatacgctacgtgggggcatccgatcttggatgggctcttgtttggccggcatatcaacatctactacctccgtttcttaataataaaagccgataactttttatcaatatttaatgatttatcttattcaataatatttatgtaaatataaaaatatttatatcacgtttaaagaacatttaatgataaatcaaatctaatctacttacggttggttgatttgttgccatacgtcgaaccattttgtttctatagcaggtttttacatctcaaattaattaattttattagtctaaaatagttgacttttattgtgttaactatttttcactattactatttgtgatgctatggcttgaatattgaacttttgcaatatactctctgtttgaaaagctcgtttacctttttctttttcttaccatgtgcgaaacaataaatgatattagtgtataattaattagttattaagtacgacaaacttgaaaaacatgtttatttgatttttttaaaataaacttttatatacaattatttttaaaatatatcgtttaacagtttgaaaagtgtgcttacggtaaacaagggagttgcaaaagcaaaaaagaaaaacgaacacaccctaagattgtgttctcacttctctcgtttttcgcgtgtatggttttcaaactgctaaacggtgtgtttttttttaaaaaaaattttatatgaaagttgttttaaaaaaaatcatattaatcattttcttttaaaaaatagttaatacttaattaatcatgcaataatatgtatttcgttttgcttgccgggggggaggggtttccgaacacagcctaagttatggttggaagcttcagccttcaagctttataataatagctttctacgtatgtaagttccctacaatacttcttttaaatttataacagctaatccatttggttgtacctcaaatattatcacatcccaaatcatcagataatccgttgcagttcagccattcatccattaaagcttggaaataagtgtgatgcaatgtctccaacaggtgcaagtgcacaaaataaaaggaggagaaatagggtggctcatgatcttgctcgaatggcaatgagtgctaggtctagtgctgactggagactgtatgctccccgcccaaatcctagactcgttaaaccaagaatgtaggagtaatcatttattcagccaatgtaaaaaaaaaaggtattgggcctactataaccccccaccccaccaaaaaaaaatctattaaaagacagcatgatgatgcaaggatcaacacccgggcaacaggctgattttccattacgggccttcaaggcccataatactactgatttacgtgcgatcaatcaaacatacggtgagcagagacgacgcttgccaagatttgggcaaggcaagtcaggggcaagaatcgaatcgaatcgaatcaaatctctgggagcacaggacgagcggagcagagcaattttctctctcgctctctgcttcactctcatgagatgagagatattcagatgcgtaactctaaccctgccattaccagtagagacgtttgcgattgctttgcttgttccagtcctggaagagaagagaattttgatctagcagcaaaaccaggctctattttttttccctgtcatgtgttttccgttgctaatttttagtcagcattcgatgttatcagtcagtcattctgtgccaaaaggaggactgacatcgttgttggtgaatggtgaatcagtggtaaactaaacacaactgattagaagtttagaacaatgtgatgaagggaaattatattgctgaacacaaaaggcttcctgtgtgtccagcgattgcgttttatacttggtatatttggcaagttgttattatcgcaaaaatttctagaaaaatgagagaaattttggttcctgattcttgcaaccttgcaaggactgtttcatgtgaatggccctccaaacacacctctgtatagacttcatcttctgaaattcgaatgaccatgtagcccagtatcttatgagcattttattcgaattttccagttacatgggaataaacttctttagcttctatctcacagaaaggtagactatgttggcttccttcttatatctacccatagggcgcacaaatatgtgaaagctatgagagcaactttaccgagttcgccgattcaaatttcaacttttgacctacaaaatatacttcccttccagcaaatcagctgaaagcaattacatcatttttcgaagctaagggtctagaatagtgctgcaagattcccctttctttcagaaatcactaggaacgccacaatatggaccataaatatcactagcacattgataaagtttcctagaattgaatcacactaaggtttttccgaccgttttcatccctgctactatctccgttctctcatcaaaccgttttatctcggaaagcagattgaccagacctttaattgttcagacactatctcaaccgcagaagtattttatgtttaacaaacttacaaattttacccgaaaattgatttgctacaagctattgctggtctctgtagagacatgctaatttcatgtatcgcatttttgttacattttctcagggaactggaggggttactgtcaagaagaccttatctatccatcatcattggaatctatgaggaaccgatgactcctggccagtgcaacatggttgtggagaggcttggcgattaccttgttgaacagggtttctgaactcagaatctgcagtaagagggcaactgggtatatgtatacaagaatctgtcattaatcccataaataatcagcacaaaatttgggtatctgtttaaaagtcagttcgtcattatgttggaattgttgagtacatgacatgtgtcataaatcatgcatgtaattgtttaaccatggtggctgtgatgtttttgaagattatccagtttctcttcaatgtgattatccaatttctgcttaaaagcaaggaaattctctccattgctactttgcgctgcaccgtattgtttgttatctgctactgcctccgttttttaatagatgacgtcgttgactttttctcacatgtttgaccatttgtcttattcaaaatatttacgtaataataatttattttgttacgagttgttttatcactcatagtactttaagtgtgacggagctcgtggctcctcaccgggagaccgcgcaggcccccctttgccggttcggccgggggcttagggtgagatctcaagctctcgctgtgtgtggaaagattactcgcccgcaagacacacgagacacagcgatgtatacaggttcgggccgctccgaagcgtaataccctactcctgtgtttttgtggatttgtgtatgaatgagctacaaagtgtgtccacttctcctccgctctaggctctaaatctggcaagaatccacccacctctctatgggcaaggtcctccttttatacttcaaggggataccacatgcacccttccctttccaaactggactttttcttctttacgtaaatggacggagatttgcacggttgccctccaaacgtccttctgatgggacggcacatacctacctccacttctgccgggggcaggcgcgtcgcgggaacgtggctgtgagctgacgacctgagcagtgtcagaccggtcacaaatcggtcattcttgtccaccgcgtgtcagcttagcaacgtgcatgtttgcccttcttcacacaacatcttgcctgtaatggttaggatgaagcctggtataaatctgaccagggctaacgtgccatctctaagagataacacgctagctccggcttgagacgagttgcctagaggctttcgtcttgacgggatggggcaaggcgtgcgtcagaccgccagtcgccacctaacccttgatctgaccggtctgtgactggtcacagaccggataaaagagcgtgctgtactgcgttacatgcagcgtgacacgcttgaccagactgtaataaatgctgttaggtgagcacagctgtgctcacttatcccatatatgtggcgcagacttctttaaggggtcggggtgcctcggccctcggggccggggcaagcgtaacccgaccccccccctcgggggaaatcaggaggagggcggacacctcaccctcgggcccgacgtccccgaaggtgccaggccacgtgggcgattgcgtctgcctcaagcctctggtcatgatactcccggtcccatatcaccgacagtagcccccggcgttatgccagagcaatttcccttccgaagggaagcggtcaggtgtgacgccacccctaaagcctggtgacaggtgggaccggtctccgtagttgggcaaaacacccaacggtctcaatccatgcacattggtattggtgactttggttgtccataatgggcggtctactcaagactgccacatcacttgagcagcgcgcgaatctgggtgagcagatttgtctcgctcggagatacggtaacgccgcttcggtcggcgagcgtacttaatgcgcgcacgatacaatccgtttcgattgccacaaccgcatatccacttcatgcgccgtaagcgggcgaatgggattagtggaagcgtgggcacgggaaacgagggagcgagatagcgagatacgagggagcgaggtagtgggcgcgagaaacgaggagccaggaccagcgatggcaagggtataaaagcatcgaggaaaggatttgctcccttcctttcgccattgttcctcttgccttcgccgcctgagctctaactctttctctgctacgccctactttcgccacacgcgctcgttcccaatcatctcttcctccaccgccatggcacggggctctgctctgctcgacggcagtgtactgccgccttcccgcatcgtgaacgagaggcacgccggactgccgcgccgcttcatgccggagtccgccaccggtcgggagatagtgatgctgggcgaggggcgcccggcaccagactacccggggcggtccatcttcttcctccccttcgcaatggctgggctggtcccgccattttctcatttcttcatggatgtcctggagttctacgatctccagatggcgcatctcacccccaatgcggtgatgacattggccatcttcgcacacctgtgcgagatgttcattggggtgcgcccctctcttcagttgttccggtggttcttcaccgtgcagtcggtgtcgccgccgtcggtagttggcggctgctacttccagccgcgggggccggtgctgaaccgctacatcccctgcgtcctccgcaagaagtgggacgactggaagagcgactggttctacacccccctcgccaacgaagcgcgcctccgtcttccaagccagcccccggcgcaggtctccagctggcgggcgccggtagatctgggggaggagtacgacgccgtcctcgaccgcctggcgggcctgcgatcccaagggctcaccggggccatggtgtacggcgattacctccatcgccggattgcgccgctccaacggcgcgcccggagcgcctgggagtatactgggcctgaagactatatgcggacccaccagggagccagatgggattgggctcctgaggacttcaagatcgtagtccaaagggtgctgaatcttagctccgcggaggcgtctcgccttcctcaggagatcctccccctctgcagcgatcccgaccgcgtctccattctaaccattatgatgggggtcggggcctcagaggagagagcccctaagggccacgacggcgcgggcgtgcgccgccggggggaacaacctgccccaggagggggtcgtgcttctgggccccgcgtcgggggctcggggagcagccgccctgccgacgcccaggggaagaggaagctgggaggtacacctcccccatctcctccccgagggggcggggcggcgcgtgccagcagtcggcgcccggagggggccgcgccgacgtcgcagcccgagggggtgcgcaagaagaagcggctccgtaagacgggggagacggaaccatgccggggaaacctgatttcccctccaaagtggtcattcaaccgaccccctcgcaggttcgtctcactctcattgcaaccattttcctcccaaaaaagaagttttttcttactcattttgttcgtctttcggttttttcttctgcttcagcgatgtcccgtcgcattcctcccgccaccccaaatccggccagtccgaggccgaagatccggcggccgcagaggagcggaggcgagagtctgaccggcgtgaagccgcagcccgccttcgggaagctgaagatgccgcccgggaggccgcccgggttcgccaagcggaggaagctgctcgggaggaggccgcccgggctcgccaagccgaagaagctgcccgggaggaggccgcccgggctcgccaggctgaggcgacagctgctgctggcgcgtcacttgggcccactccctcgggcggtcctcaggtgacatcctccgaggcggctcgcgacgaggccgcgggcgcatcgcctgggcctacctcaccgggcgacgcccaggatcaaacgggcccgggggacatccccgagcccagcgcatcctccggggggccaagccgcgtcgccttttctccaaggcgacttttctcctcgtcttccgttgccccggtgagcgccgagcccattatgcaggccttggccgccgcaaacaccgcggtgctagatggatttagcgcccaggtggaggccttgcgagcggaacgagcggagctcgaggccgcatgggcgcgcgtcgaggaggggcggcgctcggtggacgccatggtggaggtgggccgtaaggcccaccgccgccacatctcggagctcgaagcccgcaaggcggcgctggcggagatcgcccgagaggtggaggaggagcgagaggccgccctcgtcgccaccaccgcgatgatcgaggcgcaggactccctccgccttcaacacgggagctgggaggcggagctgaagaacaagctcgacgccgcccagggggtcctcgacgccgccgccgcccgagagcagcgagcaacagaggctgaagcggcgttgcggcggcgcgaagaggcccttgaggcccgtgccatggcgctggaagaacacgccggcgccgtggagaggggcttgacaggccgcgaggccgccgctggtctccgagaggcgacgctggtggcgcatgaggccgcctgcgccgaggaggagtccgcgctccgccttcgcgaggatgcactcgctgagcgggagcgagctctcgaggaggccgaggccacgacgcaacggctggcgaacagcctctccctccgcgaggcggcgcaagaggagcaggcgcgccgcaaccttgaatgtgtccgtgccgagagagccgcgctggagcagcgggctgccaacctcgaggcacgggagaaagagctggccgcgagggcgcctatcggcggggcggccgcaggcgaaagcgacctggccgcccgcctcgcggctgccgaacacaccgtcgcggaaatgcagcgagcgctggactcctccaccggggaggccgaggcccttcgcttggcgggcgagattgggcccgacatgctttgggatgcggtctcccgcatgaagcgcgccggtcggcaagcgggcctctggggaggccagtcgtcggtgccccccaccaatctggaaggcctcgctccgcacctcaacaggatggcttgggttctcgagcaactccccgaggagcttgagaagaccatcaagtcatcctcaagggacctcgcgcggggagcggtcgaactcgtgctggcgagttaccaggcccgggaccccaacttctctccatggatggcgctggaggagttccctcccgggaccgaggacgacgcgcgcgcgcgcgtccgggatgccgccgaccacatcgtcaacggcttcgagggctcagcccctcggctcgcgttcgcccccagctccgacgaggagggcgatgccagcggtgaggacgacgatggcgacgaggccggcgacccgggcgcgtcagaatgagcccccgagcccccgtcaatctttacttttttctttttctttcttctaaggccttcatgcctcttttgtatagatcaaattactctgcaatcaaaaatgatgaaacaatttctatgttaactttattttgctatatatataagttgaggatgatctgtgccatggtccttttgcgccttagcttgaaataagggctcgcgcccaagtcccggtcctcgaatggctcgggtcggggctagtgcctggggagatccacatgtcgagactggccaggccgggaacgtggtgaccgaggggtatgggtaacccgatcgtgggcttttgccgattcccccccggagttcaccacaccccggggcacggctcggttctgggccccgtttggcgatttttgctgaccgaaccgaacccccgagggcaaggttgagcacgagtgaccttatttcaagttaagattctttagaaggaaaaacggcacagacacaacctttaggaaattgaaactgcttttattgaaaagctgaaataagaaaaggaatatatgtgcatgtgtggtagcccccggccaaccctgcacacccgaggggggtgcggggttggcccgagatagaaacctgacacccgaccccccctttcaggggtagaagcggcgaaggtgttcgatgttccacgggtttggcagctccgtgccgtcgcccgtggccagccgtaccgagcccggccgggggacaccgatcactcgatacggtccctcccacattggtgagagcttgctcaatccagcacgcgtttggacgcggcgtaggacgaggtcgtcgacgcagagtgatcgggcccggacgtggcgctgatggtagcgccgcaggctctgctggtagcgcgcagctcggagggccgcgcgccgccttcgctcttccaagtagtcgaggtcatctctacgaagctgatcttgatcagcctcgcagtacatggtggcccgaggagacctcagggtgagctcagatgggagaaccgcttctgcgccgtagacgaggaagaaaggcgtttccccggtcgctcggcttggtgtggttcggttcgcccagagcaccgctggcaactcctcgatccatgaatcgccgtgcttcttgagaatgttgaaggtcttggttttgaggcctttaaggatttctgcattggcgcgctccacttggccattgcttctggggtgggcaggtgaggcgaagcagagcttgatgcccatgtcttcacagtagtcgccgaagagttcactagtgaattgggtgccattatccgtaataatacgattaggcactccaaaacgggccgtgatgcccttaatgaatttaagagcagagtgcttatcgatcttgacaaccggataagcctcgggccacttagtgaacttgtcgatcgcaacatacagatactcaaacccgcccggggcccgtttgaacggtcccaggatatcaagcccccagacagcaaatggccatgacaatggtatgatctgcagggcctgggccggctgatggatttgcttggcgtggaactgacacgctctgcatcgccggaccagatcgactgcgtcattaagagctgtcggccaataaaatccttgacgaaaggccttgccaaccaaggtacgcgaggcggaatgggctccgcactcgccctcatggatgtcaacaagaagctcaacgccttgttcctgaggaatgcacttcaggaggattccgttagccgcgcgccgatagagggtcccttctaccagcacatagcgtttggaaatgcgttgtacgcgttcactcccttcgcggtcctcaggtagagtcttatctgtgaggtatgtttggatctcagagatccaagcaatcaatctaagggagcttggagcgctcccttcgggtcccgaggcctggactccgacgggcctcgggggccggttaggcgcatccgtctcccctaagggatcgggtcgcgccgatggctgggtaagcctttcttcaaaggcgcccggtggggtctgggctcgcgaggacgcgagccgtgagagttcgtcggctatcatgttatcccgtctgggcacatgccgaagctctattccatcgaaatggcgctccatacgccgcacttggcgtatgtaggcgtccatctgtgggtcagagcaccggtactccttacagacctggttaacgactagctgggagtcgcctaataccaagaggcggcggatccccagtccagctgccactctgagtccggcaaggagtccctcgtactctgccatattattagtcgctcgaaagtcgagacggaccaagtatctgaggatgtctccgttcggagaggtcaacgtgacccctgcaccggcgccctggagagacagagaaccgtcgaactgcatcacccagtgggcggtttgaggcagctgtgaggggttcgtgctggcctcgggcattgagacagtctctggagccggggtccactctgccacaaaatcggcgagggcctggctcttgatagcgtggcgtggttcaaagtgcagatcgaactcagaaagctcgattgcccattttaccactcgtcctgtaccctctcgattatgcaagatttgaccgagggggtaagacgtaaccacggtgacccgatgcgcctggaaataatggcgcagtttcctcgaggccatcagaatagcgtaaagcatcttctgggcctgtgggtatcgggtcttggcgtcccggagggcctcactaacaaagtagacaggcctctgcacctttcggcggggccgatcctcttcgctaggggccgtatccccggggtgctcttcgtccaagtggcctcttggggcacactcgtctcctgcgctgatgacctcggggtccgaagatgacaggtgcggccttcccacagtggcctcggggccgtcccgggggtcgggggctcctggcgttgtcagacaagcgggcaaagggccagctccggtcgtcaggggcctcaggcctccgttcggctcgggggcctcttctccctgctctctcccgggtcgaatctgcacagggttagcctcggggtcaaagggtggtagatgcggccttcccgcagtggcctcggggccttcctgagggtcgggggcacccggcaccgtctgacgagcgggcagagggccgactccggtcgtcgggggccttaggccaccgttcgactcgggggcctctcctccctgcctgctcccgggccaagtcggcacagagtgggggtgcgcagaatgaggattgtcctcatcgcgctccacaaccaacgctgcactaactacttggggggtcgccgctaagtaaagtagcaggggctcatttggctctggggcgactagaaccgggggagagctgagatacacctttaactgagtaagggcatgttcagcttcctccgtccaagtaaacggccccgagcgcttgaggagcttaaataagggtagcgccttctctcccagcctcgatataaaacgacttagggcagccatgcaaccagtgacgcactgcacatccctaagtttgctgggggggcgcatccgttctatagctcgtatcttctcggggttggcctcaatgcctcgggcagagaccaaaaacccgagaagcttgcccgcgggtacaccaaacacgcacttatcggggttcagttttatgcgggcggagcggaggttttcaaaagtttccgctagatctgaaagtaaagtttcttggttgcgcgtttttacaaccaagtcatcgacatacgcctcaacattacgtcctatttggctacccaaagaaattcgagtagtacgctgaaaagtgggacctgcattctttaacccgaagggcattgatgtataacaataggttcctacgggggtaatgaacgcagtttttttcctcatcctccctagccatgcgaatctgatggtaaccagaatatgcatctagaaaacacaaaaggtcgcaccccgcagtggagtcgacaatctgatctatgcgaggcagggggtaaggatccttaggacatgccttgttaaggtcggtgtagtcgatgcacatccgaagcttgccgttcgccttgggaacgaccaccgggttcgccagccactccggatggatgacttcacggacgaatccggcctccagaagtctcgccacctcctcgcggatgaaggctttacgttccggggcctgccgccgcactttctgccggaccggccttgcgcccggccgcacagcgagacggtgctcaatcacctccctggggaccccgggcatgtccgctggtctccatgcgaagacatcagcgtttgcccgcaggaaggagacgagcgcgtcttcctatttgccatccagaagaccaccgatccgtgtggtcatggatgggccgtcgcccaaggcaacctccttgaccgggacctcgtcgcatgtggccatccgctgcctcggggcggtgggggcagaggggccaagcctctcgtcaccaccctcgggcttggacgcagcagcgaggcggtcggcgcgctgctccatgcaagcgagcgcgactttaaggtcgccatggacagagatggggccaccggggcccggcatcttcatctggaggtaggcgtagtggacagccgccatgaacttcaccaacgcgggccttcctaggaccgcgttgtagggcagactgaggtccgccacatcgaagctcacccgctccgtgcggaagttggcgggtccaccgaaggtgaccggtaggtcgatgtgacccaatggccacgtgtgccccggcgtcacaccgatgatcggctgggacggtcggagcaccatccccggggccttgatagcatcaaaggccgcgggggaaaggatgttgagagccgctcctccatctatgaggacacgtcccaacttcacgttgcagatggtgggggaaactaccatcgcaacctgccctccccgggcaatgcacggtgggtggtcggtctggtcgaaagtgagagcaacctctgaccaccgcgcccgacgcatcgcctcatgagtaggggccatggccagaagctctcgcttcatagccttgaagctccggcgagagacgtgagcacacgctcctccatcgacggtggcaatggtggccccaggttcttggaaacctaggtcatcgtcaccatcatcgatgtcaacagcgggggccatctgcttggcctcacttcgccgtttgccggaaggaaccgccggggacttgccctcacggcgttcctgtctcctgtcctcctcccacttcctcgttcgctcagccaggtttttgactgcacgacagtccgcgagatcgtggagggaggtgttgtgcacggagcaccacctgccggcggggcgctccctgctgggagtaccagcctctttctttttgtcgctcgcaggcctcccctttcgggtggcccgcggagcgccctcgacggcgaggacatgaccctcgtcgccggaacggtccgacctcttcttcctcctcctgtcacgccgccctgtctgagcggcagatccgggggcggccgaagctgccactccggaaccggaggagttccatgtccacgcttcctctttacgagccactcggtccgcgagctgaaaaagctccgcggtagtctggggctctttggaagcgatcttttcgagcatgcggttgtgccgcacgccccccctgaacgcgtagatcaccgcgtgtgcagggatgcatggtatagtattgcggacttggcaaaaccgctgaatgtacgagcgaagcgactcatcatcgcctcgctgtactgcatgcaagtccgcttcttcgcctgggcgcggatatgtgccttggaagttcatggtgaactgttggcacagatcttcccaggagtggaccgacgcgggtggcaggttcattagccaaccccgcgcctgtccttttagggccatgggaaagaagttcgccatgaccctgtcgtcacccccagcggcctcgatcccggtcgtatagacctggagaaactcggtggggttgacgctcccatcgtacttctcggtgatggtgggccggaaccttgggggccaacggacattccgaagactcgccacaaaggctctacagccgacaccaccagccgggggcacggagggctgatcctcacgtccatgtcgaggtgacactctggacgaggaggcgccctccgttgcacggggagtacgccggctgttacgccggcgctcgctgttgaggcgggcatccggcttctcatgctgatcctcccgagtcgacggtgtcgacgagggagtggcagccgaatgacgtgcagccgccgccgctcgccgcgccctccgccttgatgacacggaaccggtggtggcggcgccggaggtcttggtggtggtggaccgtccaccagcacccaggcgctgctgagccgtcatgaccaagttggccacatcttccagccatcgttgggctggagactccgggtcatggacgacaggcgggtgtcgtaagagcgcgccagcagcctgaagcgcaccctgaggcgtgctgccgtcgccgtatacgaggaggcggcgctccccatcttgccgtcctcctgcaccacccgcgactggtgatgccatggacttgtcgaccttctcaagcgcctccccctgcttagggctttggcgcggaggaggtgggggagtacgagctcgacggcgtggattcggctccccgtcgtcgccgctcacactcggagagaggtcgtgcgcctttgcttgctcggccattaggctgaacaagggaaacttggcgcccacggaagagtctgagagctcagaaaacacacgctgagccccctacctggcgcgccagatgacggagctcgtggctcctcaccgggagaccgcgcaggcccccctttgccggttcggccgggggcttagggtgagatctcaagctctcgctgtgtgtggaaagattactcgcccgcaagacacacgagacacagcgatgtatacaggttcgggccgctccgaagcgtaataccctactcctgtgtttttgtggatttgtgtatgaatgagctacaaagtgtgtccacttctcctccgctctaggctctaaatctggcaagaatccacccacctctctatgggcaaggtcctccttttatacttcaaggggataccacatgcacccttccctttccaaactggactttttcttctttacgtaaatggacggagatttgcacggttgccctccaaacgtccttctgatgggacggcacatacctacctccacttctgccgggggcaggcgcgtcgcgggaacgtggctgtgagctgacgacctgagcagtgtcagaccggtcacaaatcggtcattcttgtccaccgcgtgtcagcttagcaacgtgcatgtttgcccttcttcacacaacatcttgcctgtaatggttaggatgaagcctggtataaatctgaccagggctaacgtgccatctctaagagataacacgctagctccggcttgagacgagttgcctagaggctttcgtcttgacgggatggggcaaggcgtgcgtcagaccgccagtcgccacctaacccttgatctgaccggtctgtgactggtcacagaccggataaaagagcgtgctgtactgcgttacatgcagcgtgacacgcttgaccagactgtaataaatgctgttaggtgagcacagctgtgctcacttatcccatatatgtggcgcagacttctttaaggggtcggggtgcctcggccctcggggccggggcaagcgtaacccgacccccccccctcgggggaaatcaggaggagggcggacacctcaccctcgggcccgacgtccccgaaggtgccaggccacgtgggcgattgcgtctgcctcaagcctctggtcatgatactcccggtcccatatcaccgacaaagtgtgatttatatcttatacatttgcataaaatttttgaataagacgaatggtcaaacatgtgagaaaaaaaattaacggcgtcatctattaaaaaacgaagggagtatcattctcatctaaaagagtaaattccctgtgtacccctgaaaactcactcaatccctttcatacccctaaaatttacccgatcccttctatacccctgaaatttcaatttgatccctcccatgcccctacccttaaaatttacccgatcccttctatacccctgaaatttcaatttgatcccttccatgcccctaccgtgaaatttcaaattgatcccttccatgcccctaccgttacattttccatcatttcagtgttacgtttggttgcaaatgtcctttttgcccttgatgctttaggtttaaatataagcttcaaaaacaattgaaaattttgtttgagtgcacatcgtgtgcattttataaaactaatgagactaaataattagtgcagaaaattttgacataaattttgaaaataaaataaatgtaaaaaattaaaatttttatttgaaattttaataggacaatggattttttttatcaggagcattcataaaaaaaaatgttgtgaacattggtatacctatcttgctcctcatttttatgacctttttttaaaaaaataaatacgtatttttttatttcattatctaaaaatatttttttgataaataatgtatcacataacaaactcataactataatagtctcatgtgagaagcttttatatttttaataatgtaatttatgaatttctttattcatccaagggtaaaatggtcatttttatagaaaatatacggtcaactaacgggaggagtatgcaagggatcaaaatcaaatttttggggtatacaagaaagtaagcaaaattcaggggtatttcaggggtatataagagatctgtttcttatcattctgaagcagtaatcataaaaataaattctggcaaatttagtagtagctctttcgtgattggttcatttcgtatttatatgccatagtcctataatttccatctccatattttgctctttgagatatggaattctggcaaatttattagtagctctttcgtgattggttcatttcgtattatatgccagtcctataatttccatctacatattttgctctttgagagagatcattagattgtatggcaattctatgattctatcactactttgaaattaaccactacgcatgtccttaatctttcatttgctatgtccagactccagaaattgtttacatgattttttactgcatctgcatgcaaaaaatagccttttttctcgtttaaaattgccaaagttttttattattactgatgtaacttctggcttatcgtaatctctaaaacagaaaatcaaaggaaaacaacttcggaagatgaacgatagacagataacgtagctcaaatgaatcaaattgggagctgataacaccgaacaaatagggacacataattgaacacagctaaaaactactgccgagcacaattcatcctccattaagcattgaattttgatagcaaaagcatggttcaccagtgaagtaaccagcaacctatggctgcgttactacatatcaaaacatagtaggaagcatagtctttcctcaagtgttttcaacttaactaaagaagaaaagctaaaatcccaaacatcatcactctagtttcctgcgcaaagtctggtattgatgatagaagaggtgaccgcatcactcagtcaaacaaactgaagcccatgtcctgtaaataaatttgcaaacagttaaattagttaccattaggtgtatttgttctaataaactaaacatgaatgttaaatggcaataagaagcatagcagaagcaacggtttgcaaatcatacgatattatacattgaatagaagtcatgtcaaactaccatagacataatgaatgagcaaaatatgctaattgagacaaataagaacattggtcttacatcatcactttcttccttctcttcgaccttatcttctttcttcgcctcagctgcaggagcaccaccagcaccaccggcagcaggagcagcagcagcaacagctacaccaccaccaccagatggaactgaagcaaacttctccctgccacaagcgatgagctcagtgatgtccttgccactcacttgagacaacaggagttccatctttgcattgtcgatttcacaaccaactgccacaaagacaaagattgaggtcaaatttcacagtacatacagctataagtggatgactattacttcaatattatatttaatgaaagcacccaagaagataagaacgaaaccaatcaatctaaatatagtctaacatttagaaaggaatgcaaaccttagaatggtaccttctaatttaacgattaaatgctaagaaatttagaccaaaaaaactgctttctgaagccatggaattagccagattaagcagaagaaaatgtagacaccagttaagcagatttattggctagattacattttctgaacagtttcaaatatggacataaatcagggagatgaaattacctgactccagaatcgttgtcaaatcctccgcagtggggctggagttgccagccagataggccatcagataggcagaaatgaacttcatcctgaacaaatcaggacgaaatatggtcagactatgtaacttcaacttaacagatggatcatgatttgtagaaactcctcatgtatctaaacaaccaaggtgactaacaactatcggtaagcatgttatctcctaagaataaaggacgaacataggtgacaatgaccaagactgcgatgcaaagtctaaacagataaatggcattaactagccacaaaataaactatcacagcaaaagaatgaatctaacatataacactagcatgtaaggacaaagcaagtaaatgagcgtaacaaccaatcaggagagatagaatgcaacatatacaagtttgtacacatcccgtaaacgtggaactacatattcagatcctaaccatacttttgtccatttcatcaatacggaaacaaatattctatgattcacacatgaaactgtaacattaaaaaaacagaacatttcaagtaaacccaacgcccgctgctgcattcgatccaagaacctactgccaacgcgtagaagctaacactaacgacagcaagaccaattatctcacagcaaaaggatcacagatcgcagcactagcattagcgaagcacatttccagcacccgtcatcattccatcaacaagaaaaactctaccaaatggcaacctaagagagggagagatccaaggggggtgtgccgtttacctggatgggagatggagagagcccgacgagcggcggcggagatggctgcggcggcggcgcgctagggtgagctctagggtttctgcggtgaagggtttctcgcgctgcggggccgcggatttatacagcgcgcggccgccgcgggacgcgatctgcgccgtccgttttccatcggaaggcggggactcctgccctagctcaccctcgtcgaatcacagccgttgatcggggccgatggatcgtgggccggaaaaccaggcccatgggcacagacgtgtgggcctatagtagcgaacaaaagcccagaaggcccacaggtggttcagggctcaggtcgtcgtcgtcctcctcctccgatcccctcgccggcaaacggcgcgccgccgttggtcgccggccgccgccgtccggctcctctccgatccatttttggtatccatctctgcatttgattcgttcttttcgggcttcacgcctctgctcccgaagtcggaggctaacctgtattgtatttgttcctcttgttgctggagggagttgattcgattttgccgcgtcggattgctcgccggcgtgaaagcttactagggcatcatggacggtatgcacgcgcttgccctcttgtaatcccctttctcctactgctctctggttattatgtgttagtctggggggagtagaaagaacagtttttattagttaggggtataatttgtgtcttagctgatagaatgtgcagttggtgattagtgcggacctgggttgattgtagttgcatgacaggcaatttagtggtaagccgagttaattttggatttaacaactgcaactacaaggaaagaactctttttttgcactgataggcgatctgaattatagtgatgtgcagtgtgaaaatcactttgaaattcattattgtcagcattgtcatcctgagtagattgccaattatatgggtttggaggacaataaggactaagctctccagtccatttcttgtcttgaaaaatgaactccatatcatcctacagaatatgatggtaactttaataaaatttgtgttgttatctttgtattgtaagaaaggatgtaatcaaaatacggtgaacaaagcccttatagagtcagtccggacatgttcagtattgcagtctcatcgtatagtatctttttctcaggtgcctcttaagttttttctctctagtataatcttccattgggctttcaacttctggaagttgtgctgatttgctgcacacaatgatacccgagatttgttgattagctcagttggtgtctttgctctatttcccctccattcatgtaaatgatatcaagtttggtggaatgctggtaaaaatcctcttctagctgcataaccaataaagcatctgcaagatactacttacctacatgacattacaatcataactaatctcccaatatgctgtgtattcatacgtaatagataagagaatccagccttagattctaactttgtgatcatgtatggcttctgcttgtgcccgtgatgctattgtttcatatctgtttcccaatagtcgataaacaggaaacaatggaagagaccattctcactggtgatgatctcatgcgtgagccaccatcccctgccataccaaaagaaattgcctcgcatgtccttcaaggtgttgagccctgtgatggtatactcaggaatcttttcttatgtgagttaactgtttctgtgacatttaaaatcgtgtttctctttctctgtgtgtggaagtattattgcaaaaatattatacggcacaggcctgcaaatcaatgacatcgagcctttttgccaagatgaaattgtgttttaccgacaatgtgctgcaaaaagggtaaggttatgttgaactatttgaaactgcaagtggttttcccttttattatttaatatgttgcttttatatcctattttataggacaaggaaataagagagaagatggtagacagtgaatataaactgcgcatttcgatgcccctggaagaaggaaaggaaagaactactcaactccaattggaagtcacattgcttgaaaggtaacctaactaggattgcttcccccctatatatttccgtagcatcattctctgcttagcagctcatttttatttatactttctaaattaagcttcagtgaacccaccgaagtgttcaggctataattaagagatgatagcacactccaattgtatatgccttcgttctcccacatattttcttgtattaacaccaaaggaattattctgcatttctacctgttcttatagattttgatgagagcaaaggggttaaaaatgatactgtaaaccacatataagtagaagtcatgtagacaaacaacttatatacactatactccagtaattttcacattgagagccctaggtgtttactgtttagttaagttaagccgatgctctgtgaaacacttgtaaccaatactacgcattctgctgttctacaggcatacgagacaatgagtagcaccagggacaaagccaagcacacgttaaattgccttgtgaccactcttcagcaccgtataaaatgatttacagacttttgcttttaagaacactacctattgcctacagactttttttctaattgtattgattagattaaactggacaaaagaaatcatcaggtgtactgagtttttgttaataattcatcggcatgatttcatcagttctgcttgtatgtagtctcgtacttctgtaggcgcatgattcttgctagtgggcttgagggcatggagggatttcgccagagatggagcttgcatggacagctcgaggatacgaggtattaaatcttgcattgttcatgtgtttttatcatctctgtcatagtcgaatgggctcacttgtaacttgtgaacatgtacttcaaatattgacaaactagtgaaggaatggtgcttaattattgtgttatataatccatatgcatttgaatagtttctttattcacatccagatgattggtttgtattgcaatatgtaaacatctgaaaataaaggccttgtcaatttcttttacttcgcaattaagaatattcagctatcatctgagacagcaagaaatcccgactaggcctaaggggccttatcccacccatgctctctctctctctctctctctctctctctcttgaaaagagggcaaaagttttgcctcgtatgtattgatagagcagaatgaactgttacaacatatttacacccatgctcattaggatattgaacaaattatacactgatacgttaagtgcttcttgaatggctactccagatgaaaatttcaattgtttgagttcagaaatgggcttacatcttcgtttttgcgtgtcaagtttgcgttttcgctgttctgtttttgtctttgcaggaaaaggatggaagcactggtccgtgggatggagaagggagaaagccaaaattctcaagcgcaagggagctaagaagaggtggttgttttggtaggttagcacattttttttctaattgcaaaacagagcagttgacagtatattattggcaatgccatgcactggttccttcacctcttcaagtgcccttcctcaaaaccaaccactgaatcagtgaatctgctaatcaacggatttgcttacatacattacatactagctccgagtgaactgacgcaattttagcatattcttgtcggaatgtaacagagataaatgggctttttgatggcccagtaacactcgcttcagctatgggctggttcttcattggacttgcaagacctctgcaaaattaaatgtggcctttccctgaaggcccgcctgtccttgtgttcttttgcaaattgcaattgggccttggaagattatgtcgtctcaaaatatacaaggttacgaatttgctatatatttgtcgacaaattttccaccaaaaatttgacagatgtaattataatacaatcgtagtgtaattacactgtaactataatgtaacatgtatgtaactttcaaaaatctctccataacgtttagagtaaatttcacaaaactacacgttttgtggtccaagttgcagaaaaccgcacacactttgatacttgacacttaagtacatatattttggtagtgtagtttcacaaaaccacactatcaatggatagattcacccgcgaaatgacgcggttggttcacctaggacaaggacatggcatcctattaccagcctcgcacgaaattaataggatgccacgtccatatcctagatgaaacaaccacgtcatatcatgggtgaattcattcattgatagtatgattttgtgaaactaaactaccaaaatatatgtatttaagtaccaagtgtcaaaatatgtgtggttttctgcaacttgaaccataaaacatgtagttttgtgaaatttactctaacatttatttcggtaaaatggaggttgtgagaaaaaattctttcacatatgtgtgtgatgtgattttttttcttcctcaccggaacaaattttataatagatctaacgattcaaaattacgtgaaacttatatacaagttacactgtagttacatgcaagttacagtgtaattacactacgattgtactataattacatctgtcaaattttcaaatttttagaagaaaatttgttgacaaatgtataggcggtcccacaaggttattaaatcttgaaagaagagatctttttgcaactaaaataaacaaatcctaaaaagcatctctatgaaagggtacataatatatacactgcactattttgttgccaaattggagaggggaggaaatgccaccataattctttttcagccatattcatgcaataaaacctcgttctttttttttcatgagcttttttttttttcatttttcacaagaatgagaagcgcaggctcctatttattgcacactccaatccaatgaggaaatgacgatatgttgctgtcagtttctcctgcagtctggctgcgccgtccctcttaaattcagcaacctaaacgaatttcgtcctctctaggcagactcacatgaatcacctcacaatcttgagtgaccttctgatgaactactgaccattcctttatttgggtagccagcgtttacgtcttaagtaactttacggtgctctttgttggtaatattctgttaccagcgtttacgtcttaagtaactttacggtgctctttgttggtaatattctgttaccagtattattattagtagaagtgatttatgaattcataaattagtaaccactgattcatgaattatattatcaatagaattctttttttactaccagtagttgatgtggtagtatatatagatttgatccattggattagatgaaataaacagactaaaattggttgtactaagcattgtaacccacctcttacgttttcgattcgaaaatggtgcaaaattatgtgcctggagagaaagacccaacctgtccttgatttgggatcaattcctgtcctgagaggggaaaaatatactactattagtactagtggtacagtagaattgaggcaaaccatgcactctgacattcttcagtgccacttgtggcttgtgaatgtgatggatttgatttactccttcactaacagcgaggaaattcctcacttgccatactttgcactgaatcagagcactgtatccttggcatttctgatctctgaacaagaagcagtgattcattctgattttctgaaggattgtctgcctcgtgcctctgccctgcaaaacctgtagtagcaaatgaggtccactgaagctttcaattctaatgaagatttgggcagccaatttagagcacaccagtgcatgagaatctcactactgatgcagcgaagtaagtactgctctacttaatcgatcactggcaattcaaattatacatgtgtgctttgcttggcctgaacaatgctttgaaacattcccagcgaaaatggttacagctgtgaggtcactctctgaataactaaatgatcctgaggtcaggtggtcctaaccccaaagtttagccattgcctgaatgcctgacagttcttgagatttcaattcagagttaatgtgagtggctggagaattgagagcgacctagctttgctttgggagctcgatcgatcgattcaggtgtcccctctgaaactctgacagctgagaatttccttgggcgttgctcaactgatttcatggtagatttttgcctgtaaagcgacacatataggacgaattttttttatttataattttttttattaaaagttttacaaaaataattttccattttgaaaattgacggaagtagtcgcctaccgccctctgggagggcgatttttaaaaatcgccctcccagagggcggcgaaaataacgtggcagccggccgttcgctctcgggcgacggccgtcaacgaaatttgcaggcggcccccttgccgccctccgctagggcgattttgtactgtgggggggggccgcctgcaaatgggcggcgggggggcatggaattttgcaggcggcccccttgccgtcctgggggagggcgattttatactgtgctctatatttttgtataaatatcaatagttatcaaatctttttatattgaaaactatacaagattaaaatctccaagactggtaaaatacaattttattattttttagggcatatttggattgttaccgtacaaatattttgttagtgccaaaatataagcaagttttggcactaccaaatatttggtaaggtaaaattgcatttgatcatatttggtttgctgccaaaatgtaaaattgtagtgaagaatgttctacataatctcaaatctagattacgtattaccaatgaataggcttccattttcgtgtgtggtgtgctagtgggaaagaagatatgaagaggttgccttcagattgtcaattatatagcgtcgttttcactgcaatatatgtgaactcaatgagatacattattcattagatgtgacaagacgatcacgcgtgggcgtgattcactttatgtcaacaggcagcgccgaaagttgatagtgataactcgagctgccgcttttcatgtgtgctgttgtggactgtgcgcgctactggatctgacactaccgtgaagcgccgaaagtgtgttgtcgtgagcataagttgttctagcaccatatgaatgaaaagaactatgtagacgagacaaacacaagtagtactgcagtagtaatagcaaaagtagtactgctttacaagtttgtaagccaaaagaaacggtcacataaggactgaagaggtagaacactactgacgaggcctcttacccctgtccctcctaccctgcgccctaatgtgcccctgggagtacgtgagtcggtccgggggtacggcacggccaacccgtcctgcctgtacaggtgtgacctctggctgctcctgagtgtgcgcctctggagctcctccaagctgagaggagcctagtacgtcgtggtggtgtgcactgtgcaagtcgtcgtcgtagaactggctagtaggaccagtcctaccggcgtgagacgaagaggccccagtaccgaagatcccggctgcaaatcct

SEQ ID NO: 15373 - DNA, 591 bp, Oryza sativa
atattcacttcattccccgtaagccggccaatgggatttagggaaaccttggccccggaaaccaaggaaccaaattaccaaaatccaaggaaccaaggtatgggccccaaaaaacaagaacccagaaccaccattggcaaggttttaaaaccttcaaggaaagattttgttcctttcttttcccctttgttctttttgctttccccgctgaactttaattttttttttgttaccccttattttcccaaaaccccttctttccaattatttttttcttcaaccgcattgcaccgggcttttcttttcttcaacggaatgtacttgccgctttccacatcgtgaaccaaaaggacccccgacttgccccccctttcattcccgaatccgccaccggttcggaaataatgattcttggcgaagggcgcccggcaccaaactacccggggcggtccatttttttccttcccttcgcaatggcttggcttgtcccgccattttctcattttttcatggatgtcctggagttctaccatcttcatattgcgcatttaaccccaaatggcgtattacattggccatctttccacacct

SEQ ID NO: 15374 - DNA, 7952 bp, Oryza sativa
aaattgggaatacctccctgatatcccccatgatttataggagctccaaaaacagaacctcccattctaccagtaaaattctctccttgagtaaacacagttggctcaggtcgagtggtgtcaacacctgggccactactgccccccatttgacaaaacagactcttctgattcattggtgcagagggtatcacaacgttgggttcgatttcaaaacgtacctcaggtgcagtggagggaaaaaccactccagtactcggcccagcagcgtcagtaccctgtcccgttgatcccttaactgctgtagtagcatctgctccttctccaccctgatctgccattttcttttgcttacagagttcacgcagcagctctttgatttccttgacctcccccttgagcgatttcagatttgttacctcctttttcagggtcaccatgtcagtcctgaactcgttcatctcttccaaatccaccatcgattcgctggagcgcgtcttcgtcatcttactctacaggattggtttggaacaagttcctccccactagatcctatcagagatgggtttaccaccgccaattcttagttgcgagctccggagatttcataggggcacacaccttggtggctcccaaacccttgctcgagcaaccaagaacaccaccacgcctccggattgattctgcccgggttcaggaattttacgatggatctcaccgccgccttccaccaaccctcaccggacaagatcaagagccaagaatcgtgcttgctctgatacctctgtcaagaccctgagtgcgaaatggaagaaacaagggaaaacagagcagcgattttagggttctaagctactttagctaatcctaagacaaagtaaattgtagtttgcgttctgttcttctccagggccaaaggcctccattagtagcttacaattcaagcattacatccagctgtaaaaacataaagacaagaaaagtagcatcaaaacagcatctgaagcgtgattcctgctaaaaatgaaaaatgacaactacagtggtccccaagtgatctcgtccatccgatctcccttttttttctccactgccgttggattcattacttcacttctgaatcgttctctgaacattctgaacttctctgaattcccttgtctgaatttggtccagaattccatttccctcctatgctcctgacagggggttcgacgccgacgccgcgctccctcctggccgacgacctcaccgcgcggctgcgggcagggcagaggctgggcgaggaggccccgcacaagcgcagcggccgcgaccgctacgtgtgctccgggacagcgtgcaaccgccgcagcaggccctcaagcacggcgccaaggcctactacgacggcccggcctagttcttctgttcagctggatttggtttactactccgtccaggttcataatccttgatgttttagataatgatatggcctctaaaatatatctttgatgacgattttgttttatattatgtaaagagttgaataaatatataattttattaaaaatactttttaatactaaattatacatcatgctatagtatcttcaaactaaatattttaaaaattgtaattgtctgaccttattcaaaaggtcaagaacctatggaaccagaggtttcattaattctcatttctaagataattttaatgaacgtattgtgcttgggtagattgaagcccaatgttaagattgcagcatgaactagattgaagaactaagattctataggatacaattttaacactttcctctctcttttttttggcaaccatgcatgtatatatacgtgctttgtacatgtacacactttttttattgccatattcctcgatggcactatacacaactctcaactttccactctaattatggtgcagagatctccttgggagaacttgcacccatgcatcatttctgcacattttcacaaatcacaatctaaaaagaaaagaaatagaaaaaaaacagtaacatatactgcaacttatgctagtataatattcacagttgctcaatctgcatgcataccacaattaatctaccaacctccattcctaccacctaagcaagtcttcacttgctttgcttccatttgagttgcttaatttcttctgttgccagttgccaccttgcacttccatcaccatgatatgattcatggtgttgcggtcgccggccgacggtgatgcaccgtgcaccgcagcggggaccgacgcggcgccaccgcgtcggaatcagccgtcgtcgcctgagagaagaggacgctcatcgccgcctgctgctgctgctggtaccgaccggagtcgccggggaggcggaaataggacgacggcgacggctcgtcgaagaagaggtcaccgacggagacctgcccttctttcctgtactgcacgatggccttgtagatgaacgggatgaagccttccatgatcagaatcttcagaagctctgtactgaaattttcagaaagagagtttaatttgctggcttcagagagatggagagaagttgttaggacacttgagagagaggttttctttgggtggcaatggaaggtgatgtgggcttaaaaagggagggaaagaagcctgaactggatagagaccaaaatggagtacttgtcaaggatctaactgaaactactagtattatagctaggcaatatgctaatgcaattattaattttcctcttgacagacttgagcttaactctgaattaaatgtgtcatgttcagagacacagggatggctttcaggttttatcttgttaataaatagggtttgtgcactgggatatttcctgcaaaaaagaggccaagacttgaacgcaatgggtgtttcagtcttagaaggcgagttttacaggtggacagtgatgtggtgagtgcagggatttctttttctcaaatttaacccttggaagcatgcatatatgggttacctgctacaaaagaaaagaaagctccctctttcagatcatgattgagcatcaagatgaagttttttttttaatctcatgttttccggtggcgtaatcggttggaaaacaagaattttcgcttcgacttgcgtcactccagccgactctgccaggttaagccaaggcaatcaatcaattcaggtgatgacttctgaatcacttgtttttgagttgttgcataccaaggatgattagagtaaagaaaaatttgcagttcgtgtggctaagagagaagaatggaaggacgactgcagaattgaccagcttaaagtaagaggataggttttgtactcttgtttatttgatcgtctggaagacggaagatgccgatcagacgacagttcatacggatggatatttcatcggctgccagttgtgctgtgtcagcaacaagctgatttatcttttacctggatagctgcatctgagaagctagatggcattttaaaattggcactgatgtgtttgtcccaactaactgtatttagattgggatcaagagaccacagaattcagctaggttcacaatttcggttcaaaattcccgaaacattgggtctacctgaatttgtttagctttagaaaataaaaatggttcaaattcagtgaaaacctattcaatcttttttatactgaaaaaaacagattcttctgaaaatttagaatttcaaaactattttgcattcctaggttctgagccctgagttcagctaaaaccggatatgcccgtcgtttgtaaaaccccaggcttgagatttcgcatcaagattgcatacggccgctttctttgatatccagcatactgtgcctgaaacagttatctccacaatccacatgccgttatctgatctaccaacttaggacttaagagcgacagtttcgcgagtagtaggaatgattatcccgtgggtgatccgttggtggacaaggtttttctgttggcgctgccggaaaatgcagatagttggtactttttggcggtcgaactcgacgtcgactcggcaccaaaaacgggaggacgaactgaggaagttgcatcctaggcgacttgcagatatattttttaggctctataggctttaccaggacgccggatactgcctgttggatgttggctgatggatggaggatggaagaaacagttatgtaacagatacatgaaacggactgcaggtgtgaaacagttatcccagtctaacggcgacaaagggctcatctgggatgaagccaaggaaaggcactagtgtactattcacttcatccagaagtcacgtgtttattttatcgttcagatcaataagaaattactccctccgttccttaatataatggatttttgacattttacttacactgtttgaccaaaaataaaaagttgtgcttaaagtactttggataataaagtaagtcacaaataaaataaataataattctaattttttaaaataagacgaatggtcaaacagtgcaagcaaaatatcaaaatcccttatattaggggacggagggagtaacttatttcacatacaacaaaaccaagcattgtatgtctgtacgcatgtatgcaactagcgagtattaactattaagatgactaaatctggttaacaatttaatctatcattacacaacctgaacctcttcatttaagtatttgatagaagaagactacaaatataactatctgatttgtaaaaccaggaaataaaatatgcttaaaacttttgtatggagagagtactctctactgcattagaaaataaggcaagcatgaccacatagggatggagcaaggttcacaaaaccaaagaaaactattcaatattctacaagtttaaggttttgatctagcttgagttgacaaaccgtttaaattcaaaaaattagactgatttttatttctttttggcaatttgtgtaggagttttcatgagaaatgataaaaaccacttaggagcggttttcaatcagtggatgattttgtgaacactaggattgcacaaaggaggcattgcggaaccaagagctctaaaggcttccccttttagtgcccctttgaatcttagaataaaaaaacggaggaataagaaaaacacatgatcctgacagaaatgtaatggtaaaacagaggattgcaagacacaggaatgatcgtttgattggagcgcaggaaaaacatagaaatcgaataagagagatagacttaaaagttttttttttccaaaaggttagacctcctactaaatttcctccaaaacctatatgcaatgagccattccataagaattttatataatttgaaaaacttcaatcctttgaatcaaatgactacatagaaaaatttcctatagaatttcaatcctataaaattctttcataattcctttgaatcaaaggagcccttaaagtctcctatggagtttttttcattcgtaggagtctgcaaaccgcaaatttaagatgcagctctgcatacaatagttcatagatgatcaaaaaggcctctttcaaaattgctcaaaggaaaaggctatacatagagaaatttaattgcgaaactcttacagcactaaagtagcatgctatgagtaaatctatatttcttgtagctcctatttagttaaatcaaatggttgaattttctttataagaatttatttgtttataagactttattaagtacgtagagcagtgttcgtgttaaataaaataaaataaagggcctatgttgaatgaaatgctttttcatgttctactgaaagaggaacacatggcgtttgtttaactccactttgatttggtagtttgtatttgttagacaactgtccatatataaaacaaaaaaaagggaaaatcaacgtcaagcataacaactcctaactatatatctctgggagtcaacatgaagcactgtgtagtttctactatgttagttgcttttgtaaccgttttatgtacaacaacagagcatcatacattcaccctagcgttcaacaaggtctacagaggttattacttctagttgctactctttgcatatgcacagcaacacaagcttgtttacattgcattgtaaaaagacaatgaaaagaatgatattgcaagcactgccatgtatgcgcattggggcagtcgggcagcatggacagacagacctcaaacctaccaaattcctaggagaaccgaaagcatgcatcttcaatctttcatcaggtaggatattccgcgagaaccaacgtgtgccaccaaccgcatgaaacgtttagcgggttgtacgcttccacgggcacttggcatggtacgtttctgtctgttgagtcgcccaaaccaagctgttggcacaattaaaagtttcagacatggttcgatgagttccattgacagatttggacaaagagcagaaggcctacctgaccgtacttgttccaaccccagcagaagacatctcctttatctgcaaaaaaaaaaaaaaattcctgttaaattacagtgtgcaaaccatttgagtacaaattgaacctttggaaataaatgtatgggaccttaagggtacaacgttcatagtacaacacaaaatgctggatgaagcacattccaagagagagcaaaactctatcaattgaaggaaatgcagaatagagccaggagtgtacctgttatgactgcactgtgtcgggctccacacgaaacacctcttgcatgattattttccaatttcgaggcttctaccaactttggaacaatctgcataagattgatggtcctggcattaattgatcatttttatttctaaaactagtatcaatgcagtatagatttttggaagtggaagagattgtcaacaggacaaatctacattatcctagtatgaggtgcctgaagattagaattctacctcagcttgatctgatccagttcccagctgcccaaactggttacctccaaaggaatatacatcaccatcagcagatgtacatacagtatgccatagcccagctgctacacgttgtatcttcactcccataatagccgaaacacacgttgggcttaaaatatcatccgtgttcccttgtccacactgaacaaaaggggatacaacagtgaataatgtttaaaaaaaatacaacagtgaataacgttgacaagaagctctacgggcaacagtacatactaaaaaacaagcttctccaccagattaacaaaatgcatatctgaacgcccccaatagtttgtacttagtactgttttaaaacactggttactgcaccagtcaaatgttttcatttccatgtgctagtccaaaggcccaacacattattatctcaactctttcagaacacgtgttactgcaccagtcaagtgtttctcgtttccatgtgaaggctcaacaggcccaacaagattattacttcgtatactggactgtattctctccaggctacccatttaattactagcagccgctgttgatgaaactaagcaacaccccacttaattccagcaacctttagtcgttcttaccgggtaaacctacactttttttttttgggggggggggggggggtacattgtctaaatagaacccttgtcaatacagttgatctggatgatgactctattcgtatggttggactggacctctcagcaaagttattacaaaacaggaggtggtttgtataaaaatatgaaaatcaaaatcaaacacaatttataaccagttcacatatttggtataccatgactaatggttgagctggcctagattacaggttttttttaatgcacaaaaggatattttacagtcacagaactcgcagcatgactctttacaaccaatcagttattataacaactatttcaatcaacataccaagcagaatagactaacagaaagtttaatgatttcataaaggtaaacg

SEQ ID NO: 15375 - DNA, 2344 bp, Oryza sativa
aaaaaaatggattctaaatttttaacacaactgaaaatgttcagggcccaaaacatcggcataatatatgaatgacgattgacattactttagtatgaataaaagagaaataaagaaaataagaggaacttgattcaaagaggttgagtacagtagagtctgacctgtcaccacagcactatgacggcctccacaggcaattgctttcacgcaagttgctgctctatcatttgttccttccaaagttctgctacccatcacaattcctgtacggtccttgctgtagaacgccgattgaacacaaggtatgggatgtggggaggaaactgtccggatcctagagcctaaacctagttgtccttccccaccatagccccaaccccagacctgaccaaaatctgaagctttggagaaaatatttcgctgatcagcatgcttacctaacctagttgagtgtgaagagaatacagcagtaaacgcccaatataagttacctgacagcactaatgtatgacggccacctgcagctacttccactatcttcactcctgtattaaatgtcacaacacaaggtggtgctgaaagattttcatcactagatgattcactttcagccccgtgtttcgatgaagataacctccgtcgctttgtgctatcctcagaacttcggctttcagcaggaccagatgctgccttggtgcttgtcctagacacctttgacctggggctcactgtaatcgagtttcctatattacctctgtaaacaacggatgtagaaaagcttatattttttatgtagaactgtaaagaaataagtagtaagcaccaccaccttggtcagtggcaaccccactttgccttttatcacaatccatagccccagttgcagaatggtctgcaatgacccttccagttggaacgcattctttccaaccccatgtgtagacatcacctttacctgcttgagtggaattcaatcagtgtaatgcaaagttatgtgcagttttcactaaaatgcatggatcaatacacaacctgttattgcaacacaatgtgcccatccagcgtcagcccttacaattgcaatatcactaggaagaggaaatgcctccggagtttcctgagaggaacaagatgtttacttcagtaacagtttataagtttatcaagaacacgttggaaacaaacaattagcccaaaggtacagagatacctcatgcttcccagcagtcacgtaactttgtcccatatcatcggtagagccccaagtgaagagttttccttgctctgcatcaggcagatacaagctgtgtcagtgtcaagctcagttgacgtacggagtaaaacgctaatagcacacaatccgaccaagcaaaaatgcaatcttctaatggttgacagaactacctaaaaacatagaataatccttggagtaatggagttgttatggaaaattagtctaactaaaagcaattccacaaaaatacactagctgacaatatcacataacacattcccacaacacaatacggggcaaaacagtgttctgatattctctgtcgctcgaccaaaaaaaaaagtcgaaatcactagctgcttgcactatcaatcacaacttagtcagacagcatattccaccctgatcaaccaccaatcaggaaaatagtcatacagcacattccaccctcatcaaccacctatccagaaaaaaaaatcggcaataactgaacacccggcactaagctgctcaccaatcaattcacagacaatcactcagattcttaagaccttttttatccaattttatactcgcgttttcatggaacccaccatatacacaaaaatccgcacaactaactactaaaccactgcacgctaatcatccccgataataaaaacctcacacaaaccacaccagcaccctactagatctcccacgaccctcttggtgccacagatcgaacgaactcgaacgcaacgataacatcaagcaatggaagcacaggaacgagagagaaaggcaacatcaccggagacggccatcgcgaagccgcacccgccgccggccacatccctccacgcatcaccggccgccgcggccgcgtccggcatcctcacgggcaccggccccagcagcggcgaccgctgctgcgacaccccgggcaggtacccccacatcagcaccacccgctccttcctcctccccgcgcctcccccatcctcctccatctcctccccctcccctccccctcctcctcctccattcatctcctcctcccaacccaaaccccccctctctccctcgatctcactctcgctctcgattctcctctcgatctctctc

SEQ ID NO: 15376 - DNA, 677 bp, Oryza sativa
atcccgccgtgcccgcgcgccataaagagggggaaatcactccccgtgattccctccctctttccccccacttttccctctctctctctctcggattcgtttggaaatcctcccgcaaacttcgccggcgtcattgatggagccgagatcgccgcgccggtttccttcccctccggccaccctctctcgcccccggctctatttaagcactccccgtgcctccctcctccgtttccgacccttgccgctttctctccccgtcagaatcgagctcgcgccgtcgtcctctctctccgccgtcgccgccgagcttcggttcgccgccgccgtcgccccggacctcctcccgcttcggcatcgcctccttcggcttcgccgcgtcctcatcgacctcgtccaccccttcgtttcgcccgccgaccgctggaacgccgccgtccccgtctacccgagccgtgccgccgccttcctccgctccggtcgccgttcccgtcgccgccgtcgacccggggtgagccgtggaccgccgtttcgcttcccccttccctcccctctctcgggcgccgctccgccgcgccggtggtcaccggcggcgaccatcggggcgcgggtgcgccgcctcccgtcggctgagccggcgtggccgccttcgggcgtgccccacgacagccatgtgg

SEQ ID NO: 15377 - DNA, 9859 bp, Oryza sativa
taactcgaattttggaagcttcaaacacgaaatttaaactttcaagtcaaatttttgaaaacatttgactcagatttgaagattttcaagtaaagatttgaaaatattcaaatcaaatttcaaaacattcagccgaaatttcaatatttgcgaattgcaacccaatttcaaaacttcaactcaaaagtttgaacttccaaatcaaattttagaaaaacaaaaaaaaagcgtcgatgctttgcgtggcgaattttttggcgcgacgtgaaataggtcacgtggcaacattttttgtcgcgaagcgtagggaaaggggaaaacgccgctaccctagctcggtcaacgtgcgaatgacttgattggttggcgcacacgcatgccatataggagcccccagccgttgaaccactcctcacgacaatgatggccttggcgaatgatcgccccaatgcatccatgccatgggcaagatcgatgacccactcaagctcggtgaggagttcctggaagtaggctcacatggtagcagcaaagatttgtccgtcacaggagaccttggggggtgcagtaggctgcgtcaccgttgctccgcctcgaggctgctatgtcagctgcggaagcggctccgtcgaccgctgttcgagcctgtcaccgtgtggcattgtggtgaaatgagaggggagcaaggaagagaaaagatgggagaagaaaaatgtggtgttggcatatggttctcataatgattcagctggtcgaaccaagtgaacaagccatgtaacaaatacaactatgaataatgccttggaagtcaaattagatcgcttttaataattggaggggggaagatacctagtattgtgattgagggatacaaattatattaaacctatatttaaggaaataaagtggacttattctgctcgtaaattactgtggttgagagatacaaattagattaaacctatatttgagggaaacgaagtggacgacttattccacccgtaaattacagcggcacgaaggtcacttgttctcctacaactccactaagtgtgaaacgcatgtacagtcaacagctttaggagtcattgggggcaacaagggtaaatggtgcgcacaattaggcctggtttagttccctaaaaacatcacatcgaatctttggacacatacatggagcattaaatatagatttaaaaaaacaatatagataaaaaaaactaattgtacagttggagggaaatcgcgagacgaatcttttgagcctaattagtctatgattagccgtaagtactacagtaactcatatgtgctaatgacaacttaattaggctcaaaagatttgtcttgcggtttccagacgagttacgcaattagttttttcatccgtgtccgaaaacttcttccgatatccagtcaaacatccgatgtgacaccctaaaattttcttttcgcgaattaaacagacccttagtaatgttgcaagtagcaaccttttcttttattgaaggctacctgttgctgccctaccatctcatcacatttcatcaggtgaaaacagcaaaacaaagggctacctgttgctgccctaccatttcattatacttcatcaggtaaaaacagcaaaacaaagggcaagaggaaaaaaaaaggaaaacaacacacacatgcacagtaacacacacaaccacatctgctcaggtgaaatgacgcatccaaatactgcctccaccggtagaacagatgtatagttccactatgacttgcaaaccggcttggaccactccttttatttctggtacaaaacaatcgaataagatgcacagaaattgctatcgcaatgatgaaagcattgtatggatttttatatagaacagtctgattacaaaaccttaaaaacttaataggataatctgaaaagcttaagttcctactgcaagtcactgggaattggctgcatacatcctcatcctgtttggatgtagaggctctgttttaatccattttctaaaagaaaaagtcactaagctcctatcaaatgttttcgtcatatgccaacaaaaggagaaatgacaccaaatatgcatggattgcttaacaataataagtttataagggaaaacctgacaaactatggttgtgagtcattgtggcctacaaattaaaatgccttggggagtaactaaactgtaaaatgttaaacaggtttcttgggttaagaaacgcgtaaaatgaacatcttcatcagatgttcatatcattctaaacatgaggcgaaattgctctaagcatcacccatgtcagatgtatgtactttttagaaactactaacaagataaacttttacttcaagacatttgaccaattttgcagtagagccatcattgtcaacctccactactatccaatgattgtgcgcagatatgacaagtaaaattattggcaccagaactatgaggacggcactaatgtaaacaaggatattttcctaagttcttaatgtctgcattaggaacgaaaacagattatatcattgagcctatgacaaggcagtaccacaaagagcaaattagattatccttagttcagctgcttcagaagttccacatctctaatgataatcctcttacacagcacatagttcatggtcctttaataataagaccaagcaagctctttattgtaaatattcaaaacaaataaagagtatctactattagttgactctaccagagaaataaatgtcttagttgcgtctgagtctatgacagataggtcatataacacaaacaatcgaatactatctgatgctgccgccagcctatcatgctcaaactaaagatagataatgcttacagagactttttaaaataaagttgctgctatagtataccttgtttgacaaaaggagagccctctgcaaagtacttagtaatagagtgaacctgccagtagattatagtcagtacacaacttcacatgtatttcgtcatgtataaattataaacaatatccaaataatacataccttgccaccaatcacctctggtagccagggagccatctggattctgctcctgctccttttgctggattggacatacaaagagaacataaaagtgtcagtgatacaagcaaccagaagctgataattaagagtgtcaatttctacgcacatttcctggtgatgcatcaccctgctttggtggagtgttgccataaaactcccgagcaccgtaatgcacagaagagccaaaatatggcgactccgatgactcgtttggatatgattgtttaccatccttgtatgcaccacgagctttagtagggctgtgcgatttgccatctgcatgacgaaagattgcagttaagcggctgctgtatcacatagaaatggagaatctcctctccaaatcaagatgatgcattaaacatggttgaaaaatttataagaggtagcaaaattactacaaagatcaatgtgctttgatgttggatcaaatgcaacagcgtgtgtgcgactgtgcgtgcatgatcgttgacgttagacataacctgaaatcctaaatccatttctcaggacaactaatgacatgaaagatgattatcctactctgttcacaagtttagccgcaattaaatactagtgtcaaataaaaaggatatcacacaaactacctgcaaagccaccgccattctgccctttggagttctgcttgttcagcatcgcgtacaggtccgcctgcttcgcgtctttcgtatttgcctttcatgtaaaaacaagggcagcaacatcagagggatacccaaataagatttcctagaaaccaagaactcatccaacacaaatgaacccgcccgaaacaattcccgaattcccgaattcagaacaacaaaaaatccaccaaaggaggagccaacctctcgcgcgacaatcgcataacagaaacagagaacaatccttaaaaatctcacgaatcgaaccaactacgagtctacgagggcgcgagaggagagagacgcggtataccgtgggcgacgcggagaagacggtgctgaagtacccgttcgccgccgccggcgcggccccggcggcggtggagggcggcgatttcttcctggagtccatacacgtcggtggtttgggtttcttggcgctcgaggagaggagaggagaggagagatgaacctagacttccgtggaaggagaagaagaagaggaggacgagctcgtgagcgaggaggcggagaaagatagggcacgtgaagtggtcgttataggcggcggcgcggctcggggtcggaggtgggaagcgacacttctctgctcgcctcgtggcgccctgctccggcctccatctgtgcccgcggccccctccttataaagggctcgagtcgaggaggggcgggcgaaccccctgttctgaattctgatgtttgtattccgtagatctgcaggggctgaattgccaaagtgcgatcgatatccgaacttctggccgccgtgagtacaaaaccggcgatgtagtatttttttggcaaactttttctacagtacaaagctttcaatataaatttgatcgcacctggcacattgcgaaacgaaaaaaatagggcgatgtttcattccttatgaaagaatgttgcagcacttagaaaaaatatttcagatctttaaaaaagtgaaacacaattggatcatcagataaaacaaattatttaatgccattgaaacatcaacaagatccgagtgaaatcgaagataaaaaatgaaataccataaaaacccagtgaaacatacatatacataggccaaaacattaaaacataccacccccggggtaaatggcaccacgatctggctaataaccggtagttagccagatcatcagtggcatatatcggagacatggctgacgatggcatgtagctgctggagatagtgatgggaccgacgatgacctacaaaccatcaccatccactcctacagtctctcatgacaatggagacatcgtcgttgtctctgttgtcacacaaacttagccaagtctacgccaccaccgcttcaactgcctaccattgttgcccctatccgccaccgtcgttggcctgctgctgtcttgctgtgggcttctgccttttactaccttatcgctgcctctgttttctcacagataagagaagatagaagatagaggaaagaaatggtggtcagagagagaaaggaggggagtgaataagaccaagaataaaatgagagaaaggagggttgttgagcgcaaggcgcacaatatttttcttcctatcggtgtccgaaccaaagcattttcggataaattgacaataaattttgctttagaggtcgtaaacttctgaaggagaaaagaggacgccactacaaattgaatgtacgatcttttttaaaaattgattaatgtttcatcacacgtagagaaatatttcatagttagcccaaaaatatttcacacacatgcaatatctcctaaaattagttgaaataattttctacatgaaacaacaaagataagttgaaacatgaaaaaaatcacaaacatttacacgcccgtaaacatcaatacacattgactgaagcatcaaaatttcaataagataccaatacacgctgctctctcctcttcggtggccaaattttcggctcctttttctgagccgaccactcaacagtgacaagagttggcacctccctcccccgttaacgcagagaggcacaatgccatctagaactcgtgccattgcgactgaggcaaggccacggtgacactaagtgcattggctgctacaacctgcttggtccgcaccaacccatctttgacaagctcccaccccagccactagctgcagtcccttctttgcgacctccgcgcatggcactaggtacatcatggagttcatgggtatgaaggttagaaacggcatgttcgacctaccagacttgagaatcgatcaattacgattcactaactacgaggttgcattgcacgcaatcatgaagtggccaatgacctccctcacctcctacatcgaggcgaaggcagccacacaacggtaatgatagcagtagatagcactgttggtagcacgggataggggagagagaagagggcctacgtagattggagtacctgataaaataaggggcgacatcaggcgaccgaatgcaagcatttttagagaacgtggtttaaatttgctaattaatttactacacatgacaacgttcgccatgtcgtaacaacagtactcgatgccactttgatatctcaaataataatgtagcattcgatctatatattcattttagatcaaacggtataaaatgccaaccaatgcacactattgtgaacccatagaggatcccaatagctgagaagtcgtcatcagtaggtgtgcgtggcggatggatgataacaactgaagatgctgggtttcccttcttgtgtggagtgtagtgcaaaaggaggaaaggggggaaaagtttctgagaaaatttgtttttccggagaaacaaagaacttgccgtttctataaacctccaatctcatcactccctttgtcccttataggaagtcaaataaatgcacatgcttctgtccttatttcagttctttcagtttgatgacgtgccattttttcccccaaaatgatcgtaagaattatcgcgttccagttcttttcccatgcttgacaatctcacatttaaaaccggtacctatctagctctatagtccatgctagaccaaattgacaaattccttccacggtttcatcagcagcatcggctgctgcacacgtgaaaggtagacaaagcacgtgtaggctgcataggatgataggaacatggtacatggatatcggatagcacgctagcatccgtcacttggcttcctacaccctataattaatcgtgtgcactctcctactacatgcacacagaccaaaagcagaggctggttcagcgaacagatcagcacgcaagatgctgccaattcctttcacctacgaccacgagcaagtggatgatccatcaggggtagggtgctggttatccatctgagaactttttgactaaccgatcgagctcttcttctactgtgctggtctcaacgtatcactcatcggcatcatccctccaaatccaaatcttaacgatcccgctcgatcggagagatcggcatcgatgcgggcggcgaatctttgcccccggtctgaaaagctactacttcacaacaataattcagtgaacaggaaagaaggttctgagctcggtttctagatattatcacgcaattcacaacaagtggtgtggggttctcccagctgtagatatctcgctcatctcacccagacatccacgagagagagagtgtgtgtgtgtgtgctcactcgtcacagatgcgagcaagcaccaataattagctcatccttatctcacagaaatttctcatgcttttctccatcgggctgaccagcattgataggtagcagcagggggccagaggccttccctttttatcctcttgccgtccaaaagcggctgcacgatgatgcaccggattagcttagcatccagtctttacctatcgcgctctctctctctctctctctctcacttgctgcatgcgtttggtggtgtggttccctgaaccagtgagagacgttcagatttgggttcaggttcgaaaccggaaaagcgtcgacgaccccaccaccaaatccggagcggcgaggaggacggaactcgccgtggttatcgcgatagccgactagccgaagccgatacgatcatcctaccgggcgcgcgcgggcggggatatgatacgcgtgacgcgcggtcggtcccgggggataatctagtttattgcgcggcgcgcggtggtttttatcctgatctgcacgtatcttccgcttcgacgcgtcggaggagcggaggtcgtcgccgcgccgccgacggttggggcttgatgggccaccaccaccccggttgacgacgcgtgcgaacgcgtcgctttcgcgagcgagctagcaagcgcgccatggggtgcttgctggatagatgaggcagtgtggcgcgccgaaaagttggcagtgtgcgtgcgccgctcacacgcgagcgagcgatctcgcggctggcctcgttgtcgccgcgacgtgagcggcgtttgtgtgtcccttggcgctgcggagggacgcggctaagctcgtcgaaaaaaagagatggtccgtcatgggtcagcgtcacacggcgtggggtgcatggttgcgtcgctcgtcgcgatggagactgtgtgggaggtaacgggttgatattcgtacgtgtcgaagattttaggctcgttcggagaggagctctgagccatagagactactacctacggtacagaggattatttttgttctgtgagaggagatgaatggaatctgagaagtttctcattacggcatggggtgtgtttacttcacgctaaaattagaagtttggttgaaattgaaacgatataacagagaagttggaagtttgtatgtaggcccatcacgtcaaaactttcctacacacacaaacttctaacttttctgtcacatcgttccaatttcaaccaaacttcgggtgtgtttagttccaaagtttttttttccagactttcaactttccatcacatcaaacctttcatacacacaacttttcagtcacatcgtctccaatttcaaccaaattctaaactttgggccaatctaaacataaccttcgttccaatttcaaccaaacttctaattttagcatgaactaaacacacccgtagaagagggcaaaaattatatgtgagtgctgaaggtcgaagactgcgacaaatgtgtcgtgtgaacagcatgaacaggtaaccgtgaacgcctcttggttagacggtggaattgcgaacactactacagataagtaggcgtagtttagttttgatgactgtcactacgtatagataagtaggcgtcaattggtacacagtataaaatactatgaagtttatgaatttaattttattcttcgtcagtttatgtatgtattgttgagaatatagacatataatgatttaatatattttataaataaatcatgatattatagatgtatactagcattaacgcatcattagatctacacatgtaaactaagcagtaaaatatgaacagatgaaatatgcgcaacatgtcgaacacgtaccgaggtggtggaaagaccgtttgctcggcaggaactactcgcggttgcgagcgtcgacgaaggcgcgcagcacgcgagcgaagaggaaggcgagccgtcgcggacgaacagggagcagtcgcgtggagcgcttcccaaaaaccttattgccgtcttctcccggtgcaggacgtcgaaggcagaggttccggagacctgctctcccgatcgcaggtgcacgccggcgagcgggatggagtagtctacgagcgacagcgcagcacagaggaggaggcaaaccctagattgatttcgtgtgttttgcgtgaaggcggcgcctcggtttatatagagataggacgcttgatcaaggcgcccgcacgatctccactccgcgtaaccgaaccggataagtcgcgcgtaacttatccggactccacaccgttttcacgtaccggatttttcggaatgtttccaaaacaaaacaaatccgaattttccagcagcaaaacaaaactgcaaaaggaggctgcatctgcgcaatggtgaggatccaattttgcggaccattcgacgcgtacgtcgtgcacgcacgccgcctgccaggcgaggcgagcgagcgcgcg

SEQ ID NO: 15378 - DNA, 5359 bp, Oryza sativa
ttgatttcgtgtgttttgcgtgaaggcggcgcctcggtttatatagagataggtcgcttgatcagtgtgcccgcacgatctccactccgcgtaaccgaaccggataagtcacgcgtaacttatccggactccacgccattttttcacacaccggatttttcggaatgtttccaaaacaaaacaaatccgaattttcctgcagcaaaataaaactacaaaaggaggctgcatctgcgcaagggtgaggagccaattttgcggaccattcgacgcgtgcgtcgtgcacgcgcgccgcctgccctgccctgccaggccaggcgaggcgagcgagcgtgcgcgtgtgttccccctcttctctccaccacacatgtttcaagtggctaggagggcatcctcccttttaaggaggccccctctcctagaataagtaaggtggtactaaacttcacatgcatgccataccatgaggtgggcttttgtgattttccaaagaattaattttcgaatgggccttagcccatctattaattccaacaatcccccaccaaatctcaaaatcccactgagatttgctttttccaatgtacttttatataccacggttcgatggagaccgatcaaggttgaacatccgcctagaactctaagctacacttactcacaacttgaacaatggactacgccttgaattgcaagtcttgtgcaagcaagtttcattcagagtcttatctggtactagaccgtctgtagactacccctcgggtggagcgtataagtcatactcctaggtactttagtaagattcctagaagattcactcaaaatcttcatagactgcgaccaacagtcaagcttacaaaggtgagttctttcaagaatgctctgcaggatagcatattcgctaattaaagtcagcagaactcattaaggcatagcctacctgccttgcagctcacgagagtacatgcatcttcacttagagagggtatagattggtactctcctctagtttactaatggtttgttcttcccaggttctaattcacgggatctccaatcacatagactgggttaccaccatagtataactcacataggtctcaaacccatctccttcgatgcattatctatcacatttcgtgatagtcccttcgtgaaaggatctgccaggtttctagctgtttggatgtaatccaatgttataactccggagtttctcaatttcctgacagacttcaatcgtcttttcacatgtctagacgatttcatattatccttagaactattcactttgacaattaccgtttgattgtcacagttcataaggatagccggcaccggtttttcaacaataggcagatccattaatagatcacgcagccattctgcctcaacagtagcagtatctagtgccatcagttctgcttccatggttgacctcgtcaaaatagtctgtttgcaagacctccacgaaacagcagcaccacctagtgtgaagacatatccactagtggctttgatctcatccacatcagagatccagttaaaatcactatatccctccagtaccgcagaatacccagaatagtgaagccccaattccatagtacctttcagatagcgcattactcgctcaagcgcacgctagtgatcatctcccggattagaggtaaaccagctcaacttgctcacaacaaaggagatatcaggcctagttgcactagccagttacatcagcgagccaatgatttgggagtattccagttgattcctagtaattctcttgttcttgcgaagcaacaagctaggatcataaggtgttggagaaggcttactatcaatgtagccaaagcgattcaagatcttctccacataatgggactgcaagagtgtaatcacattctcacctctaattagcttaatgtttaagataacatcagctactcccaaatccttcatatcaaaattttgagacaagaatgatttaacctcatttatcacctcaaggtttgtcccaaatatcagtatgtcatcaacatacaagcacagaataactccctcaccccaccatggcgatagtacacacatttatctgcctcattgactgtaaagcctgcagatgtcaatgttttgtcaaatttctcatgcctttgcttaggaacttgtttcagaccatacaaagacttcaacaatttgcacactttgccttcttgaccttcaactacaaacccatcaggttgatccatatagatctcctcatccagctctccattaagaaaagctgtcttaacgtccatttgatgaacgagaagaccatgtgaggctgctagggaaagtagcacacgaattatggtcaatctagcaacaggtgagtaagtgtcaaagaaatcttcgccttctttctgagtatagcccttagcgacaagccgagccttgtacttttcaatagtaccgtcaggcctgagcttcttcttgaacacccacttgcaccccacaggcttacacccatagggtcgctctgtcacctcccaagtcccgttagcgataatggaattcatttcactacggacagcctccttccagtagtctgcatcaggagatgcgtatgcttctgaaattgacttaggagtttcatccacgaggtacacagtgaaatcatcaccaaaagacttagtcgtcctttgtcttttgctcctttgaggagcttcactgtcatcctcctcagtaacatgttcatgtgtatattcagtttgttctggtggtgtgattgaactgggaattatttcagagggttggctagaactactatgtgtatcattcattgggaaaaagctctcaaagaaggtaggatcacgagactccataattgtaccaacatgcatgtcaggtacctcagatttaactattaaaaatctatcggcaatgctgtggtgagcatatcccagaaagacatagtccatagtctttggtctaagtttgcgcttcttcgttattggtacattgactttcgccaagcacccccatgtgcgcaagtaagaaagtgatgattttctccctatccatatctcatatggtgttttgtccttatttctgttaggaactctgtttaacacatgattcgaggtcaacaatgcctccccccaccatgccttaggtaatcccgcggtgtccaacatggcattcaccaagttggtcagtgtgcggttcttcctttcagcaatcccattagactcgggcgaatagggaggcgcactctcatgtataatgccatgttcctcacagaataagtcaaactcgtttgagaaaaactctccaccacgatcagacctaagtctttttatctttctatcaagttgattttcaacttctgccttataaattttaaaatagtctagagcctcgtctttcattttcaacaagtacacatagcaaaatctagtagcatcatcaatcaacgtcatgaaatatcgttttccacccttcgtcaacaccccaatcatttcacagagatctgagtgtaggaattctagaggtgccaagtttctctcctcagcagccttgtgaggcttgcgaggttgctttgattgcacacaactatggcacttagaacctttgacaatggaaaacctaggaattaaatacatgctggaaagccgagacatcaagccaaaattaatatgacataaacgtgagtgccatacattagcctcatcatccacactgccacaaatatggttcacagacttattgcagaaatcagaaagggaaaagcggaacaggcctccgcactcataacctttaccaataaaatatccatgtttagacatgactactttattagactcgaaaaccaacttaaatccgtctctagtcagacgggagccactaacaagattcctgtcgatagaagggacatgctgcacgttcttcagctgcacgatctttcccaagtaaactttagatctaccgtgccaacaccatgaacagaagcatgtgacccattccccattaggacggtggaaccccgtgtgacctgataagaagaaaacaatgagatgtcagcacaaacatgtacattggcccctgtatcaacccaccaattagtagactgattaactgaaaaaacagtaggtaaattaccatacccgcttccatctccagtgttgccaatggtcacattagcagacttagaggtctgccctgcaagtgccttcatcctcttgcgttgtggacacttcctggccagatggtcaggttgatcacacacaaagcaagtcctctcatcctgattagaattgttgttgttgttcttcttcttgaagttggtggtctgctgagctttgtatttccccttgctcttgttttgggccttgtgcacaacattggctgtggactgcccaccatcgcccttagacgcggcatctttttcctgagctttctcctcaatatcaagagacgctatccacccctcaacggagtattcctgtctcttgtgtttgagtgcagtaccgaaacctctccaagatggaggtagtttcgcaataatgcacccggccagaaatttgtcgggtaagacacacttaaggagttcgagttccttagccatggtttgtatctcatgagcctgttcgactacagaacggttgtcagccatcttgtagttatgaaactactccatgatatacagatcattgctagcatcaatagcaccgaatttagtattcagtgcatcccacaactccttagcgtcggtcatatgcatatacacctcgaccagatgatcgccaagcacgctaagaatgcatcccacaaagagagtagtggcctcatcgaattctttctggtgattagcattaagaacgcccataggcttgccagtactcacaaagaagcatttcatagttgtcagccacagagtgaccctgatctgccatctcttaaagtacacaccggtaaatttatccggcctcagtgcatcggcaaaaccagccatagtaaaatcacagcgcctataataaggtttttggattgttgagaatatagacatataatgatttaatatattcaataaataaatcatgacattacagatgtatactagcataaacgcatcattagatctacacatgtaaactaagcagtaaaatatgaacagatcaaatatgcgcaacatgtcgaacacgtaccgaggtggtggaaagaccgtttgctcggcaggaactactcgcggttgcgagcgtcgacgaatgcgcgcagcacgcgagcgaagaggaaggcgagccgttccggacgaacaaggaacagtcgcgtggagcgctttccaaaaaccttactgccctcttctcccggtgcaggacgt

SEQ ID NO: 15379 - DNA, 2882 bp, Oryza sativa
aggacggtgatgcgggttcccgggttggggtcgagcagcatcttgatgagcttccgctgtagcgtccgctgccggacctccccgaacctgccttcacgcggaccggcggcgctccgattggggggcagcgccgaccacgcccgccgccgccgtcggaactcgcctgctccgccgcccacccgcgccgtcctctgcccgggaaggagagagagaggggaaagggaagaatagagagaagggagagggaagaagagaggagtgaggctgacatatggggcccacgtgggccccaccattttaaatttttttttgtgcagctgacatgtggggtcacgctttttattatttttccgagatataattgccatgtaagcgtcacgtcaatgccacatgggacgaagacctagtcaaacaagccacgtaggcgccacgtcagctaaaccgcctttgtaggatcaaggaggccgactagagggggggtgaataggcggttttaaaacttaatggcacttaaacaaaactaacctaagttgctaggcaaggtaaggtgtaaggttaactaagcaactaagttaagttttgcaaacctagatgatatgggctcaaatatgtctctatgaatgtaaatagcacaaatgtaaatgcaacaaataaatgaggcaagagacaaggaatttttcaccgaggttcagaaactcgccggtttcctaatccccgttgaggcgagcccaactccaccgctcaaccacgaagccaccgcacgcccccttcatcaaggggtgggcaaggcgggagccggcccacggagaggactacccaagcctcgatcactcggggtagttcttccttcactctgaaggtggtgaactccaaaccactcacaaacggcgccgggcctcctccacaatctcctcggagaggtcaccgggcaacacctacacaagccgtctaggaggcggcaacctccaagagtaacaagtctaggatgcttgccgagaatgatcaagtgtcacactagctaaaaaaatgaagcaatgcagttggattggcttaactcactctctaacacctcactagataaactgtcgcgaccgagaaaattgccttttcccgaacgctagtgtattaatccccgtcccaggaaaagccggggtacaccacacaaacatgatacaaaaggcacatctttattatatcgagaatatttacattattacagaggcgcttcaggcctggcaatcaaaaataaacagcagcggactagcgggcctacggctccatcttcacaggcgctcaactggggaataagccaggactccacctaagacatcttctccaaagcttctcttactgaatgggggaaaagattgagcaagaatgagtacaaccacagtactcagcaagccacaccggagatgcgtaattaatgcaagggagtacaaggggataataatataggggttaagttttgcagtaaacagcatttaaaagtcacttagttgcccaaagccattttaaaaagacgatcctagagctacacagtattattaatcagggtcgtgaacccacacgagcctgccttaacccaaggcctacgatgattcagaccgaactggcaacccgaccctgggtcccagctcgtcccaagccaacccaggccaaccattccacattttagttgttgagcaaattttaagaattaaaacactaacttgggtacattgctcggcttgcccataaccgagggcgcggctattcgaatagattatactctgatcagaggtgtacatctttacccacaagacacatcttcctcacgtgtaaccacgtgccacataccaccacggtatacggacggaagacgtgacatagttcccaacccatcctagccataaacaagagtaccgacccaaccccacctacggccggaacctccgggacaggcaggcaggactgagcccctagcagcagggcaccaaccctgtgccatgacatctcgactaccgggccgcagctcgtgtagccttcatttgtcctagagaatgtccatcgacccccgacttcatccatctccaatccgtgtacttttgtttataaccagactgagccacaaactaagccttacccactagacatgtggaagtacggtagtgctttgcaacagaggcccgagcttaatccttatagtggccggggtgctacttcccacaactggcatgcacccaaaccccaccggaaaacagattttaggggctttgaaagaggaagagaggggtatgtccaattccaccataagccaaccattccatagtgtccaaatgatatgagaattcccaaagtctaaagttataaaaccacctaatgttgcctaattaaccagcgaagcatctacctaaattcataccagtggaaccatgaatagagtacccactagttggggttttattttcctagggtgaacaaggtaataataacaatagcaataataatgtcttaacaaaggtaaataggcatggctaaataaaacagtgataacgcgggaatttaaataaagcggtaatgcattaatttaaatcaaaataattttataaactgggattcaatatgctcaaggatgatgtgacttgccttgctcgctttcccaaacgccggcttcaacttccatgaagagaggatcttccgaagctgcagcgtctacacgaccaacggaaaagaaaaggcttttactctactaaactccatataacaagcagaaacaaagcacaaaaatgggttcttgacttcttaaggaaaaattagagacttgaacggtccaattccgagttcaaatggcccagttatggccatttgaaatttatatgctcctttaaatggatatttac

SEQ ID NO: 15380 - DNA, 1683 bp, Oryza sativa
gggaaaaaggactttttagagcttttctttttataaaatcattttaactttgtttatttcttaataattattatttgtgctctgaaaattccactaaaatttgagggctcctttagaccaaggagaatttaacaaaaattctccgggccacatttgagtttttcttgtacgtattttagtgtttgccaatttcttttcgaattttaattaattctattattccttttagcgaatgatttttaattcgggatgaatttatcaggacgtgacataaactaagtgcacaagggtgtgagagctcttgaaagggttcaagataatgcaatggagtgccaaaaccttacccttgctgctggggagtgggtatatatacccccaaccaccaaaactagccgttggaaacgaaatccccaactttgtgctctgccggtcagaccgtcgttgtgaggccggtcaaaccggactactttgtaacggctagaaaactagccgttacagggcaatcattgagcccactcaacctggccggtctgaccacagtgtagtggccgatcagaccgtccacggctcggtcagaccgccatcggcttggtggggccggtcagaccggccttaccacgccggtcagaccggcctaaggcccacggtcagaccgcaggtcacttttcagctcaaacgaccattagtaaaacgactatatctcttaactcggggctcataatttggcgttcttggactttatggaaagcttattcaaagggctatccaacccatgaacaatccatccaagaaacacaacttttctcagggagaaagggctcacactccaaaggatactccaccggacataaccacatgaggctacccaaacctataggatttgcccacatctctctttgtttaggacttgagaaaactcaacacacttggctagacaagcccaccaaatacacctatatgcatatgaactaatatggcacaagatcatccacaagctcgcttcatagacccctcttgatagtacggcgtctatctagcaaatccggtctacaccaaacaccaagaccgggaaaagactaagaaaacattcttagctacattatacctttgccttgcgccatccatcttggggtcaagcttgagtcgagatcaacacttgtgaccatttgattcaaccatgtttataccaaggtatttaccatcatttgtcaagactttcttctcatcacaagcttgatttcattcttgccaacatggcgatgtccttggcatggtgaccattaacccatggtgtcatccattagcctcatcatagtgggacctattccttttcacatctcaaaggagaacattagtctcaacaaatcggttgtcatccttcacttgatgaccaaccggttgcatatgaaagatatgtatatgtttgttgagtattcattaacatcacaagtgtcatatactcgtatgcaagctcaagtgcaaagatccgatataaataataggtgaacaacatggatctaaaacatgtacaataaatgtataggatttgctccccctaagtatatgcatacaaagaaatatacaacagagacaagtgtatgcataagtaaagaagaaccaatgggggtttatcctatacacatagagaaggcatatgtagtaatgatgaagataaacaaaaaa

SEQ ID NO: 15381 - DNA, 24816 bp, Oryza sativa
  unsure (1)..(24816): unsure at all n locations
tgattaaggtccatcaccaaagaatgcatatctaccacatctcattatcgggaaataaccttgttgaaaacttatgtaaaagagaggttaatcccataaacatcggtttatcatctatcaccaacgtaacaattacacaaattgtttaatccaagatctttcaatcttttctctcttttgtgataaataataatccgatataaacaatacaaagaaatgagatgaaagataatttcaaatcaaggtagagatcttataatgaacaaaatatagaataagctccccctcaagatgtgcatacatatggatatgaaggaatgcatatgcacataatcaatcaagatcaatgagggagctcacactatattttggatccacaagagagacaaagttagaatatgtgaagtttaatacatacctcccatcatttttactttcatatccaaataagactagtcaaagaaagactcataaaaacgttagtctcgtataattagatttgtcattaatcaccgaaaccaaattaaggcacttgaacttacagccttcaaaaccaccgagggaccatatttacccggttttcgtaagttgaaggacggatcatacccggttttgcggtcgagggacgaaaatcagactgagcgacaaataaagggacctaaagtgaacttattccgacacactatgtatatggaccagacatcggaagtacattcggctaagcatttgtagttttgggcttcatctacacctcaccaatgggctcttgttgggctatcaggatgaagtcttcattgtttgctgaaaattccagggcaccttttgtttgctcaaactaaggttaatatagtgtgaagacgtcttctactcttttatactccctccaacctataaaaaaacataacttagaataagatgtgatattttttatgtttagattcattgtaccaaaaaagttacattccatcataggttagttttttaatgagacaatcagagtacgtgcttgaaaaaagtactactgaagtttcaagttacagtagtgttttttccgaaataagacgaatatcttctaagtattccttaagaaacaataaatattaatttacaaatcttagtaatagtacttctacacacagattgtggaagatcgaagaaaaaaaaaacaagcatagaagacggatcctaggcaatccgcatgcctgcatgatgcacatcaggaaaatttcacgactgccgccgcgcatcgggatctgaaaacgcacgactcctcccgtgacaaaacgtccatcccttcgacgccgcacgccgctgttcccgttgaaaatcaccaggacgaggtcggcggcgggcgtgcggcgcacagctgccacggcacggcggcctcgtcgcgcggttggtagagacaggccggcacgtccgtcgtgtgaatcgcgcggatgccgcgcgggtcaccatcgcgatcgaccgataacatcggcgcgacaggagatggatcgccacaacaccaccacagcggatttgatctcacatcacgtgacactacccgtcacccgccatcggattaacgacctctactcgacaccaaactagagctcctgctcccgtccgctcgatcgcgtcgtcctggcgatgtaacggatcggtcgatttgcctccccaacgcgacgctgacatgggaagattccgtgccctaccatatgccgacttcaatttttactcggtctatctttgacacaagcgatctacgaatctcatcatgcacaagtacagaagctagccggtccgtgcatgcatgctgcaatatcactgacgttgcgaagagaggccggaggtgggtactaccgtactagaatcttatcgtgacgtgaatgtggagttttccttcacaatggcttttacctgtgcaggttagacaaagggttgtaccaaaccaggtcgtcggatggtcgctattattttttttcccgtttttcagaaccacttttgtgacagcaactggcagctttgcatgcgttggaggcggtaggccggccgcgagagcgagagaatcccttctccccgacgcagccactacgtgtgcaacgcattggccgcacaactagcttaagccggtcggcccggctgttgcctgttgatggcgccgtgtagactaatcgatctatcagcaaaccacccgttgctgtcattggccagggtcgaaattaggtacagtactccgtacgtccccggcactgctgctcgacgtcacaatgataaatgaccagcgtttcgccgagacattctggtcgtgcgtgcgtgcgaggggcatgggccaccatgcgcctcgtagttatcggcaggaacaggcatgtgacgtgacacggccttgcccggaggaggcagcgctttgatgggtcgaaagatatgggcagcgtccacggacgatgtaacgacgcccttgaccgtgcgtgacgcggtactacaccgtaatagtaccgtaatatcaactatagccgcctcacctgtccggttgattacgccgcgcgacggctgtttcttgccgcgtcggcaggtccgcgcgccgcgactgacgtgatgatccgatattgcaggtgtgtcatttggggtgcgtccttgcattgcatgcaccacatgaccgtgtctagtgagcaagatcaggagtaatcaatggctaggctgtttgtttggaggggctaattcataagtccctctactttagtcccttttagcccctaaaatactaaaaaaggagggactaaaagaggctaaaactacctagttccataagttcctgtgggaggtgctaatagctcacctactattgaatggatgaagcatataagtgccggatgaaatgctcctagataggtcatttaatgatgtttcagtcccttttagtctctccaaacaaagtttaacctctctttcaaaaatataagtccctcccctagagacttatggttttgtgagtttagcccttctctcccaaacaccctctaagtaggactaaagaggacttatgttttagtcttagaactaaattttaaccctaggacttatgtaaacaatcggggcctaaaagttgctgcaactgatagcagctgatctagctttcctttcccatcagactagcgataccacagtatagtctcgttagagaattatgaatttcgcaaaattagttaggagtagtctcgatggttaattcaaaagcttactccaattactaaacgtaccactgtatctgctagtctaacatgaaaattagtttactactgcctctatcccacaatatatgtcgttttaactttttcatgcaacgtttgatcattcgttttatttaaaaaattagtataaatataaaaaaggataagtcatacttaaagtacttttgataatgaagcaaatcacaaagaaaataaataataattctattttttttaaatagacgaatgatcaaacattacaaacaaaaactcaaagcgacaagcaatatgggacggagttagtaagtcccataaaatcaaatctattatacgatatactccctccgtcccaaaatataagaacctaggaccggatgtgacattttctagtactacgaatctctgtcccatccagtcttagattcttatattttgggacgaagagagtagcacattctaagggcatccacaatatagtctaaaactagtccataagcaataaaatattccattcagccacctaacaacattgtggaactagtccatagcaagaaaatagcaaaagccacccataagcatatgggctgaccatatagaataatatatgttatttctctctatttcctctctcctcctaatactagttgctatctatatagattgtgaagataacaatagttatggtccatatgtgtgggtcccatctatatggactatttttgctatatacattgttgttgccctaatactactacatatctaatattagaatatatcacattgaagtaataaatcgtaatagttgattaaccggggctctggctagctcagtcgttggaagctttaatactccctccatctcaaaatgtacggatttttaggattgaaacgggtattaataaagtaggtagaactaaataggtgaagattgtgactggttgagaagtgaaggtaggtgagaaaattgaatggtacggtggaggattgtgattggttgagaagagaatgttggtgaagtggttatattttgggacaaatcttaaagagctaaaagttgttatattttgagatggagggagtagaagatataagtattttgcagataaactaagacatatggcaatgttttttaccctgtgtgttgagtacgaaatactatctctgccgccatcaaaattttgcccttctgtttttttcactgttccgttaatatttgtgtctcttttgacactgtcgttgattaacgaccatggcatttacttctactagtgtacgtgatttgtcacacgtaattcaattctacaatataagtaacttattttgtgaaacatttgagaaccaaatcccatggtgcaatttcaaaaattatccaattgtacaccttttttcccaatctattatctttgaagcggccataatttagttttgttgataactttatggtatttgttagaagtacgtgtcgagtgctgcattatttttgcacgtttacagggtataatggtcttttagaggcaaacgtaatggtgaaacgtctttgaagctgtggtgccctggtttagaaaacgtacgtacggcaaatgaaaaagttacagatgtggaagagagaatacagtcacaacaaatggcaaaaatagaaaaactttcccgctggaaaaataatagagtaaggccctgtttagtttccacgcaaaatttttttatcctgtcacatcgaatgtttggatacatatatggaatattaaatataaaaaaactaattacacatattacgtgtaaattacgagacgaattttttgtatatctatttgtactagcacaaatactactataagtataatcttgtgagattttgtgcagacattgacgccaatagaaagcactctttccgctaaaataaacttaaaccttgtatcggagtacattctacttatatgaatatgaatagagatatatctaaattggtactctatttgtcccataatataagggattttaagtttttgtttacaccctttgatcactccttattcaaaaaattttagaaatattatttattttttgtgacttgctttattatacaaagtactttaagtacaacttttcgttttttatatttgtataaattttttgattaagatgaatggtcaaacagtgcaagcaaaaacttaaaatcccttatattatgagacgaagggagagtaatgtatcaacgtccagtattatcgatcggttcttttatgtgataagggaagtaggcaaagaaaaaagagttaaaggcgcaaagaaaaaagagttcaggccgtgtttagttcgtgtaccaaaatttttgttgaatcatacggacacacatttaaagtattaaacatagactaataacaaaacaaattacatattccgcctgtaaactgcgggatgaatttattaagcctaattaaaatgtcattagcaaatatttactgtaacaccgtattatcaaatcatgacgtaattaagcttaaaagattcgtctcgtaatttacatgtaaactgtgtgattgtttttttatttatatttaatgctctataaatatgtttaaatatctggtgcgacgaaatttttagaagtttgaatgtaatgtctaaatctggaggctgtaatgatgaagagaagacggcgagagtttacgaaccgtcttgtgcttgtaggagtacgtcaagtcttcaactcttcaagtcacctactgctactgcatgcatgtcaaactctcacatcggcgtacaccatacaaatgtaaccctgttctaaatttttttttcgaaacttcaagctttccatcacatcaaacctctcatacatacataatttttcaatcacatcgttccaatttcaccaaaaaggttatttgggaactagttactaaactttagtccctctcacaaaaacataagcccctcctctagagacttatggttttgagtttagcccctctctcccaaataccccctttcaaacttcagtgtgaactaagagggtgtttagatggggctaaaactttttagctaatgtcacattaaatgtttatatgctaatttagaatattaaatataaactaataaaaaaactaattttataaatgagagcttatccgatgcgacacagcttgccgggaagtttacgtgctgagtttactccaagtaccacccttgcgctttgattaccactgcagttcagagaaccatgcatgagagaaaggcacctcagattagacagcgaaatgattgccgtcagctgtctacacgagggaggaaatgagtgaaggttgcacacactcctacaggcagcagtggtttcttgtagcgccaggcaaaagaaagacaggtctctctcagggagtcagagatgacagaatcatttctttctcctgataatcacagttaaaccagctagtagtagtagaaaactctgcctcggtacttccgctttttccacggagtgaaggagtatagtagaaaactccttcgaattatacgtacaaaagtactcctactatactcgttagttgttcttattagtactaaacaatttttgagattttcggatgccgtttccggtttgcgcccatagttttagccggtagtattaaataattgtgagtgttgaaaatgagaatagtaatatcttctgaaaataatagtggaaatcaggaaatggaatgaaggtttttctgcccgtttggtcagaaacctgttcgtatgttaatttctgttaaaattttgaaagtgccccggcgatctagccagctcaacccatcggaaagccctaggacatggtatgtatcctttgctgaattttgatcttctcaacttatcgattttgaagtattgttgaatttggtttatactgttcgtcaaacttattatcatatcattaattattatataatgatgtaatgtagagtgtgatgattataagaatgaagctttaaaatcattttaatacatagttaagtgcgtgattatgccacactcttttttttcatacatgaatttcgatttcctaccaatatcaatagatttcattccaacggttcagtttttgatataataatattaccgatatcgttatcgttttcagatcaacatttcaattccgtttcaaaaaaaatataaaaatgaaaatagtagagggttttccgaccgttttcatccctagttcctactcacgctgatgtgaatatacagtagtaggagtgttatagtgagctgtgtttagtttgtgtgccaattttttttaaaagtatatggacacacatttgaagtattaaacttagactagtaacaaaacaaattatatatttcacctgtaaactgcgagacgagtttattaagcctaaataatccgttgttagcaaatgtttactctagcaccagattgtcaaatcatggcgtaattagactcaaaagattcgtctcgcgatttacatagaaactatgcaattagttttttttgtccacatttaatactccatggatgtgtccaaacatttgatgtgacggaaaagttgtaagtttgaagaaaaaattttaaatctaaacacagcctgagttacgcaatgtaggtttgtgaagtggtactactggtcagttgcgcagcgcgagaaaacgttgctcatatagctgttgatatcgaccacgtaaggaactgaccaaatgaaaaacaagtactaatattatgtagtgagattacccatactataaatttgaacatcgtaatattatatagtattacatacctttaaaattttttatattttgaaacgggaagtatagactagggttgagagaaatagtagttagtagtaaggtactaggagtactactctttttatcctaaaaataatccaattctaaagattgcagcttctgtcgcctgttaagcgagctcgtccgcgctcaatctgaatatggtttatgttcaaattaaattgtagaattaaagatttttatgggaggaagaaggcccggtttagatgctgaaaattttcgggtctgagcgaaaagttttggcatggtccagttttcgcgttttgggaactaaacggtgaaagatttcggggtactgtttatgggtggacgagtagtacccctcaccctgcatgcaagcaacaacaacacctaggagagcattaaataggggcaaatcaggcagcattaaataggtccccaaaattttatgccaaaactttggctgtttagttcccagaatgccaaaaccccaaaattttttcctccgcccaaaaattttggccaacttttatgatgcctgagctcactgagtcacgttcaccggctcactgcctcccagtcttccagcgatgcatcggcgaccatcaatggcctcatcgtcctccttgcgccgcatgccgacgccacgaacgtacgccgcgcgcatgcatgcggggtttctcgtgacacgcaggccccacaggcagacacggcaaggacaaagccccatgggcttgcatgcacagtggccgtccctgtgcgagacctcgccccttgggggtcgtgtcatgcgatcgacgggaaactcgggcgcctctgcactctctctctctctctctctctctctctcaatgatcttggtcgagtcgaagcaaaagatcgcgtgtctgtcgagtgtcgacaagccaagctatccaaaggagtccgaacgtgtgggggtggccgtggccagtctcccgtgcatggcagtgtctctgccccctgactgctcgccactaccaggccgggccattctctctctctccctccgctagaagagattttaaatgggtgtgacacattttaatactataaatttaaatatattgtggctgtgtttagatccagttgtaaaattttagcgtatcacattaaatatacggacacgtatttaaagtattaaatatagtttaataacaaaataaattacagaatccgcttataaaccacgagatgaatttattaagcctaattaatccgtcattaacaaatgtctactatagcaccacattatcaaatcatggtgcaattacgcttaaaaaaatttgtctcgcaatttacacgcaatctgtgtaattagttattttttcgtctatatttaatactacatagatgtgtccaaacattcgatgtgaatggtgtaaaatttatcaagggatctaaacaggtcctgatctatgtccagatttattgtattagaatgtgtcacatatatttaaaatcagttatattatgcgatgcagggtgtatctccttgccgcgcgagatgacgggtttctgccaggtgggcaagaaaacaaagcaagaccgggcgggcgctacgtgtgctagcttagccccccggctacactacagtcactcacccccgccggcccgcccccggccgggcgtccttgttgtgatcgatcagcggcacacggtggcgcccacggtgcgtttcccccggcccgtgaccggtcgcaggggcgggcacactggcgcggtcaccgcagcaaatgcagcggtaggacgcgtagtttatgtgcgcaaaactgatcggaaccgacggacgtaagcaaaatataaagagaacattgcaaccacaacaacgtcaaacgtgaaagttttttcagacaaggcataaaaatactaattcctttcgtttcagattataagagtttataatattatccatattcatatgagactgcctatacatcatgtgataggcacacatatatatctagatgttaatgaatatagacacatatatgtataaattcattaatatatatatgaatatgaataatgctataaagtcttataatataaaacggaggaagtatcgaactataaaaattttctacagaataagaatctacaatactatatttgtctcacttattacctcctatttaaattttctgcaaataccaattttattcaggggcaaagtcaagacccggtcactatggacaagtgcccaggctccgcccgctgcaaaagtacgtaccagctgcttgattaatcgatctaacatgttatgttagatttagtctactatattacatctgggttatgtcatttttcttctataaatcgaaatactccctccgtattataataaattcatttttaagcctttccatttatctcaatataagtttatttttttaagtaatcattgtatcaggagtttatgaaagtatatacaaatgtattgggatttgataaaatagaggtattatagttatttgggttttgattggtatgtttgggataagtaaaaaaataaacatattttaggactgatggagtatataattttatgaattttacatatgcttagggcatgtacaaaggtaaaatttaatatgagctctttatattaattaatatcactagatattgtactcctataatagataagatctctaaacctttaatgcactaaataattttttttatacttcttttcttttctccaccctcatgcaataatttttccattaataaatgctaatagtcgactatgagtcgtcgtcatgcatagcaacgatgtttctcttttcttccttttctttcttcaacgtcaccaaatttatctgcattacaatgaagagaccccgttattagacaatgaagagaccccgttattagacaccctgcatatgccctatctcgtttgttcaggctcaaaatacgtcattgttcttaccgtcaatcactgtcaccattttgccatgtttatcctcacttattaaaggcataatagatgtcttccttttggacggcgttgtaaccattaacggatttgctatcggagcttttggtttgtgggccatcatacgagtgtcaagatatgtgctaggtatggaaaaaaattcattgcacatgcaaaatgctagctattattatattctgtaacggaggaaatagtcacctgttttttcttgtttatgttatgacaagttacatataaatatatttcagttatactataattatacttatactatatttaccttccaaagttttggactaaaagaaaaactgtcgaaagtctttagatagtctcaacaattaattaagcacttcaatgtaatgtaccgctacttgcgaacgtccgaattgtgacggatcggatcggtttatgcttttgacagtttttcacccgtgctagctgctgcgcgcggtgtcgtgtagtcgtggcggagacctggagtaaatggtcggcgttctacgtgcgtcagccatagcttgaccgggctgcgcaggcagtacctccttgacgccatcgacgattatccaacagtgccgcctcagtgcacctgccaggtggggcccacctgtccacgtgatacggcactgttgccttgttgtacacacactgttgctcagtgctgctttgagtagctgggtaggcatagctgtacaggacgcttagcaatgaagtgggctaggagtagggtagagtacatcggtgctacagaaaaggctacagttgcagcaaaagcccacccacggaggactagttcattcacccagtccagtccagtgccactagtactaaaacacctcctctccgtatctccggttctgtctgcaaagcttctaattgctgtagtttcttttaaaatcaaagttctcctagatagtttagcttttgattcagattaaaaaaaactgtaattataaaattcaagtagtaataaatttaaagccagaagtcagaaaacctagtatttctagattatcggaaatagctacaacgtgttatttttcagaattttaaactctccaaacgtgcctctctctctcgggtgacgggtggatgcgacgttaaatggcaacagcggccacgtcacctccgacgcctacaccgccgtagtactcccaaacctgattttcgtgtccttgaccgtccgtcttatttaaaaaaatacaaaaaaaattaaaaagataagtcacgcataaagtattaatcatattttatcatctaataaaaataaaaatactaattataaaaaatttttatataagacggacagtcaaatattgccacgaaaatctagggtttgcctttttttggacggagggattagacctcaaggtatctctcatgatcccctttcccaatactactgcgtactcctaccgtattttgcgtactccctccgttttcaaaataaaataaacgtagctataaatttctctgtgtccaattttaatcgttcattttatttaatttttttttaaaaaataaaaaaacataaagcacgtataaaatattatttatattttataatctaataataataaaatactaatcataaaaacttaaaataaaacaaacaattaaaattgaatacgaaaatttatatttgtgtttattttagaaacgagggagtactgtactactactagcggcgtagcctagccctggcctggtgatgatgatgcaacggcgccggggatttgacacccccggagacgtgacgaccgtagtgcaatcccggggaatctgcgtaacaatccccctgctgctgctgtcctgctagcctaaccgggggtggagtagactagtagtagtactaccagtagcagtgtaccacacgtagatcgggccccgtgtgacagggagagcgacgccggaggggggagatgggccgtgcaaccgctgcttatgtggtgtcgagtcgatggtgggggctaccggtcgggaggggtctcgctctcgcccaccccaccggcccgtcgtggtgtacagtgtactcctacgcggtggccaatggagagtgtgttttagggcagcgttaatggccaccgtacgtgtggtttgccgatcaaatcaaaaaccttgcgctggaattttgtggactaaaatctgtgttggcgactgcgaggggtggaagatgacgacgaacgaacgaacgaacgctacgggctcactcggtcaagtcaagggcatgccgtgctcgttttggaagttttcgatgttcatttcagggactccggagggacactcgtattgggtttacgaataggagatggcctaccgttccgggcttaaatgaaatgatggttttcacgaaatccggtagaaaatcagtagattcaataaattttataaaccaaaatttgaatacaaattccctgagtttatcgataagctcgtgaaaaccggtcggcttgatgaaattctgagcgaaatcatcgaaatttcaatcggtaactagtaaaggaggtaaactgatttttttcctttttaaattcgttattcttttctttactactgtaaatttcagtaaatacacggaatatattaatttttttgaaaatttatattccaataggttctataaatatcgttaacttctcccgtcccaaaatatagctacctagtacaggatgtgatattacctagtactactctcggtgacatggggccgggggtatcgtgactagaggcttgggtagccgcggtcacccacgtggcctgacccccttgggggggtcgggcccgagggtgacgtggccacccctccctctgtctccccgaggggtcgggtcgctcccgtttcggccccgagggctggggcgccccgaccccctgtggttttggcgccacgtgtgtgggttaggtgagcacagcgggctcacctaaccgcatttatagcaggttggacgagcgcgccacgccgcatttaatgcggcgcagcgcacgcttatccggtccgtgaccggtcgcggtgtgtgaccggtcacagaccggtcagatcgcgggttaggtggcaacaggcggcctgtcacacgcctcgccccgtcccgtcggaatgataagagcttcctggctctcgtccctagccggagctggtgtgctaactcctggagttggtatgtcagtccccgtcagattcattccaggcttcagcgcaagtatagcaaggaagtcgctggccattaaatgaaggttgaaatgggcgtccaccgggaaagcaggcgagcggggcaggaggcgtgtgctctgcttgtcagaggtcacttccggctgtgactagccctgattgtaaaaagcatgtttcccttcttaggcagctagaggcccatgtggtgacccctgaccagataaaaaggaggcccaggcctagaaaaaaaggggagagaggaaatgaggggagtggggactctggcgaagggtttctagagcctgaactctctttcgctctcggcctctctgtattccttcacgcacagatccaccagaacacaggagtagggtgttgcgcttctcagcggcccgaacctgtctacgtcgcccgtgtcttgcgcatttcctctctcgctgacgttcctcagatcgagggcgaagaacctcacttagcgcccccggccgaaccggcaaaggggggcctgcgcggtctcccggtgaggagccccacgctccgtcaactacgaatctggacaaccctcaaaatgtagctaactaatataggatttgacattacctagtgactatccagattcgtagtacaaggtaatatcacatcctgtactatgtagctacattttaggatggaggtagtagtattcaatttcgcaccagacatattgtattccgaccaccatagcagtagtgttttatttcggttgagtttaggtcatcaataatatatgtaaagagatcaagtagtagttcatagaaataaaacccacactagtgattttattgttttcattttcataatatatgtagatagcaattaacattaagatatgaccacactccaaaaaatttcatatccaaataccatggttctctcgtgcagaagaagcaagacgagaaagagagttttttttatctatatgagtaatctttatagtcatgagtagcttatcatatgactctttctaatactacatctcacaatgacaatgacaaaggtaccagtatagagttttaaggacggtttcttatcatattgtggatgcgcttacaaacatcattgtatactgtactacacggtaatttttcttgctgcctcccaagtggtaaagctaaaaaacgattagagcccaggcaaaccaaactatatgcagtgtttactactccgtattaaaattcttctaccagtattttcaatcacaacagttacactaggagcaagtttaacagttacactagtgtttactactccgttttttaaactaactgccaactatttgttcatcttaaaatcaaaatatataatagattaattagacggttggcttcagtttttttctcctctccttttctctcggttatacatttaatcaatttatcttggagcatgtataaagctagttcttacataagagccaacacccttatttaatattgttacctctcctctccatataagtttacagtagatttatagtttgctattatccttgctttaaggttgtgttctttctgcttccttcccaacttacctccctctcttttcacgcacacgtttttcaaaatactaaatggtgtgttttctgcaaaagttttatattgcaaagtttctttaaaaaaatcaagttttttggttaattcttaattaatcatgcgtttatgactagcactgttttttgtacgggtaggttatcgccgttgtgttcctcgccggctacaccttgctgcttcataggtttgtagctagcccaccaagattcggagaagagaggaaaggggaaaggaagaggtggacggaggaagaagataagacattttagtccaaaattttgataagtgcatgcaaagggtaaatagtggcatatctcgaattggtttaattaaaattttaatggcactagtccaaatacataaattataatggtattcttgtaaccggaaaagttatagtggcacatatccaattaatcctttcacaaatttgattcaagttggtacaagaaaatgaataagggtgtgtttaattcatgctaaaattgaaagtttggttgaaattggaacgatgtgatggaaaagttgaaagtttgtatgtgtagaaaagtttgatgtgatggaaaacttggaagtttgaagaaaaaatttggaactaaacttcggccttaaaaaaagaaagacgagggagggaggaagaagcaaccacaaagtccacaacctcacgcgattctatcacaaagattgttttcaggttttttttccccacaatggagcccacataataaaaagcaaaatcttactttgtcatctctaggttttgtgatggcaacccttaatgacttgatccagtagtggagctacaatttttccaaacctagagctcaattagttgaatgttatgatttttcttttatattctagtttttgaagttttaaaatggaatttcaatgaatatttaggatcaggagtagggctacagccctagttgccctactcctatcttcgcccctgacttgatacacatactagaaccacatgagggcaagagtgctcccgacgggtggcgccatacacatagggcttcataaggaatntgggggccagtgaanaatataaaactactatgtcctcttattcaatataactagaaagataattatgaatacaatccgaatataccttgtagtatcctattagaacttcatttctccttttttattcagaacacatccacatatgaggcttgatttcatattggatttgttatgtgatgggtcctatcgagttttagtacataagtaatgggatcccgtatttaggatactgacatatatattcactaaagttgcataatatatcaaggtagactcatgttttcaattaacgctaagaagaactatgtctagatgcagcgatttagttttgattaagtgaataaatggaaccttaacatctaaaacacaggttcatattgtcgtcatgatccatagttctttaaaatagtcatgattactatcaaacatttattagagctgattctttttcaaaaatatgaaaaaagtggtctttaaacatgttggaacttggaacacattggcatgaattaaaatatgaaaataattgaagcctctaacttttgggggcctgttatacagatcatctcgcacgtgcttatcgatggccctacatacaccatagcctaacctcttcaaaattgacaacaccacaacaatgtattgagtgctacttactttgtaacatactgtaagagacagcttgtgagttccttcatggattatacacatgagaacgtttgaaatagttgtttggatgaaacacaaacatatagtaattaaaaaactaaaaaagggaaaaaaaagctttgttcggaaactccaatgaaatatctcaaaaggaaatttgaagagtcacttatattccatatgactacctataattatctacgagatttaaattcttatggacacaaattcttcggataaatttacttgaactttggtgaaagaaccctaaacacatgtatgcatccagacaatggaaagcaagcgtgccatgagattttctatttgggccgtgtttagattaaaatttttttcttcaaacttccaactttttcgttacatcaaatgttaggacatatgcatggagttttaaatgtggacgaaaaaaatcaattgcatagtttgcatgtaaatcgcgagacgaatcctttgagcctaattacgccatgatttgacaatgtgatgctacagtaaacatttgctaatgacagattaattagacttaataaattcgtctcgtcttttacatgcggaatctgtaatttgttttgttattagtctatgtttgatacttcaaatatgtgttcgtatatttaaaaaaaatctagcacacgaactaaacacaaccttggatggccttctaagactgtctccaacaagtgacccataagagcacccaaacccaaaatgggtctccgatagtactatttcaacaaaagacccattttgcgtgctataagaggcataacctaaatctgagtatcctctctcctgaagacctatttgcagtaagtgttctcttttaggtcttattgttggagaagaccaaaaatatgtattgaactctttgactgtagcgctatgcaaacgtgaaatggttcttgtattatgggtttcattgttggagatagcctaagttgcttatccggttttattgcctgccatataagaaccccatcatccacatccgaagaggacatatttttgttgcaaaactttaaaattataataataatgtaactacaatataacataactagtacatgtaacgtttgttcaagcaattatactactaccatagtacgattgcgtataaagtttttcaattcaaaaatgttgctgccgttttctagatggtgaaaaacaaacttcacccatctccgacgaactacaaaaccctcagctcgatctccgcacagtcccgggccacgcccacaccaccctgatccgctcaccccttccaccacagggtccaggaggacctcgcccccctcctcctcctcgtcgcacgaccagaccagcagcaccaactccctttctgcctttcgctttcactgctcagtgctgctcctacacaccatttccccgtccgtccttcgccccccgcgtctcttttccgcacccatctgctgcagctgcgcacctttaatttgcagaaagaaagaaagaaagaaagaaaggaaagcaaggcccccccgagcgcaacagctagcccaacacacctcctccatcaccaccgagaaggcaacgcatatcaaaagcgcgggcgcaaagcaaagataacatcagatcaggtcggcgccccccgctcccggctgccgcaaagcccacccgatcgatcgatcgacgcctcgttctcctcctcctccgaggctactctctgcagggcgctcgcttacgtctgcctctgcgtacgtgcaccgcccagcgcgggcgccatgtcgtccgccgcggggggaggaggagggtacgggggcggaggcggcgagcatcagcatcagcagcagcagcaccacctgctgcttgggcaggcggcggggcagctgtaccacgtgccgcagcacagccggcgggagaagctgcggttcccgcccgaccacccggcggagtcgccgccgccgccgccgcccgggtcgtggccgctgcccccggcgttctactcctacgcgtcgtcctcgtcatcgtactcgccgcacagcccgacgctggcgcacgcgcagttggtggcgcatgggatgccgccgggggccgcgacgagcggaggggcccagatcccgagccagaacttcgcgctgtcgctgtcgtcggcgtcctcgaaccctccgcccacgccaaggaggcagtttggcggccccggcggcggcggcggggccgccgggccgtacgggcccttcacgggctacgccgccgtgctcgggcggtccaggttcttgggccccgcgcagaagctgctcgaggagatctgcgacgtcggcggccgccccgcgcagcttgacaggggctccgacgagggtttgctcgacgtagacgccatggacgccgcgggaagcgtcgaccacgagatggacggcagcgatcgcgccgtcgcggacgcggtcacggtctccggcgccgagcagcagtggaggaagactaggctcatctcgcttatggaagacgtgagtaatcgcaagctatatttgttgtttcatatcgctgcttctgtttttccaaagaaaatactatactagactttacttttgctaccctgcattaattaacttcatgaataagaatctaataacgaacacctcatggtcacatcatggatgcacttactgttgttgcacagattatttcttgtgcttgtgatttgatgagggttgatctggattagtgacacatctcttctcttttggatatatttttgttctttaatatgtctcaaatcaatcaacagttcaaggctcttttaagctcccttctaaaactagcaggaggtgatccgcagtttatctataatcaaaaggtagcatacaattctgtgaaaatgcacgatagaagctaaattcctcaggatgctcttaattacatcataaagaaaaattcagtttgctagtacttgataagattccagcagtttgtcctctttcacgagataagattcgttgagtttgtcagcagaaagattctgattatatagttactagtacatactgaaaatatgttgagcaccagttttttttatttgcaatggtgtcaaatatgatcctcgttccttaattaggaagcttgcgttggtgtagtgtccacatgatcgtaaagtaggtctgcacaccttgatgtattattaaacaattaattgggttacatatcgtgatgtcctcttaacagttacaaaaaaccttgtaggtttgcaagcgatacaggcaatactaccagcaactccaagctgtagtatcgtcctttgagactgttgcgggtctgagcaatgctgctccttttgcttccatggctcttaggacaatgtcgaagcatttcaagtatttgaagggcattatactgaaccagctgcgcaatacgggcaagggtgctacaaaagatggtctcggcaaggaagacacaacaaactttgggcttatgggcggcggcgctggcctactaaggggaaacaatgtgaattcgtttagccaacctcacaacatatggcgcccgcaaagagggctaccagagcgtgctgtttcggttcttcgtgcatggctattcgaacacttcctgcacccgtaagtatatgatataaatcatcgcaacagaatttttctttttaggtatgctaatctggaagcacataactgaatatgcgtattgtgcactaattggaaaaataaaaggaaaaaggactttatggtatatatactgcatgttgcatttttacaccgacaagggtgtacatggattcctattagtggagaattatccatagaccctacaaatgggtaatatgaaggatattgcaaccaaaccgttggtgaaaattgttattttgctttattgaaatcttggattttttttcctcctttagatgcattaaaatgattgtggttttagtgcatggtttacacaagtcattgttgtgcacttacaggggagtcttggtctccatcacatataacctttattgttgtttcaattttagatgtgattgccgttgaacaatcattagttgcatgttatgtttattggatacctgtatgggtcccaattgatatttggtttgagatgatactacaacaacttgaaagtgcattttattttccaccaatttagggcaaccattgtgtgtagtttctatccacacataccatatcttcattcttcttggcaacttctattttggtacagtttttcctacagtaaattcctccttttgtggccctgacgaaccattaattcatgtttgtactacatcagatagaaaatatatatagtagtacacagtttcaatttatacacgtggtcttgaaaacttcaatgtttactaatgcctattggatggatagtttactcgaaaagtgagtaccatcacatactaacacttgataattgtgtgtaccttcattttcattgtggttattgccttggcataatggaggagaatttttgccataggacatccaactgacttgctgacttgcacatggcaacaacctttttgctgtaatttaattaatttgttccatgcaataattgttgaaaatattgttttttaatctagaattctttcctatcctactacacgtaatgtgcaatgagggttggcttgttgtttatgtttagtttcatttgttcttccatattttgtatgtggtgcttcatccttgtgcaattgtgtatgtaccggcattctaatgttggtgcttgatttcaggtatccaactgacagcgataagcagatgcttgctaaacagacaggattaactaggaaccaggtaaacaaccatttcaagtttttcttttcccaaatttatatcgatgtaactagctagtccgctacagttgtccactagcaatatctttgggtccataatgttactagcgttgtaaaacattttgatatctcaattcttgagcaggtatcgaactggtttatcaatgcaagggttaggctctggaagccaatggttgaagaaattcacaacctcgagatgaggcagctgcagaagaatccgtctcttgacaagaatcagctctccatgcagcacacccaacattcgtcggacagcagcgggaagccctgtgatccatcaaactcgctgcaagggcaaagtagcagcatgaccaggaatcacagcatctccgcctcccggcacatcgaggacggcctctcccagatgccccatgacatctccggtcaggtgagcttcgcatacaacgggctcgccgcgcatcacagcatcgcgatggcgcaccaccaccaacctgacctcattggcaccggtggtgccgcgaatgctggcggtgtctcactcacccttggccttcaccagaacaataaccgagcttacattgctgagccccttccggccgcgcttccgctcaatcttgcccatcgtttcggactggaggacgttagtgatgcctacgtgatgagctcatttggtggtcaggaccggcatttcaccaaggagatcggtggccatttgctccatgactttgttggttgaagagcagatatgattgtttcaccaaggagatcggtggtgattattgtaggatgcagatgtatgatctacctatattgtagttggaagtaggaggtgaagaaaagaggggcattggcacgcctgtcgtagatccacgaatgcttgtcgatatttgacattgtggggctatagagagcatatgactatacctttgaagacctgtttgtagtgttgttccctatttgttctgatccgcggttaagccgtgttaaccctgtactattcatctgacttgcaaatgtggttgctcccactctggcaaataaagggtgctcagttaatttgtcgccagcaagatgaaatgtttattggcagtatacctatacagctgaaggccttaagcatcagcgtgtaggtctaaaatatgactgggtagctaaatatttcatcttactccatggttagcctttccatgtgctcctattaaactaagcaagcaaatgacagagtactaagctgtgctagatcttgtatccttagatggagtagaacctaaagtttagacaaaaccatgatttggccatctgccaacctttaactggctttgtcatcaccctaaccatatctgttagggctgagttgtgcctattgtaggttagcttttgccttgatcagtgcactaaacagctggccaattagccccatgaccatgatggagctagccaagcccttgttcttttttcacttctccccagcgtaaaaagcccatgttacctgggatcagttatccatggccctcggtgttgcagcatctgatttgatgtacactttggcaagcactgcaactagtactagtataactagcactgcaacagctggggggctccatgcacgttctttttcgcgtggagggaatccatgcacgtcaccgatcactactactactactacaactgctgctgctagtactcgtcctatacttctcccaaaagtgagcactgttcctgtttaaaaagggcactgttgttagctttcaattctaggctctggttcctgcatgggtagattattgcggtctgattctacatgccaactgaagaaatatgattccatgccttttccttcgtggataaagctggtagtaagagggtatgagctatcattaccactcatggaagctagcagaaactggagtttagctcagagctccactctcttcgtttgggagagagatgtgaaaaagaattaaagaaggctgcaagcgaagacactcttttctgtttggctactattaccactgatcattcctgaagtgaagctgagcccgctgtgaaatcaaaatcacgtgctaattcctcacatcagcagtgcttgagctcttcggtaatggactggctagttcaggatgatgagagctgtttgaattttggagcattgaggggcatctcgtgatgggatagagtttgctggttcagttgctttgttccttctattattgtcaaattttctcctggcaagaaatgacgggttaacatagcaatccacccaatctctatcatttcagtttgccaaggcaggtgtagaagaaggccagaaatgatcatccattgcagtgatccttgacgaaactgatactcctacattaccagcacaggcatccttttctcctccagcttcctgtacctccttcaagtacagataattattaacgcttttaaaatgaacctctcatttcttctttttttttctctgttaatcatgggccaaggggacaggagccaactcgaaaggcaaatggcctttttccgtagcctaatcttggagggtaatggggcggggttctcgttaagcatatgctctttccactcgttaagatatgggcgatttgatgatccgt

SEQ ID NO: 15382 - DNA, 6851 bp, Oryza sativa
caccaccaccaccaccaccaccaccgcttcttccttcttcccgcggatggcagtggcgcaacgtgcttttgccttggaaatgacatgcgctacagtcccgcatagaatatggattgcttttctcgggaaatgcaggcgatatggagactgcagtggagtaggagtactgaactgcagtgcacaggtgcaagtgagcgcccaagaaagcccaagtggattggcattggaggatggcttgttgttctgccagcctgcctaattagaatacggatttcagaactccttttttttactagtccagggaggcagggacaaccggacaactatgcggcattcgtttgagatttcttaccaaggtcaacgattcatcctgtaatttttcgttgtcgtgttgctataatgttatccataactaatactcaaactgacagctttaattagttctagcaaaaattaatattcaaactgacagctttaattagttcaagcaaaaactaatatttttagcggagctgaggagccctagtttgctctatcagccgtaaaaaataaacgaagcaaccagaaataattaaaaattgctatatgtaccacggtacgattttggtacgaccctcgtgcattattatccattggccatggaaacatgttgggccatatatttaaacatcgatcgcatgtcgattgttagagattttatcatatgtattgcagtgctcaaaatagtttatgttgaaacttttatactatttgagttcttaatgaaaccaatacttaaaattaaacttcgaccaaaaaaattcctcaaaattaattaaatttaaattttaactccacccgataagctaacaaacaaacgatacgtttgtagatgtaaacagagctagtaccagtatataaacttatgaataaaaataataataacagggagcgagtggtagcaagctctcattttctactcgatggtttattatagctttaacccaaaattaaaattaaaattttatcagggttatgaataacacatacataatagtagtcaattaagctcggcaggacccatcatatatcaagtcttatatgaaatcatatatcgtatataaaaggagttccggataagaaagaacaagaagagttctatatagaaactagattactcgaattgtatccatattggtctccttagttttacttggacaggggatatctatgggtataaatacaaggctccctagaaagagaggagacacggaacaatcagaatagacaacaatacacgtccccaaacatcgatataagagataagtctagacatacccaatctagtgcctacgaaggctgacaaaagggatctagtgctatctctgatcttgccgagtacgtattcgagaaggaagctagactacctcatcgtcgactacgtgttggttttccatgctgccaagtcgacaacgactagataggttattccaaatattgtacttgtgtgattctgatgaataagtcgacgacgactatataggttacttgtgtgattctgatgaataagagaaataccggcttcggccaatatgagtaggactattaactgattctaatgaataatgggcccgaacttatataaaaatccttgtctctgtctcttttatctcaatctcacatataccatggtaccaacgatccacataccatacaaataccgtagtcgtgatctaaagcattgacaaattttcaatttgatttcggggttctttttttttatcttagtctattttgccatctctgcttttaaaaccccagtaacataaaatatatataccaatttataaattagcatccatatgcataggtcaaaagatgagagccggccgtgttcatgtaaaaatcaggtggagtttacgttagcaataccatccggcatccaccgccttctacccagcatctgcgtgtttatgtttagatccatttgaaatggcaaatagtaaatgataaaaaatggcaaatagcaaatgataaaaaatggcaaatagcaaatgataaaagttttagtggtaaaagttttggcattgcaaaagtactagttggtgtttatgtttagatgtattctaaacttttgccattctagcactttttggtggagagagagagagagtagtcctaaaacacttttttgcataatttgctattataaactagcaaatggcaaattgccaacttttactactagtgtttagattcaaaatgataaaaggtgctctaaaatagcaaaacttttgctattttggaggatctaaacagggccgtagtgtgcttccgtaattccttatctgccgcatgatcgtgtacattatccctgcaaattttttttcgttgcaagacttctccgatatattagggttgtcaaaacttgacgcatacaataagctacttagtgcatgtacaatggtgtctaacaatgggctatcttcgttgccatgcaagtaaatttgatgatgtggaagaaagagagggaaggaaagacaaacatcgttgctatgcataacaatggctcagagtcgactcttagtatttattaatgggaagtttgttgcatgatggtggagaaaaaggaaagaagtataataaaaaaaatatttagtgcattaatgattaagagatcttactgattctactattgtatgaggatggtctctagtgacataaattaatatagaaaactcatatcagactctacctttatacatgcccttatagcatttcacagaaagccagatcatttttcgttggctggccaggttacgatcacacgaccactccgcagaattggcaacaagaaaccgggcccgcccgcggggatccaatttcccgcttctcgacggaaagcccaaccgaacacgcggcgctcccgtacacggggcaagggcaacgaagcaaaagcccacacctgcgcagtgtgtaccgtcgaacgcggcccatgcggcaacgggccgagctttttcgccgggccaacggggccgagctaacacggcgtacgtacaacagtgaagcaaacgagctcgccgtgctgcccagcccagtaataaacgacggatgaaaaaggctttcttgatagatgattctggaggcagctccgcagcagtaggcttggcaaggggagcaaggcagcaacggcttatgcgtcatggactcatggatgggttggcaaggtcgatcggtttcgatggcgcgcagcagatcgatcaaaggtagagcccgactgggatatggattggattccggttggatgagtttggataatgtaatttgatttggtaattatgttttctttaacgactcgcaatagacagtgtgaagtttatattgatagagtaggaaaaaaaatacaagattataaccctaggatgtcataactagggaaaaaagaaaaaaatgaccatcacccacgcaccgacagcaccaatacacatatctgggagaaggatagcaccgaatcggccatcgctaagcgtgactggccgccactaggccaacaaaggagttacaaccaggatcgcctaatgaccaccataacaaacgatgcaaaattacactctatccacgtcttcgggattgaggaagagggggtgagagagaagaatagaaccgctctcccctttaggtcctctgacatggccaacttgcataagtgttgacggtcattatagaccattttcgaccatcaacataactaaaatggaggagaactagctatgctggcaatgcatatctattttagaataatatattttcacttgtacttggagtatggagtattatttgtttgcatagattagcacataaatgaagaaaaaatgaagaaaaactcactcctaagcaagctcaaggaaagaggggacccacatgtcaggtgtaaccgtcctgaaacccacatgtcaggcccacctgtcaacatctctgccaaaattggaggcctgctgggtcagcccaggttcagccgaaccctggcagtggccgttcagctcgggcttacacgtggacgtataggattgcttgctaatggcggttgcggagcatttccgacatttcacatgctctacaaccgtcatacctacctatttaaggagttcttcatttcacttcactcgcacactcaagcaagaagctttgatctctctctcaagtttagtttagtgctctagtgctaagtggagtagaatataacagttctcggagtccttgagtcttcggaaggtttcgagtatggctctagtagtttttcttttttcttttgtaagactttcggaattaatagaatattattctttatatactttctatcgacgagtgatactcatagaccggatgatttgggttttggggtacgttggaacgaggatctacgtaatacgacatcaagcaaacagaagataaggattatactggttcaggcccttatcaggtaatagccctagtccagtttatatgaaattgatgacggaaaaccacatattgcaatagtagacgaaactggcgatactgtcgagatcgtagtcgaggtactctacgagatctcccagcgacttggttccgagtactccagcttcataaactatagtgggtgtgttggcgatgagattcaataccttgcacccctccctaggggtcccttttataccgtggatcatcttaattcccaagtaagactcggagacatcagatcttgtacgatataacagaaactctatcccttccgagtaagactttggaatttacttaacttgtagagatattttccataatttgtaacggattccaatgggaacaatctgcatacgtgaaggtatgccatatccgcatattccataagtcgtaggataggatgtatgccttatccgtaaccctgacactttcagtactttactttgcctgagtactggctttaatttatatttgtgccgatatagttgtatgactagcctaccagagaggtgtagtggtgtgggtttaatgttcatgcgaatgattgctccatattattctcgagtgtatagagtagtatttgataatcaaagcatggtgcttagattattagatatcattaattgggcatatatactatgggacagtagaggcgggtcgctgatggtgacagctcagtacgtgtattcttctacgttagtatatattcctaaggcactttcctaggaggatactcctccctatttagctccgattggatggccatgacaggttgtcgtaagaaactcgacaacccagggtactgctagggggtattggttacataactatatactagcaaatgtaaactaaagttgagtgtatattagaaatataaagatgattacctttctatctcttcttccacatagtctagaattatttaaacgagagaatctaagtccttctactttgtgtcactctacctttatgaactgaattaacccctacgcagactttgatacatacaagtaaggtatataacttattagcatatttctctgttataaatcttcccttgggattaaataaatacgataccttggaatatttctgggtgaaatgctacaatagtatatccgtgcgcttgcgaattgcttctgtaaccataaatatatcagggctattccgtgctgggaatttatatttctagtaatgtctttaagaaataccaacaataagctagggcgccgatataagaggtccgaaatctaaagacaacttttggaccggaagtctggaaggaaatcagtagggggttgccaagacgacgtctctagggagaggagtgacgaaacactgcgccgctgtccgtcaagggctcaaagtacacagagactgggttttcactcgacagcaccactagaggagatggaacggcacaacaacaccctcaaaagggaaaacgactagggatggcaatttcccccgcggggccgggtcccctgcggggacccgcccctacgggggcgggggcggggccgattttcaacccgtgggtgcgtcggggacggggacccgcatttaggcggggaggggacggggaactgatttcacccgcgggtgacccgcgggtgacccgcggggccccgggggtacatatagacctcaaaatatagatcaaagaaagcccaaaaagcccagcccactaaaaaaatccttaaccctagcagcacatccctcaatctctctcctccccacatccattcccttcccctcccgtgcggctgtggcgtgacctaggcggcggcgcgcgctcgtgggcggctcgcctttggatctcgccctctcggcgtcgccggcgcctgccagccgccaggccaccatctcctctcccctcctctccagtctcccctccggcgtccggcggctctagctcctcctctccctccggagtccgcggcggcggcacacagggcggcgccgcggcgggccggcggcggcgcacaggcgcggcggggaggcaacaccggcagcaagggcacggccggcggcacacagggctagggcggcggcacacagggcggcggcggcggcacatagggcggcaagaacacataatgatggatatcattaatatgtgttcttgctgaatttttatgatgaaattgaagtattcatgctatttttgatggtgtgtttattatgtacaatatttctttttgctgaaatgatgattgtgttgtattttttgagctgattggatggagatgctacccaatgcggggccccggtcgggttgcggggccccgcaggggtcgggggcgggggatgttttcaacccgcatcactggtcggggccgggggcggggggtgaagtcgggggtcggggt

SEQ ID NO: 15383 - DNA, 6055 bp, Oryza sativa
gtcgttcccaccgtcgatgatgcgtcacctcgcctcgacgcccgcgccaccgcttcacagttgcaccctaccgcctccacgtccacgctgcctcctctgcatccgcgtcaccgcctctgagggcagcctcccgtgccagggaggccgaaaccgaatctgccggcgtcgccacgccatcgtacgccacttctgcctcaggatgccacggtctgcaggcctccgcgcggcgcgtgtagcaccacagcgccgcgtccgcccacagctcaccggaggctcgttgacgctgcccccgcgcgcagcaccatgatgcagttgtcgcccacagctccactcgccagaggctcgtcgtcgcggccgtcctctcgcattggggaggccggatctaggcgggaaggggccagatctggcaggggcgctagatccagcattgccgcctcgccatcgccaccccagtccaccgtgacgccgacaccattgctcctcttcaacatcggcggccaggccgtcgcgccgtcactcctccttgcatccgcctgtcgccgctgcggctgtcgccggctcggagctggccgaggtcgttggcgccgaccctgtgcccatggaggagagagagaggccttgccgccgccgtccttgcaaccgtgtggttgccggcggcccgctcgggtagcggcgaggcggagggagggggtgggggtggtggcgccgcggcggcggtcgcctcccgtatcgcccctgcccctagagcgacacgggggaaagaaaaaatagaaaaaatgatttggtaattatggatagaatcctagtggaactagagttgtacacttataataagtaagatttttagtataaatagggagggatactatgtttttgagggtaagctatatttaagagattatagagttgatagctctttgtattatggaatgggggtgtatgtttagtagacggtccactgcaacatatgatggtccgatgtttttcgacctctcggtcatccgatccgttgttgcgtccttttgagtgtgaaaaacaaaatatgtgatatttctttcgtatacttcatgtttctagttaggcatataagagcccttttgaatcaaaggatttacgtaggaattttataggatttaaattctataggaaattttcctatttggccctttgattcaaaggattgaagctttccaaatcctatgaaattcctatggaatggcatattgcatgtagattttggaggaaatttatcaagagctccaacctcttgaaaaatttcctttgagtctatctctctcatccgattcctgcgtttttcctgcgctctaatcaaacgatcattcctatgtttttcatgtgttttgtaatcctctgttttacacttcaattcctgtagaatcctgtgttttttctatttctttgttttttctaccctgcgatttcaaggaggcctaagaggtcagggcggagcattttcctcgaggagaaaagagaaagagattaagatggaccatccatccagggggaatctcatcattcgacggccccggccggccatgccatccatcacacaccgttggcaacgctgggcagtagcagcctcccaaattggccaccgcacaggtcaatgacaatgataaagcctatactactacacagccatctgcatcacacacagtacacatcgcccaagctacaaccttctcccggatggatgcatactggacaagctatgctactacaactattctagacgactgctctagaaaataaaataacaaaaatactccggcctttggcttggcaagttgaccaccacatacaggtggctctggcccttggctcctccgaaagcctaatcttaaaattagattctggaagctaagcaagtcgattaggttaatccaacccggacaccttgctcctgccacatgacgattatattaatgcgtctcttggaaggcgcgtggcgctggtgcgatcccggtattactccctccgtctaacagcataaggattctgagttttgattacaacgtttgaccactcatcttatttaattttttttaaatattaaaaaatgaaaagttatgtttaaagtactgtaaataataaagtaaatcacaaataaaataaataataattttaaaaaaaaattaataaaacgagtggtcaaatattgcaagcaaaaatttaaaatctcttatattatagaacggagggagtattaaacctatcatcactactactctactcctcactagagcacaagcttagaacaaatgcttcagacagttacgagaatagccgtccgtcggatcagagatcaacggcggagattgccgttcgggtgtgaggtcacgatgactagccggtgatgtcgcgacgctgtgcgtgtgcgtggggaggtgtatagtttggtctcgaaaaggagaggcgaggaggacgccacgctccgcgcgagcatttgctgcgggagaggagataggctggcggtcgtcgcgtgtggcgcgcgcgcgcgtacgcagacgtttgcgtcgtttccttgcggatggaggcatcgtctgttgacgtactggttgatactacgacgctgtcaaaattcgtaaagtgagcggtgagcgctccaggttggaatcgtaaaaatatcttttgtgttccaaccgggattgacatatggaggcgtgaaggcatcaaggcaccatttcaaataaaagagtttgttctaattctcatgccaattggacagcgtgcataagagggaaattatgtgaggaacgtctagagatcttcctgctagctttataaggtggtgggctagacggtttagattcaaaacatcgtcctttctatttatttgatattatatcattctctaatattcgtgtttaagagggaagttatatgaaaacatttgagttttcactcttaggagggcaaggtttgaatgggtcagaaatgttcttttggtttaatttaccgtcttcttaattgtttttaggtaggagtacaacaacacgacaaacatatacggtttattcacaagtcttacaaatcgactgatttgatcggatactaagcagaacaacgtaaaaaatgaacgtggtttttcctttataaaaacaacttcaagtaaaatccctgcaaccacttaacgcatacggtgttcatggaatacgtcatgtaagactatggaccacatcagctcaccactcaaaacgagagtaacatgtacaccgagacgcgcacaatctgcagtgtgacagaggttaaccaccacaaacccctcaaccacattacagcagctcgcaggattccctgtccccgaccccatctcctccacgatacacacaatctccggcgaagaaaaatttctagaacactagctacaaaaacgttctaaaaacacaagcagcccacgcggactcctgtgtggactccacccacccacgcacgctgcatgccacgggcaggcgattagccgatacaattaacaacagcaaagaacaaaacaagaaaaaaaaaccgcggaataaagccgcgcgcaccaccaagacaaccaaccgagagaggaacccaactcccgcgattaaaatagcgattccgtcggaaccatccgctccgtggcccgcggggcccccgtgccgtgctccgctaagctaaaagccgcgccctttcgcttgcacccagcgccactactgctactgcgccagtattttttctatctattcgccgcgcgcgcgagagccagccaagccaaagccaaagcgaagaaagagcgcgtccgcgtcgtcgtcgtcgtccgcctgcctgcctgcctacccacgtcgcgctcgcgtgcgcgctgccgcttagtcgcgccaaaaaggcggggggaggggaggcgcgtgcctgcccccgatcgcatatcgcattctccactcgcttgcgtttgccgttgcgtttgcgttttgcgtagcaagggaagggagagagctcgtgcttttggattggccgcgatgagctgcgggggcgccgggcagagcgggtggctgctcgagtacgggctggtggaggaggagatccagggctccgacttcatctacatggtcgacgaccccgcggccgtctccaggtgcggtttcccccctcctgcttcctcttcctctctaacctacctctgctggtgtttgattcggatggattgccgtggattgcagcgtgctactgggcttcgacgttcccaggaaggaggacggcagcggcggccaggacaactctgcctccaagaaaaggtaggtgaaccctgataatttcctcttgttcttgctccgtccgtttcatattataagactttatagcattgcctatatttatatagatgttaataactctaaacatacaatgttagaaagtcttataatatgaaacggaggaagtaaacgtccgaacacttactccttccgttcaaaaaaaaaaaagataaacccatcgtggattcaaactcaggtttgtcttttttttttttgggagcggagacataattctgccaaagtctgatagtattgtgctatttctgctttgagttcgccggcaagttgtccggtttaattgagaggaaaagattgcagtaggtgaaaatagcctgtatgcatgactcactaaagttcctgattacatgtcctgttccccccatgtcgttgaatttaaaatatgatagaaagcatcatagagaatatctacagagtacagactacgtgcaagttcggtcgatgatagagaacaagtacatttacagaccttatttttattttttggatgattgggttgagggttttgttttgggttttcgtgttagctcgttgttcccctgattcaattaacttaagcagtccaagctgaaactttcaacaaaagaaatagaggctggctgttttgacaagcgtagtcgcccctgttttccccttgtgctgattcagtggtttacagcatcaagtcaagggtcggaattagctaggaaagttctactaaatcacggatgttaaacgcctaatgcattcacaattcacaaattctaggaccgtttctgcttagttgaaacccatgaccctaacttaccttttgttcttctaccggcagatctcgtccagaatcgagcgcaccgccgggcaccaaggcttgccgcgaaaagctccggcgagacaggctcaatgaaaggcatgtttcacactttcagttacatcacgttcaaaacaaagaaacttcaaagcatttgccactccaaatctgacgagcggctgaattatcttcaggttcaacgagctcagcgcgatcttggagcccggcaagccgccgagggccgacaaggtctccatcctgagcgacgccgcccgtctcctgagccagctgcgcgccgaggcccagaagctcaagagctcgaacgagtcgctccaggactccatcaagagcctcaaggtaagcagctgacacacacgttgctctcccaactgactcgattcacctgaagaaatgagagctgaggagttcactgtcactgcaggccgagaagtcggagctgcgtgacgagaagacgaggctcaaggccgagagggagaggctggagcaaatgctcaagggcgtcggcgccgccacaccggcggctccagcgccgttcgtcccgcaccacgccgcggcggtggcggccgcaccggcgtaccatccggcggcgttcgcgcaggccggcggcaagtacgtgccgtacgccaccagctacgcgccgccggccgcgttctggcagtggataccgccgacgtccctcgacacgtccaaggaccccgtgatgtggccgccggttgcatgatcagctgctgctgtcaccgaaaatgccgtagaaattgaccaaagagcacctgatgaaagcctcgggtgcagttatgtgattgtgttgtggataaatgatcaaggatcaagggatcaccagaagaaatttcctggtgatcattgctcgccggagcagtctatgtaacaacccaattgctaaagtaattaaggcaattattattacatcaagatggtg

SEQ ID NO: 15384 - DNA, 3424 bp, Oryza sativa
tagaagaaaagctgaatctgctagtagtaccaaatatatacatccacggtgatatgtcctagcatgaatgagaatgtggtatacaaagttctcagaactggctgcgttcgggaggaggcacgcaaaacaaagcatattttattgtataattaattaagtattaactattttttaaaaaaatagattaatatgtttttttaaaacaacttttatatagaatttttttataagtttaacagtttgaaaacagtgcgcgcgaaaaatgagatttgtgagttaggaaaacttggggaagaacacagcctgattttactttattacaacattggagcagcggaacctccaaaatattgctcagaactgaatttatttgtagtgtcacgtttgaaagcggaaccttctcagaactgaaagcggaaccccacaattagtgatgtgtatcagaacaaaaggggaagctcaagtagagcctcagctgaggaatctatgctaccaaatatatgcatccacggcgatatgtcgtagcatgattgaaaaagtggagatagcaattagtatatgtgcaatcacagatgttagtatcgctcattacaagcaacatagcgcgttggtacacaagttctcagaactgaatttacttattacatggagaagctgaacctccaaaatcttgctctcagaactgatgaatttatttttggtgtcacatttgaaagtgggacccccaaaatcaataatccatcggaatgccgcaataagatgcttgtacaagatgacaaaataaagtagtcaatccattcttaaaaggatattcacctactcctgaacaggctaaaaggagcatttgacctgcaaagtagtttcaggatgagtttatttatctccacttctctaatatataacatataaaaataagaaagagtcatatagcatatcatatgactgaaactgtttttattaaccaaactgcaagtatagcatatcatttgagtaggtaaacatggtaaatacactttctgtgaagaaggaaatcttgagaagatcacacattcaaagcaataagtgtattacttgcctcattgcaaaggaagactcttatgggtgtacacgacatccttgtcaccattcaccacttgcccacgccctcgcaagatcctgcatatcaaaattaatcataaaaatcaccaaggaaaacacgtcactttttaaccttctatacgatccaaaagcaacatataaatgtatatctaacataaacggggtgaattgccatacaaaaggcaagatgagatactgcaacagagacgattgattccataccatcgtgtagttaagagaccttcaacacccactggtccacgggcatggatacgccctgtgcttatgccaacctattcaagatattccaataagttcagcaattaagaaagaaaggtaaatggcatgtaaaatttgaagtacctcagcacccaatccaaaacgagccccatcagagaatctcgtacttgcattatgaaatacagcagcactgttcaaattgagaagtagaacagaacattagttaaacatccgttcatcataagttgacaggaaaataattgtgcatcaatagggaacaaataatgtaaccattaagtaataagggaattaatgtttaaacatacctatcaactctgcgtagaaaagtctctgctaccttatcatctgtagtgacgatacaatctgtatgagcactgaaacagatagaatatggaaatttgggttacattgaatctcattttttgtttaagaaaacaactagtactatgggataagggggagacaggagtcacaactattaggtaccttccataacgatgaatatggtcaattgctgattgaacatcatcaacaaactcaacagtgcaggccatagaactatactcatgatgaaatgaaacagcttttggaaatcccagagctttgtgcgcaataggtccaccataaatattaactcctgaaatatacagcattatctaagaagcagggagaaaatcatggccctgtatatacaagtaaaaaacaatccagtatccagaaacatactacatctgtgattatgtcatgttactttggttgcttttagcatcgaagtagtttctatatacatgcttgttaaccaatcacaatgtaaccaatcaaacttggttggaaattgttgccataagagaagggtcgcgtttgtattcatatattttcaagattttttgttgtttgtaatggtatttatcaccattaaatcacagtggttggtaatttaaagttgcaactgtttgtgatggtattgagcaaaattgcttcagaggggagccgtttctatagtataagagagtagaaaaacaaaccttctgtttttagtgctactaatatgtcgtcaaggcctggactcttcataagatccttatgaactagtaaggtctcctgcagaacatacatgtaaaataggctgttatctgaatataaaaaatggctacatgatgttcagaaaaattataaggtggaattatcaacatgctgaaaacagtagaagactatcaagatatgtagctaaattttcttacaaaggaaagaggaagttactactttgtaagaataagcattatgcaatcacaatataagtagttataaatcaatttaaacaattcaaaagtgcagttataactatcatctatcaataaaaatagtttgcatgagatagaagtggaggggctgtaataatctcaacagtactaaatgcatttttcagatgccagagaagaattgcaaccagagcatcatggttagaagagaatttgaaattgtccaaaatattcagtgaaagatactccaaaaagtaactgaaactgtaaaagcaatctatttgaatactatacacggtagcaaactggatagataccattgcattgcaggctgctgggtaatcaatttttgcatccattacaatatgttttgccatatccatgtcagctgatttgtcaatatatacgtggcatataccatctgcagtggggaaatatggaatgtcagaaatagcaaaaagaaaaaaaaactcaacatccaataaagccataagagtggtaagaacttaagttcaaacagaatttaccagcatgcccaagaacaggaatcttagttgacgccttgatttgagagacaagcttattacttcctcttggaatgacaagatcaatgacatcatcaagctgcacagtgtattacgggtttagccaaattggtagtatcaacgctttgaaaatatagaattgcatacacacctttagcaaatctgcgatctcatctctagttgtaacaaggccaataagtttttcaccaacattacgaggaatagcatcagttataacctagaaaagaataaatcgatgtt

SEQ ID NO: 15385 - DNA, 17287 bp, Oryza sativa
gcaatctaacaacaatgacacaaaattagttacttagaagtatatgtattctggaaaagaatggaacacagtgcattgccagaacaaaatacctgaaccaaggcatcaggtcgggactcaaaaacaattaagagaacacctaatgggcaagatgttttctcaagaactaaatcatcagcaacctggcaaaggggaaatctttttgttaaaatcactatggatatatcatctagaatctagaatttctgtgaaatctcatagcagatttctattaaaaagagtttctattaaaaaggctggcattcacctctgtctttttaagtatctggtttatagggtcttccatatttgcaagggtacgaatagattttgcaaggcttgctatctgcaaaaacataaaatataatatgagttaaacaagacaacatacataagaaaagagaagtgtcagatatttaacaaatcagttaatttggcaaggaaaatgaggggtccacctttcctggttttatagtcaatctagcaaccaaaggcttctcatatccagcaacttgggccgcagctacatcagcttcattctcagaccttattaaatcctcatttgcctccaaagcatctgcaacatctagcaatatcttttttcgttcctctgatgacaaattctgtttcaaacgaacatatggtatcagactagtatcacgggtgagcaaaaatagtgagctaaaacttgaaatagtgtgtaactccactgggcataacagagggacaagaattacgtatgatttgacaaagatatatacctgtagatgccttgaacaatctcttgcggcaacagccatctcacgagtactaacatccttagatgattcccacaaattcgcattcttgtgaaagagagtaccaattttttccccatgaagaactttaagaatgctccgattttcaaacccacttcaaggatagaaaaaaataaactatttctccattcattaagaagataaaaatagcttgcaactcatgaacttggttatctcagtgataattagcttcaacacaacaagataatcatttgaatttgatgtgcagtacattacaagcattaaatgtctgaaccatcataagcaaagtttcaacgtaacatgcaaggtcatataggtctcaaaacaaatcatttttttagcgtaaactaggggtgtttaaagtcagaacagctcatccattaatgccacgaagctaacattcaagcactggactgcatctcattcaagatgttataattgaggccaagtggagttgttgggattggatgtcttgtaggacttaataatcttcacattagaaataaactcatgcaaaaaaatctggcaatgacataatccaaccagaacacctgcagatggtactgattgctagttgcacttgacaggaaatttgacaatacatatataatggagtgcatctgattgatgctagcagtcatatccattatactctagggaatagattgtttaccttgtaataaccacaggtgtgccgctatttgaagccaagacagcagccttcacttttgctgtcatgcctcctctacctacacgagatttgtctccaaaagtgatttcttgctgatgcttttctttaatataagtgtgtatgatttttgatgatggttcacttggtggaccactatacaacccatccacatcactgagcagaataaggagatcagctttcagttccagtgccaacagtcctgctaaactgtcattatcccagaatataccagatgaatcctgtaaaagaattataggtgagtgtggttagaaagtcatggctatttgcatatacactgacaaggccctagggctaggcatacaagcagtataacaataagtagcagctaaagagcagcaccacgcaaaaactgaagtttcatacttttccaggagatgtatggtatgaaacacacttacatacctcatatggagcctttctagtgctgatggcatcattttcattaaatattggtataactttaagatctaataatgactcaacagtttcagtgagttgctcccggaactttgggttctcaaaatcactgtcggtgacaagaagttgagatgacgagacatccagctgcaatgcaagaagttcaaggttacaaaaagatacaaaaagtaacctattcatttttgttgaagttgaatgccagactaataaacacacttggttaaacaacatatcgtaaagagccatcagtccactctgaccaacagcggcacaagcctttccatctaactccatctgtggcttttgcagatcagcaaagctgctattgacaagcttccggtacctaagtcgctgtcgccccactccaacagcacctgaggtgaccaaaatcacttcgtatcctaaagagttcagttccttaacctgcattgccacttttctttggttaggcacctgccaacatatccaacactacatagccattgcagaacagctcacaagatcaaaaaaatggatttcttttacctgctcgcacagagctccaaccctgcccaaagccaatcttccatcttgtctggagacaactgcagtgcccacctgtcatgcaaaaaaggaattagccgcacagagataaaaacattattattatattattattatgtactggtacagtggtacatcttgtgttgaaggtattgcgttgaggttccacaaaactgctaggcttttctaaagcctaaacgcttttccaaagcctaaactcaaaagcaacggtatttgattctacattattcgattctcatcacctttccaattcagacattatttcaccagttccgcatattttttataaaaaaattggaaaaagcatgggatttgaacaaataaaaagtgtcacagatgaaacaaacacgaatttgtgagagcgatcgcaagggacagaaatttgccgaacgctccaatataagatactatgtctcttttctatttctgtgccattccacccaccaattcccatctgacagaaatccgctgccccgcagcgaaatagccaacagttttcccatgatgatgcctaccagagtcgaaagattggcaacttcgacataggccgtcacatcaagtaaaccacagaaaagcccaagcaaagccccactcctgataatctaacaacgagaatcccaaatcaaacgtctctcgagtcttcaactctgaacaaaacactcgcccggtaaatttgatccagaaacaatctcacgaatacggagaagaggagcgcaaacaatgcaaacagcgcccaagcagacgcgcacgaatcctcggaaactagatctatcaaggtcaatccgtgacggcgactcctgcgacccagcggccaaacaaaaatcaccttgatgatgacgcgcttcacgtccctcacgaagctccgggacgggtcgacgctcgccatggcgaaaccgcttcctagcctcagcctctcctcctccaccctctccctctacctgtaaatccctctcccacgtctcgccgccttgccgccgcagccgcgagtagaggggggatagataggaggaggagaaaagaggaagggtttatgaaggcagaagtggctctggctcccgtgaccggaaaggcggaaacccagggcgcaaaatgcccaacgacccccgggatcctctgcgcccgcgcccgccacacggtatgcgtgttactgtgacttgttaagctgttaaagctgttaggtggcggcgcaccgagatacaggggggaatggggtcgttggcccagaccgatccatccgtcgttttggcacgagaaaacgtgagccgctcagccgcgcgagcgcggataagccggggaatagatatccatatcccggtgcggggggcgcctcgcgcgtgcgggtgcaggtgtatggcgcgcgtgacgtgcactgtcccgatcgcgcggcggcgacggggcggagcgttttgtaccgtgacaactgacaagcccggatcggacgggggggcgaatgggctcgtcgcacggggagcggcggcacgccacccagaccgatcgatcctgctagaatcgttgttttggcacgagagaacgtgaggcacgcatgcatcgagcaggggccgccgcgtcacggctttgggagaggatttccgcgcgcggatgagcagccgggatatatgcggtgacggtgagccggtgcgggtgcgcgcctctatcgcacgggcacggtgcgtgcaggtgtatggcgcgtttttgcttgggtgagtttcgtgcagcgatcgatcgggcggggaggggaggggggccgggcgctcgtggtggactctggactggacgtctggacacggcgctaccacctagtactcctacagtcctactagtactacgctacgcgctgcttcgctgtgcacgcgacaagagttttggtagagacgggagggaatctgccgcggtgtgcaagccgacgagagaggccgcgcagcggcgcaggtgaggtgaatggtgatatgcctgacaccggcgggcggcaacgagatccacttggagcggctgatttggcatttctcggtaaaccgcgacaaaaagtcgcaggactttgctcgcgtcgcgttgaaggacgtggcagcagcagcacgtacgtcgccgctcgacgactttacgagcggagagtcaggggctcacggtcacggtattggccgcggtggaggcgcagcctcgcataacacggtgccattcacgaaagcgtaccgtgggttcatgccctctccatttaggcccggtttcttttaacttgggattattataatctaaattattaggagtaagttgaaagaaacagacaacttattaaagtagtttattataatttaaagcctagcttattataatttgataagctcatttagatgagcttttttccagattatttggtgaaaaattacccaccataccaccccactccttctttagacttgcaaatccaataatctaggctctaataatctagaaacgaaacaactaaccgcttattctactacagattataacaatctagcttatagtaatctgacctaataatctagattataataatcttaagctggaagaaacagggactttaataagcttactagttaatatcccacgctttgctacagaacatattgatgaacacatgttacatattatagaaatggtacatgtatacgtttaaataatataaaaataatgtgaagataacgacttggcattgcttcgatattgaattatgaaaataaaacaaaattataaaataaaacgtatgtcatatttacatgatatttaaaataatttaaataataattactaatgggtgatgatgtgacgcacttgtatgtgatttaaaataccatagataataattgctaatggatgatatggtacacttgcatgttgagatttaaaagttagtgggcatcaactttatagcaaaacatgggtatgtttcattaatcagtaagtagccagaaatctaaaaaatattatcgataagcgctccaacgaatccaactttttaaaaataccatcgtataagcacatttatcccaaaaatataatcattgttaggttttcattagcaattattcgttaaagtgttataaaaagatcatttttacttctacgaattgttaaatgatgattaaaatttttgctctttttattagcttacattaatttggaattaaatttaaaatatactgttcatttgggtttttttaaaaaatattcgacagcgaacggtctcgctacttccttccttgtgcgacagcgaatgttttgcccagtgagctgttgtttaattagtaactaattacccgattaataattaattagtaattaggaataattattataattaacgattaattgataattattaatcattaatgaggataattaatcaatttgaatgttcggtctcgctcgccggtaatgcgagagcgctcaatttaatcatttccgtgcaacggttcagcgagatcgatggtatattttcgttaaacaatttgcataccgaatacttttttaaaaaagccaaataaacagtaaatttttaaatttaattccattaatttgtatgttgctatttatactaaattattgtaagttgacgtaaatagcaaaagtttttatcagcttttaccattttgtagggttgctaacggaaacataacgaaacccgccgtagtcacctccttgccaccactgcctcggtgccagctgtgtcctagcgacaacggcaccatggacgacaacaagctccaccatggcaaccttcctcgtgccgcccattgcgtggtcaccacccttgccaactccgcccgttggggggccatccttcggcctctgctctagaccgctaccgttgtcgggtcttatccataacagtatagtggggtggctttgtctgacatggcaatttgacccaagtcaacaacgctgagtcattgtggacaacatatgtcacaacctcttacctatctctctcttcctcccctattcccatctcagcggtgcctggtgaggaagacgacgtctggcggcgggtcgacgatgggcggaggtggcaatgaagggactacggcgggtacttgagggacctgttgtgtctgatatttcggttgaagatgaaaatcgaactaagctgtcaaattaagggtcctaaaatgaacttattcaaccacctaaaccagtccgatatcctatttgccaagctcacggcccagtacgcgaacccgtccgtcgtccgccacggggccaccacgccgcccgcaccgcacgcgcacggcaagcaagcgaaccaagcgaagaaaagcacacatattcctctcctccctgttcgattcccctcctctccacgcctccgcggtgtccaaactccagactcccccaaaaaatcccccaaaaccgaagggaaagaggaaaaaaattactcttcgctctcgcgtcgcgcacgacacgaccgagccagcaaagccgcccatccgccatcccgccgctcctgcaatctacagccgcgtcgccgcttgtccgcctgcgctcgttctcgctagggttcggaagggggagggtggggatcgcccggcgatggactggagcgcggtgacggcggaggacctggtggacgcgctgcgggaggtggactggtcgacgccgccgcgccccgtgccggagttcttctcccgcttcaccgtcccccgctcctactccaagtggaccagccgcctcaagtgcaacctctactagtacgatctcccttcctcacttcctaattgcccgtcccacgatttgttgggaacttgggggtttctatgtcgagattggcgttaaatccgagcggatttgagcgcggagcccgattgttggtgttttcagtgaattagtagtggatcgagcacttcttttcctctctagccagtagaatagtagaataagggtatatgcgtgcgcatcgagacctattttgtggtttgatagcccaaggaaatggtgttgtaacgttcaggtaatgtagccatatagtaggtgaatccaacatcgtattatgctcagcatgttcaatggggacaaaaggaatcacataaacggccagtatattaccttattaggctgtgagctagttgtttcgaaatttctgatgaattcatagcatgcgaagtaggttatgcttgtttgtggcatatgatatgttggagtagtatttgatgaaaacacaaaacaaggtttgtaggtttagcttccccaggctaccatcaactatcggttctaattatgttatccatgatatcatgatcttcagcatatttatcatcaactatcgattctgcttagtggcaattttagccaaggcgctaagcgctagttaggcagcagaccagcacctggcacctaattggtgatcatgtggacctaagcaggattggccagccacctagtcaggataactcaataggcaggctaggcgtccgtatatgcaaggaaattgtgcattttgatgtaagagcaaaatttttaattgttaggttaacctgaatcttatttcgttttgtacttgttccggagatgctgggtgttcttgctggagtgctgtactccatgaaatccgtgagatgaacagggtgcattagaatttttatttatttactacttacttaaaaatcagttgaacacagaatctcagattgaagatggtaagtggtgcaaccacagtttttgctgtacttaatgttgagacattaagtgtttctgataactaaagtgattggcaaagtagtgtttctgtcagaaaacatgccatgttgaacatacatctaagtcaaatgttcaaagctgtgagtacgaaaatgttttaaatgtttggggtttgggtttgatacataaaaattcatatctgtagatttatcttgaaagtactgtcagatatttccataaaaaaactttcagatactagagttttattgggttttgcacatattttacgttataattttttgctttttgtattctggagaacgtgcgaatgtccaaaaccacatgttctcattactggatgttgtattaactatcctcctaaaaggcaccaattcatgtgttcagactttttacaagttcctcacgacagatttaagggttgtatagttatcattttatcttgtactgaatttccctcatttatttggtctgcagctacaggacaaattacttcatcttgatcatgttcatccttggtaggcaaaaaaagcttgaatgctgtctcttattcctcattcggttgattttgacatgctgcctttgttatatgcagggataggcttcatttggaagccggttgctatacttgcagcctttatgactggaatcagcattgcatttcttaatgacaggtacaatttacttaactactctctccgttttagaatttaagatgttttggttttgtactaggtcaaacttagataagtttgatcaagttagtacgaaaatgtaataacatctacagcaccaaattaatttcattaaattcaacattgaatataatacaaagccaaaacatctaacattctggaacagagggaataataccatcctttttctctagaaaattcttccatttagatgagtaaagaacaatattttgttttcttaacaaaggtagtgtatctttgagataaaacataattacatcaaatatttgtctaactgtcctgaaatattgctaaggatgtgttgtcttagcactacttccaaaaggattagtgaataatacatctgcaggatgtttttccttgtatcagttgtgatacagttctcaaattccttagtcatctccgtacattattttgtgacaaactgacactgagtgatttacactttgatcataggatgattaatagactaattatcatgtttgatacttcagctttgcagtcactttcaatgagaaagtcacgaggactgtcagacaattttcaccacatttagctgcaaaaatgaggccaccaataacgtgaggattttaatttttcatattctattttctttattttgtcgtgattcaccagagtgtgttattaatactattctcaacatcatcgacagccctgttcttcgtggtagaccaagttcaaagaggtcgattcatatttgtgggcgacctcgctggctatttgtgctgttattttctgcaggtgtgcaccacagcaaattgtcttcgtattatcttatttcacataccatagttttgaaaacctgaagctaatgctttttctatttttatttgcagttagttgcatgctctggttgacttcctgcagtctcctcacagttctatgggcccttttaattgctatctttggtaggatgattgagattttgaattttcaaagatagatatacatcttgggactgcacttatagttcttttttttgtttttttgtttgcagcaactctgcttcatgctagcttcagaacacctaatctgaaagcacgtctgaatacattcagagaagaattccgagctgtttggaggaattatagtgagctttaaggtccgtgtgtatctaaccctacgtttgtgcaggacctcagtttgtctatacctaatgctttatgcgccatttcgtgttgtattgtcactatttggttaaagttggttaaaacttggagcttgtttggtttctctatgcaggttcatgtggtaagaagtgcttagtgctgaaacttcgtgctgtttgtgaattgtgtttgtgggagataccaagatatgaacaatggtgacaggcagctgcgttctattgtgattacttgctcgttttggaggtgggccttgactgtctaagtacatgatgatgttacacttggtacgccaccttccaaatcactataattgttcacatggaattctccctaaccaagcattggaaaaagaacagcatgtaaaggatgtaaacaagtattctaatcaacacagcatatattgtttgttgaaatgtttgtttcatgtttcccccagcagtttgaaccattctagataaattcgccaccaaatttttcggttgcctctcgggaagtattagatcgtgaatgttgagatgaagcaagatcgttagctaaaaacagcgcgtcagcttcttcaatcattaaccatgagctattcgacacaccaacagtactgccttgcacattgctttattactctgattggaaaaggcatcgtcaacattttttcccatggagtatcaagaaatctgtaagatataattgaaaacattaaacatgcatattcccaacaaattgtaaacgtggatggacgtgaactaatcctatattcaacatgacaacacaaaatggataattacaaaacgataagttccgaagggagaatctcgaacgaggcaatctacaggtgaacgtgaactcgactgttcctgactcccaagtcaaaagcgctcgaatcctcggaaatttcagcttacgccaatccctctcgtggaggtagaacagcagctgcgataattagcatagttaagtcgcgaagcttctatcgccggcatctcccaaccccggaactatgaacctgtgggaacaaataagacatggaagttattaaaatccactgaaatatggtcacgacctacaggcacgaagcatattttgcaggataagcagataaatagaaattcataagttaccctctctcatcaacttcagaatcaattgttcccgtgtacacatgaagcctagaacaaaaaaaatcgaaaaaaaggtaactctatttagtaaacaagaggaacttgtcatgcacacaaatatgtcttgtgttatctattcttacccagggaatttgttgctgagcttttgaagcgcaggaggcgctgcaacagcagaaacctgcatcaggaatacaaagaagtgtcaggttgatagaatggacaattaatacccgaaaacatgtactccctcctccgtttcacaatgtaaatcattctagcattttctacattcatattgatgttaatgaatcattaacatcaatatgaatgtgggaaatgctagaatgaattacattgtgaaacggaggaagtaagtttaatgaacttacgactttaatctgcttgcttgtaactccacgttcaaccaacaagtcaatagcagcaacaattgtcccacctagaggaataggaggaataggtcaaatgtatctcagggaaaaatgactcattatagttatgataggagaaacattctgcttacacaagaccaatttatatttgtactagctactaacaccaataattaggttatgaaaagttatatatgcaatggtacaatccacgaactttgcagtatggtctcaaaaatgctatagcactgcaataaacagagcaagagtgccacgagagcccaagatttagcacactggagcttagcatttgaccacaagaatcacaacaatcagctgtttaaaatgggttcatgagacactaaactaaaagagttgcaaaagcaaatcttagtgtataatctatagtctaaaagatcataaacacaattgtttgaagttgaaaagtttgtggtgataaaaacttgctggcagaataccatgtctcacgtgtagaccaatgaagggcgttttgttttgtgttagtgaagcaagccaagttaaggagtaggagtatatgggatgaggctagaacagaggcttcatgatttgagcattatatatttgtcaaacattgcatgaccaatccaattcgttttcaactcagttgtaaaggagagatgctgttctttcctaacagaaatggagaatattcaaattctcatgcctcaggcaacacattgactttatgccacatttggcattcctcagatgtattcagtacttgagatgacactctgtaatatgcatgtaacatagaacaagaaatacatttatcgcttggttttgaaattgcattgcttattcaagttatttattgctcttgtgcatacagagcttgtgaattgcaaagaagaaccttaggcagcacataaattgttcagaagagctaaaaattaccagtggccagcattggatcaacaactagcacacgagtcccctctggaatcttgtctggcaagctgcattaaattagagtggaaaaggggaaatgaaagttactggagaacaccaattggcctggatatttaaattctttctgaacaacaaggaaaaaacagcaaaacagctggtatgaaagggaaaggaaatttattatcacaatccatcattcttactgttacaagtcaccagtatatataatcaagatagcctaggtttctcctatagtaattttaccacagaactaaagaacgccaagaactttgcattttgtaatattctggaatgcaattgagactagagcctggccatcaagcatatacacttttgtgaactaaaatcaaggatggcgatttacaaaagcagtatgaaaactagatgtttgcaagaagagaaggaacttagcacatacttgttcagatatatcgaaggttgaagtgtttcttcatccctacgcaggccttcaagttcagtgagacagacagataagaataattgcacatagttttgaagatgtatgttaatttggataagtagttgacaaagaactatgcaatattggatttaagagacatgcaaataacttcgattagatttcttttcatactagttgctaaatgcaaaaaaaaagagcttatttttcaaaaaaacatcattagaaagcagaataataatgtggcttggttgaagtagaaaatatctagggtctattatgcatatttcaactttatgtttctggcctcatccatgcatgcatatccagcattggtacttagggaactaaaacaaatgagtgattttacggctcttgaagaggtaccacattttctactgtaaaatttaataccctctcgatacctccggtactaggaggtaccaaaatttacattaaaaatattggtacctctcggtacctctcaaggactgtaaaattactcaaaacaaattgggttagattgcatgagtgtcaaccgtgcaatctatgtaacagctatgtgagcacaaaagttgatatactttatacatttgattctaattcagtaaacttcacataaccaacttaccaaggtgataagtcttggtggctggtagaactgatgaagcattttcagccatagcaagaccagctcttagtatcggaacaacctgttaaacatgctaatgaaaagactaaatatatttgtagaaaaaacaaatgccattgacacatctaacactaaggattagatttaccatgacaggctctcttgggtcaataaattcaacacttgaaacagctacaggtgtttggatctctcctgtgattgttggctgcaaaagttttagaacaatttagcatggcatcattctctcaacaatgaaatgtctattgactggcaaataaaaatcatgactaatatttacacttttttttatagagcaatatgcatctgtcaaagttgaaatatgtgtatatgaaaaaaaaatgcaaaaaaggcgcaaaatggaagcattatgagttacaataacaacttaagatatttgtgcattcaccgttttacaaggtatcaattatccatgcaatttcaatacttaggcacatatatcccttatatagcctaatttcaacttccaaagcatcagaaatgtaagatggatcctagaaaattaacggataaacgatcagccaagcgagtttcccactcaccagccaatctctggaagcttcatatataagcaaccgaccaagctccgccatggcactctctaccacaaaaacagattgctcaatgttatcctatcaaaactttatcgcaacaattagccaattaaatcagctgtgtaaaacacatttttcgtatcgccatcacttcaccactatcaagtatcaacacgctaatccacggcttcgctttaacgaattgtttcagattccacgtttctcagtaatactatcaagtaccaactcatacgtcattcagaagcacactcactgaagatggcgcagggcgtctgctcgttgcgcaggacggagacccagtgctttatcagcgggtgcggcggcacgaacacctgcgagacaaaaacatcacgaggccacccactttgagcttagcgcgcacgtgcacaaacgaattgacaaggacaagcagaggcagcgtcatcgagagagagagagagagagagagagagagagagagccagatccgcaccagcatctggccgccggaggagggcgatcgcgcccccgtggcggcgtcggggctcgccgctcttgccgccgtcagaggcgctcttggccttcgttggacgagccgcaggatgggggcggtggcggcgaagcgcgtggacgtggcgagcgcgggggaggggagggaggaggaggaggaggaggaggcgtgcgcggattggcggcgtggtgcgcacgggccgcggcggagaggcgctcccgctcccgcggccgcggccgtggcgagcgacggcatggcgaattggcgaaggacgaggtgcggatgcgggggacgaaagcgagggcagtgaggtgagcgaggtgtgggatacggtggggtcgtcgctcttgtgttctgacgcaaatctcgaggtgctctcatcaccgttcagacttcagaggcttcagccacgtatgtgttgggagtttgcgataatttttggaaattggtgatacccgacgtataaagacaacactcgatatctaaataatactacctccgtcccaaaataaatgcagccgtagatatctgtgtccaacgtttgaccgtccgtcttatttgaaaaatttgtgaaaaaattgaaaatatttagtcacacataaaatactattcatgttttatcatctaatagcaataaaaatactaatcataaaaaaattttaaataagacgagtggtcaaacgttgaacgtgaataatacaaaactgcacttattttgggatggagggtgtacatcagtatattatattaaaaaataaaattatttgtttggtaccgagttcactataatactcaatataaactggtagaatatgtgttaatcaatgtacttcaatttacacttaaaatattgagacaattattatataggtcacgtttgagcgggataatgcctattaggtattaaaacttaagcttcgtgctggcccttaagatagtgatgatatcaaatcacatgcctccatagccatctcaaactccacatcgctatcttagtctcgtcgaatcccatgttatcgcaatcctctcttctcattgagcttagccagattaatgttgtcggtggtggctctgctactttcatcgtagtagggaggaggcggttgggtaggaggggcatcaataaccatactctatcaacaaatcaacgttgttggtggagagaggtcaagcttcggctccgttacatctgctgtgctcggttgaggaggcgacgacaaattctgaacttgattttggtggaggcggtggagcctacgtctcactcgccttctcgcctctccatacccactcaagaggatactgcatgaactggttccctagtattcctatgaaatgtttaatgttggtgtggacagtgataggagctctagaacacatacaaaatgaccattttatcttacatgtatttgtcaaagtagggtaaaaaagacaatggataaatattgatcacaacgtcaaactcgttgagagtttgagaggggaaaagaatgctatacgatgattcattatatcaacaaatatgcgatactctaccgaatataaaaaaaaaattccttagagatgatcttccacagagttcgcggcataatagcatataatattgttttgtataagctgaaattctggctcatctatatatacgtgagacaaaatttttagcgcaaaaatggaaaaatcaaaatccaacgcgtagatagataggctcggcccatccaaaggctttgattggctatccccaacggcgatagtgggccaacgtttttgtgcataggctaccaaatctaaccgcggcaccaacacaccaagcctcgtgacacctccttcctctcgaagcaaagccgaggacgtacgacgacgacttccccacggccagagttcccctctttccccttcccaatcctccgatctcatcccccggctccggcgacgcggcggggcgatgcgtagctgctgagcgcgcggcgccacgaccccccccacctcgagagcgcggccatggacgagggctacgccaacctccccaccagccacctcctcggctccgtccccgtaaccgatcccctccctcccccctcctcctatccgcttcgcgtgtctcgttttttgtgtgatgttatgtggtgtgatgattcgggtgtgatggtttctgtaggccgccttgacccccgaagagaggaagccctcacccgtcgccgaaggtagcaaccccccctcgattgcgtgttgggtttcaaggttagtgccattgcgattgtcacggattgctgattaggtttcggttggaaatgcagttggcacctcgcgtctgcagcagtttcctcctgctcttggtggtactggtggtgttggtggaggaggaggagggtaccagcctccagggacccctgcaagtaacaacaggtcgcagcgttaaaagcg

SEQ ID NO: 15386 - DNA, 8754 bp, Oryza sativa
aattcctgcagcccatggaaatgatgggttcaagagcacatcgcactccggaagaaataattttcgttgcttagcttagtgatggcgttatattctatttcatttcgaatgaactacgtcccatgattttcctcccgaatactattaatatggctgcaaagtattaccctggtactgctttgatgttttcttttaaggttcatgtgcaaaaaagtacttagggagttagggtagagcaaggctcacaaaacagcaatatgttgattggatagagtagctccatagaaataaatcttgcagtgtgatttttttatcttgtagatagccaagaacctcagagcatcatttgcttgaattatttgtttgaggtggctgttgtatggagtgctgcctagtgtgcactaaacaaaatgctcagatcctcagagaaaaatatgatagtggactagtggtattctaaccatttccaactgatgcaagaactacaccttctttttcgttatatattactttcaaatttgatccctgtcaattgttatgtttcagttagtgcaatgattgcactttactcaaagctggatcttagatggtatgatactgattatcttttcccatgtgttgctccttacttttgcagatggagatgtagaaactcaaacaaattggaaaggatacttcaatgttgcatcttatgctccatatttcaatgttgatactgatgttgtagttgacaggctcatcagctcggtttatccaatggatgggtttttcaggaagattgatgctaatcctgacatgtaagtatctcctattaggctattaccaatctgtggtcacccttcacgtttaaaaaattcgaccttaagtacctgctggtattgatgtcataatttctaatgaatggattcatgatgataggatacaattacagcgaaggatcatagaattgtttgtctacattatataatgtgttgttaatgtgcaagtgatgttttaagttgcatataacatgccataaatatgttttgaagcagtttcagcgtgacatagacatttggataggtgaagtactgtatattttacaaaactatgttgtaacagtgctaaggcatatgctgcaataatcgagattatttatctaggactagaagcatgattttaaggaggagaaggacatgcaggttttttcaagggacttttgacccattgttgtattggtgcatttctgtagtaactcatctatgcttttgcattgtaataattttgatacctggagccaacttattcatatgcgataaatcattctgctgtttgcaggtatgggcccttatggatcacaacaacactgatattcatgctagctgcatttggaaactttgccacttatctgatgcaaaggaaaacagacctgaacatatggagctttgatgttggctatttcaactgggcagcatcggtcatgtatggttatgctgccgcagtgcctgctatattctttttcctgtttcagtattttggatcacgcccaagccttgttcggttttggtgcatgtggggatactctctgtttatcttcatcccagcatctgtaagtattcacagtaatccatttctttgatggttcggagatgtagtctcagaaataactgtcagtgaaaataatccatgatgtaccagcatttaggcttgcacctcctgctcctgctcaagaaggctgctatgtctaatgcaggcactaattttctttgcttcaggtactgttacttattcctgtggaatttcttcgatgggtcatcataatccttgttggtggtgcttcatcttggttcatctccttaaacttaaaggaatgtactgagggagctgatatgatggttttgattgctagtgctgcagtgctccagtttactctggcactgttcatcaaagttttctttttcgcctgagattgtcttttggtgttgctcaggtctgcctctcttttttaccttctacgactagataccatagcatcataaccttcccaacagtacacagaccacgcctttatgaattttatttagtagtcttttattgtagcagttcattatcaaattgggttaaaatattctaatacattatattttgcttttgacaggtgagcttgatgttttgtctgctccaatcattctgttctggcgagcatccttttgaggaccaagcggagtagttttacttgacatacatattgacactagattgatagacctttgtgttttgtgttcatgagttttttttactcctttagttcacagaacttcactgtatgtttcaattcggaattgctgagtttgtcatctaaaattgcatagtgaaccttcgaccattttgatctacaataaccatttgactatattttgacaaatagcgtgttcctgctcttggttgagtgattgacaccttttttttagtttgaacaatcagcgtctctgtagcatcatttttcaattttcatgttatcgtaacctgctatagtcattgaggtatagtttatatcagtgtatgggtacataacatgcggttcccaacgactacctcgtttttgtgcatcacaatatcacatcactcttcatgtacaaaaactgaatgccatcagtgtggcataaacggagttcttctgaccattgtaaagtttgtctccagcctgcccgcgaaaatcacgagtctggactgaattatgctcaattctaaacattcctgtagatccttgagtgattaactcttttgctaggattggagaagaacgataaaagcttttacacatatcatggaagaaacctttgtagtgaatgaattgcataatcgtcgtagtagatcccatcaaacgtaacgtgtgtgagaacgtaaaactacagctcaaatagagctacgtttgttaggagactagcagcaacgcctccttggtcacagttgttagcagaaggctgcaaaactggtcactggtgctaatcaaaaccgcatggctagcctggatgggccgagacaagccaatgctgtcttagatgggcctagccgggcctaactcctcaaatacatactggtcttaatgtaagcccaagacagttcggtccactaaaaaatactatctcgctgagtagactgaggcacgcgtagaaaggtaatacgcaagctccttttcaaggcgtaatttcggcgagctctgcaagtcttgaagacgtaaagaatgtctcatcatcatcggtcccttgtccgttgtgctcgatgggctcctccgccgccgccggccgccgcatttgccgtaacctcgccgcgccgtcctggtgtacaaatttttcctgcacacgcagggccgcagtgtagagtccaatccaatccaatccaatctccgctgacatctccccactccaagcccacacgggccacggccacacatcgacgctctccgtccgtagcatgacaccaagaaccgcggcggcgctgtcaggtctactccgcggcaagaatgcagtgaacctcgcaccagagcaggtcccgaagctgcttgctacgcgcgcgtcacctgcccgggtggaggatggcgtctgtctccgtgaccctcccggtgcccgctacccgctcgacgaaattcctcgccgggatgccgcggtgggcgccaaccgcgtactcttcgactatgcgcggcgcgggatggtcctggaggtcctggatcagttctctgtcgcgcgccgcggcggcgtgctggttgacagcgccacgctgtcctgtgttctcaaggcttgcagatcagtgccagacagagttcttggggagcagctgcattgcctgtgcgtcaagtgtgggcatgatcgaggtgaggtcagtgccggtacgtcgcttgtcgatatgtacatgaagtgtggtagcgtctgtgaggggatagaggtgtttgaaggaatgcctaagaagaatgtcgtcacgtggacatcgttgctaactggttgtgctcacgcacagatgcattcggaggtcatggccttattcttcaggatgcgtgctgagggtatatggcccaatccattcacattcgcgagcgttctctctgcagtagcgagccagggtgcacttgatcttgggcagcgtgtgcatgctcaatcagttaagtttggatgccgctcgtccgtgtttgtctgcaattctctgatgaacatgtatgcaaagtgtggattggttgaagatgccaagtctgtgtttaattggatggagaccagagacatggtgtcatggaacacgttaatggcaggtcttcaattgaatgagtgcgaactggaagcgctacaactgttccatgaatcacgagccaccatgggaaagatgacacagtcaacatatgctacagtgattaagttatgtgcaaacctcaaacaactggccctggcacgtcaactccacagctgtgtgttgaaacatgggtttcatttgactggaaatgtaatgacagccctcgcggatgcttacagcaaatgtggtgaattggctgacgctttaaacatattttctatgactacgggatctcggaatgttgtttcatggacagctattatcagtggatgcattcagaatggtgacattcctcttgctgttgttctttttagcagaatgagagaagacagggtcatgccaaatgagttcacctactctgcaatgctgaaagcatcactatccatcttacctccccagatacatgcccaggtcatcaagaccaactaccagcatatcccatttgttggaactgcacttcttgcttcatactcaaaatttggcagcactgaagatgccctctctatattcaaaatgattgagcagaaggatgtcgttgcatggtccgcaatgttgtcttgccatgcccaagctggtgactgtgaaggtgccacatatttattcaacaagatggccatccaaggaatcaagccaaatgagttcacaatatcaagtgtaattgatgcctgtgcttgcccatcagctggtgttgaccagggtaggcagttccatgctatttcgatcaaatacagataccatgatgcaatttgtgtgagcagtgcacttgtgagcatgtactcaaggaaagggaacattgacagtgctcaaattgtctttgagaggcaaacagatagagatttggtttcatggaactcgatgatatcagggtatgcgcagcacggttacagcatgaaggccatcgaaacatttcgacagatggaagcttcgggtatccagatggatggcgtcacattccttgctgttatcatgggatgcactcataatggtcttgttgtagaaggccagcaatactttgactcgatggtcagggaccacaagatcaatcccaccatggagcattatgcatgtatggtggatctatatagccgtgcaggcaagctggatgagacaatgagccttataagagacatgccattccctgcaggtgcaatggtatggcgcacattgctaggtgcttgcagagttcacaaaaatgttgagcttgggaagttttccgcagataagctgctatcgcttgagccacatgattcatctacatatgtgcttctctcgaacatttacgcggctgcaggaaagtggaaagagagggatgaagtgaggaagctcatggactatagaaaggtgaagaaagaagctggatgcagctggattcagatcaagaataaagttcactcctttatagcctttgacaagtcacatcctatgtcagatcagatatataaaaagctcaaggtaatcataaccaggttgaagcaagatggttattcaccgaacacaagctttgtgcttcatgacatagcagaagaccagaaggaagccatgctggttgcacacagcgagcgactagctcttgcctttggcctgatagctacaccacctggaacaccccttcagattgtcaaaaacctaagggtgtgtggggactgccatatggttatgaagatggtttcgatgattgaggacagggagatcatcatgcgagactgcagcaggttccatcacttcaatggcggggcctgctcctgtggtgatttctggtgaatgaagggcagaacaaactgactggataaggtgtacgccctggcagtgccaatttgaacaatattactgtgagttgacattagagtattgggttgtctatagttgatatcagtacaagcccacaaatagtgttgtagttgcttgtagaagcagagatcagtgttaatactagagcattggtttgttagcattgccagagaaagccagttgccacaagtggtataattgctttatgcagaaacaggaataaacttgctctcattttttttggctttatgtttgatgaagtgaaaccgttcatcaaagcagcatgtttattaccttctcaagttttggcatgctgaattacaggaatctacagctacactggaccgcaaagatatagaagttcttttcaccagttcagttatgcattcataatccacaacaagcagttttacttgtgttttaatattggagtggctctacaatgcctgtgcaaagaacaaaattgtcctatgtttgaatgaatgtattggtaatctgatggcctcaataacactaactatattcaacaaggacagttttcagaaataatgccatacagtagtctaagcaacattttgtttaacaggagatgaacaaactcatgagaaagcacctccagaagctcaacttcactgcaccagtcagatccaggtaatccacattttttatttgactcaaccattgcaatggcagtttctcctgtaggaggctttacttgtgcttttctatagctgcttgttgcctccaaagtacagttgtgagttgtctagaatagtataatgcgtgtgaaacattggtagttaatgccctcttggatagaataggcgtatttagtccttcaaattaaggagttgtttgcagtagtatgctctattctatccccttcacttcagaggatctttttaataatttttatggatacaagcattcatgcatatatgcaagtgttgtaatgaaaatgggcacttccttcattcatattagtcatgtaatcgtgctttgcacgtctttagggtcccgtttaagaaccctgtattgtgccatttcaacctgtccatggctaattgttactgttatggctctgtgtaaatctaaccaaatattacactctgaactaaacaataaagtattcaagcttctagattctagagaagcctactgtattcattgtatcattcttcagtaagtaactcacaattagatccagcaggaagtatgaaatgcaggcagacaggtttggagtaataatgacaaacacatgcataaatcgcatattcagagttcagactatatgaatatcatgaaaatgtaggcacctcgttcgtatgaagcaaactgttaatggtggaggggaaaaaaagcatgattcagtttaggtgtgaccgtgtgagcgagattaaatctcgagcaaagaaggagaagaaagttcctgcctcaaaattgccttcatcctccctgcgtctcggcctctgcttctcttgctgctgctatggatgggccagcaatggcctggagatggccctgcttgttgtcaggatctggaagttcagagtagccaaatttctgaatttttgctgaagatcaggtctctaatctggctggggctgacatatcatcttggcttgacacaggataaaatgtgtcagctaggcatccttacactctgcctcctgctcgcccacctgctcatgttcctcctctgcaacttctcctacttccgttcatccttttcctgttcctcctcccctagcctacagaaaatacaaggaaaaacatgtttgagatgtgtatcctaggaaaacattttgttttactaagaagtgaaaagaccaggtaattgtgtaggaattgtgatgtatattctacatagggtatttttgttgggtgttggggcttgaaagagacatgatgataccagattgagataagattgtcactgatttttctttttgggtggtcatgcagccatggaaggattaaaaatcaaaggaatggaaatcattgttgtgctagtggctctgggtacgtagaagattcttcaactgcatgcagttcatctagctccaattgactatgcagttcatgaagtgcagtaagctagagctgatcaggtatgtttacgaagatggaatagtgaccttgcagagggaacatcatttttataagtcagccacaagaattagagatgttatatttatttgatgttgggaatacagaatgacatttgaaggttttgacgatacagatttgaataccagcatataatggtgagttgaatattggcctgaatatttttaattggctgtgccaggtccataacaatgatatcagtataaccaggagttgttgatgttcagaagaacaggacatcatgtatacttggaaagtacctggggaaaatgtttagaagagatgagcaggaactgaaatctcttggtgagatttaggcttgcacttcctgctcctgctcaagaaggctgctatgtctaatgtaggccctaattttctttgcttcaggtagtggtacttatccccgtggaatttcttcggtgggtcatcataatccttcttggtggtgcttcatcttgggtcatctccttaaacttgaaggaatgcactgaaggagcggatatgatggttttgattgct

SEQ ID NO: 15387 - DNA, 14279 bp, Oryza sativa
cgaattgcatgatcgtcatagatcccatcaaatgtgacgtgttgtgagtgagtagcaggctagcagcaaccagcaatgcctcctggtcacagttattagcggaaggctgcaatactggtcattgctgctaatcaaaactggtcaagataaacttgttcttgaattttttttggttctctttgggcacatctaaacccggtgaaaacagaatttcaaggaaaagaaacatggccaaactacgaaaagtacaagatggcgctcccattcctcacttttattcaacttttaatcagacccttcacttttctcagccaagacaagtattcatggcactctttgtttatcatgtacgcatgtaagaagtcggtaatatcagtcgaaatgcacctactcttcaagtaggaatacactgccttctgaaattcctcaggaagattactgcaaaagagtttacatccatgatcagtaaaactacaaaatgcaccatagaattaaaaaaaggggggggggggggtgatgctcacctcaacttagcttcaagactggccgaatcaccagattcatcattcggttcaaacgacaagctctcaatgatgagttcgttagggtaagagctacagctgattttcaaatatgaagctgcttctttgcgaaccctcactatcaaagggatacagtactgggccgggacaccattgccaatgtgagttctatgtttgccatcttcacactgatcctctggctcgccattttcctcagcttcattgacagcgcttggcaagaacacttccacttcaatttgttctttatggtcactcctcttaagcgtcatcatgttggtaccatcctaatctgggatttcaaaaggaaagccttcacctaattcctttgactggcagaacataaacacacattacaattccatattaaaaaggatggcatctttcagcatctcagaaatctagggcttgttcagattgatgccatttcaaactataccattttttagcaaagttgctaaatatgtgcatccatttagtttcttaccaaactctagtaaataaataagaaatcctgccaaaacttggaaatattgccaaattgccaaaattttgacattaggtttattttgactacaatctaaacagcccctagtaagcttcttgtctgatatagtttgccatgtactataatggtacacttttcctttcaaagtctaaacagacgtgcccataaattgcaacaaacaaagtttatagcccctatcgttttgcttatgcttataagccaaaatttaaattttaaaacttaattttcaagttgattttacggttttttcattgcagtttattttacaacatttactttcgaatcattaaggacatatataaaagttttacccccaaatcaatttttggttgctaaaggtcgcatggataagcataagtataagcggaacgatgagcctcatagccaggaacacgattcaagcggcgtctaaactctaaagaggcgaacttaatcgcagatgttgttttctctctgagtcttttgtccacaaaaacggaaatcatcagtgagggatgagatgagtagtaaatacccagttgcgattcttgcaatctttctgggcgtaggagatctccatgtttatgacccggaggagctgtgcgtcggcggcgctcgtctgagaactggacaacgatgagaacaacgacgcggacgcggcgccatgccgcggatgacgaacgcggccgccggatccggcgccccaggtggcgaggaggccgcgcgcggcggccgcccaggaggggtgagatcgagctcgccgtagggtagaggagacggccatggacgccgcaaaggtttttgcgagggttttctcaggtctttccccattaccgtcgagctgaaggtgccgacgcttctggaccgttggattccacgttaggcccatccatgttgggccggaacggtataaggcgcggcccatagttgttgggctagaactggatcgcggctgacatgtgggccattcttttttgggccacacgcccacgcacgatccaatccgcgggcagaggataccggcgcggcggcgcggcgggccggcggcggcgggggaaggatctcggccggcaaaccgcgcggccgttctactcctccgggaatatggagccgaagcgcacaggtcagcttcgtcacctcctccccacccccgctgccgcggcggtggcccccgctcgcggatgccgcgttgcggcgtcatcacggcatcacgccggactccggcctctcctgccgtacgccgaccacctcccatctcccttggtgaggaaggtgtactaatactaccctcgctgcgcgctgcgccgccgcggccggcgccaaatttctcttgcacggcctgcttgatggctgcttctcacggttcttctttttcttgattttccaggaaaaagactcaggcagtcagactgaacaatgagcttatgagaatgctagaaatcgacgaactcaagacagtttttgggatccatcacaaagtgttcatccctatcctggatacatttgattcgaagcatctaaacacggtgaactgttatgcaacgccacgagcagctgaactggggaactgaatttggctgctggctttagatctccccgtcccagaaatcctccagcgacttgtaaaagctcgtcggatgggtcaagaattcgtacttgaaaagcctaacctgcatgttgcaaacagaacgtacagctcaggaaaaatctttagagtatcaggctttcagcaagtaatttgtcaaaatatggagccatgcctgttgaatctcgtagaactttgccatcagttcttcagggatgcaccagtcaaatatgtcaatgttctcccttgtccacacctcattgtcgctctttgggagcacgctctgtcccatctgaataccccagcgaagagcaacctgagcaggacttttctgcagcttcttggcaatggaaatcacagtaggatggctcagaacgtttggtccatcgttccctggtgatccgggtgaacctaatggtgcatatgcctgcaagaatagcatgaaaacaaatcagagtgaagtaaatgattaatatgctgagttgctgaccaaagttggaaagaaatggaaagtaaacagtgagaggatcataggaacgtcttaatacagttcgaacttacagaaagatgaacgcccttggattggcagagcttccggagcttgccttgctgccaaaccggatggcactccacctggttgaccgctggaggcacgcgagcaacattgagcaagtcctccagcttcttgcatgaaaaattgctcacgccaatggcacgagctttgcctgaatcatacaacttctccattgcttgccatgtagctgggatatcaggcttgaggtaattttccacactcaatttagtacctttcttggcacgaactggaccgtggacctgtgacgtgataaattgtaggagagattaaagattgtcacaatggattaggaattcctgttacaaagagtaagaagaacccatggcacaaatgcaaatactatttataactgaatagttttctttttacaagaagtataggcttaggatattttactaggtacaaatctaagtagtaaagctgcagatcctttaatgtggtattaatcgcctctggcacatcttctggagcatggtgtgtgcacctgaaaattttggaacattttcttacagtgaattgacttcattaatcgttttatataagaaaaaatatgcaatacgaaaggtagtatagttttacaacctaccacagtttagatgtgatgaataaatcttcacgcttaaccgcaccttcgtcaaataatttcttcagtgccaaaccaacctccaaaagcggacgcaacttttgcctacttttaactctagagggatgagtatttgacagtgaagaaatgtagttgaatcactcttaaaaccttaaactgcaaggctctgacaccaactgcgtgatattactttgtcattcttagtgcaacatttgtcaaactattattggaatcaaccgcaaacggtgtataagaaatataaagttactacgtatttcagatatccttgcatttcagtttaagcttatataaaatagaagcatgaaggtttcaggagcaacttacctctttctgattaccatactgtggagaacagtcaatatgacgatatccaacctgcaccagtacaagaagataacatttacatccaaacagaggtaaggaccagatgagaactgttcatattttcttcaaaagaagttgaaaaatgtcatcatttcaggtattaattaaccttttttgggttaactgagcaaatgaatgaacagaaaaatccagtcgatcgacatgattgttatacgcaggtgggtgcagcatgagtaacaacgaaatagaagataataagactatcgcctatattgattgttaatcatcaagaagaaatgaaaagacctggacagcagcgcggatggcatcttgaacagcacctggtgaaatttgccaggtgccaagaccgactgatgggatcgccgcgttggtgtttaggacaaaggattcagccatattcactccaaagatcaaactgtccttggtttccaagcttcctcttcttgtgtcgatggaatccaacagagagcgaacttgagcttacctggtgtctgagcaagaagatctgagcactaatggtaggtagccaaggtatgcagcggttgaaatgagcccggtgatcaccagtagtatactctaaaataagagcttccagaatccatttaataatacataattgaccactctagatgagacttagagaaacctgcaactgacgaagctaatgcaatttgaaatagagaaatcgcatcttggcaattgatctgccaaagagaaggcaataggcaagcatcacagctcaagtaatttattttaagggtgagtcaagtcaatttatatttcagaaagactttcgaaacaagtttaactagaaatattagctgctgaagtcatacaacaaaatcaagatgctgactaactacttactggcagcatttaaaaatcattgtacacttgagagaaaacatcttatgtcactgaaattttacttgtcccaaatatgctactcatatcgcaaactcatgcccatttatgccatcagagatgcagcggccaagttatctattatctagtaaacacttatgccatcaggtgacaattctaacactgccaatgcttcttccccaatgaactcgccttcacttgttcaatggcagtggcgggcaggttgtgctgctggtgcggggtccgtgagctgctggacactgcccggtgatgtcctgtccccggcaggtgaggggcctggctagctggtaccgcagaagatggtgagaggctgagacctcagatcagagtggcgaactggagtgctgacctgatgccatcgcctggcggggactcgttgaggtgaaacattttgtatatgttttaaaatactttattgaattggcatgctttagttagccacacaaaagttacatttacacctaggaaaaacgtatcgcaggttactaaggaactgagcgagtgagcagaagaaagcagacgtcaaactacatccaaaatctgtgataaagccttcttttaaacaaatgtccaaattactgataattttgccggtaaagattctggattccggttcttgtaaaaatacacgccagtaccagcaaaatggtagctgtagacttaaactccttttattcattcattgattaacatttccccactttatttgcagcaatggcagtttccagtttttcacccacacgaagaaagcaaacttcagtccagccaagtcgatcattagatttcgccatcccaaagctcttcgattgatttgtagacgccttccgggtgagtccagaattctccacggatcagcttcatctgcaaatcaaaatcgccattcatgagaaccatcaccaattcaccatcttgcccaaaaaaaaaagacccaacaagaacagagtttcagagcgtctgctgctgaagctgactccggccttgcctgctcgatttcagagagcttgatgaacaggtcctccgggatggaccagtcatagacgtcaatgttctccttgatcctctcctcgtgggtgctcttcgggagcacgctgtgccccatctgaatcccccaccgtagagccacctgcgccggcgtcttccccagcttctccgccgtggagacgaccaccgggtgcgcgagcacattgcccaccgctttcaccgacgctgtccccggcgagcccaacggcgagtacgcctgcagtgacgcatgacaaagaagaagatttgaagcacatcactaggataatgcactgaaggagaagttcagagttgggtgatatcctgttcagaatagcttcagctgttcagcatcaggcaggttaattactctctttctatgtgttctacaattgattctactggtagtagaatcaatttagaccgttcatcttatctaagctaatggatgatatctaatttatactaccaccttaactactggtacttctggtagtagaaatcataaaactacagctagaatcacttctaccgattgtaatactagtagtactactaccactgtaaatgggggaactattttgatcccttaaggggatgtcccttcatttgcttaaaaaccattcaaacggttataaaaattctggaaaaaattgataacactcatacaatatactctctttgttttttaatatatgacgctgttgttttttactatgtgacaccgtcgactttttaagatacgtttgaccattcgttttattaaaaaaaatatgtaattattatttattttattatgacttgatttatcgtcaaatgttctttaagcatgacttattttttatattcgcattaaaaaattcgaataagacaaatgatcaaatgcttataaaaaagttaactgtgtcattttattaaaaaatggatgtactcctatctatacaactccataaaatcttaggtccaaactcacatcgagatataaaaagataaattcagcatatgaatagtagtgtactgttcacatctgaatttgtcttttttatttctcgatgtgtaagtcgaatttaattttttttgacagatagatatcacaatactcaacatagttattttttttcatattttttacgactatttgtatcgaatttgaaaaaaaaatatacgaggggacatcccatcgaggaattagaatccactcccctataaatgtactcattcatgaataactgacacagtaaactgaggttatctcacattgaccacatattgctttcaaatgattatattgtgatgaaattgtatggttatatttataacttatatacttcaataatatagtgtattttcatatgtttataaaactttctgtaaaaaaaggttcaaagtttatgcttaaataatgccaatgttaattacttcctccatcgcaaaatataagagatttttgtttgataatacacgtatataggatatcctattcaaccaaaatcccggagggagtatctgagaataaagggagcggtagtttgcagtgctgagcaacatactgagaggtggattcctttggaggtgcaaaacttgcggagcttggtctgctgccacaccgggtggcactccacctggtcgacggccggcggcacgcgtgcgacggcgagcaggtcctccagcttcttgctcgagaagttgctgacgccgatggcgcgagccttgccggagtcgtggagcttctccatcgccgcccacgtcgccgggatatcggtcgggaggacgttttgcccgccaaagccggcgcccttcttcatcctcactggccagtggatctgacgaacagcgtgagcatcctcaactcggatacttttaagataatgaaagctttatttaaactcagttaattacatcatacaatagtcaccctcggtctttgtataaaatacacacggctaaaaaaaaagaagaaaggaacaaccagaaccagaacatctccagaaatggactgaaacttatcacgaaatggaacatgaatctcacacgcattgcatactcacaaggtaaagatccacatagtcggtctgcaaatcctgaagcgtgctgtccagtgcaaccgggacatcctccggagcatggttagtgcacctgcaagaagttgcgagttcttcagtcatgttccaagattactgtaattgctggtgctcgcctaagccaagaatgtttggaggttttggaatgaggatgaaattaagaaggtaattaaccagagtttggaggtgatgaatatatcttcgcgcttgactatgccctcgtcgaacactttcttgagagcgaccccaatctacagagccacagtggttactggttaggctgctctgaaaactcagagatcgttcacttaactaggcaaattggagacaaatttagtaatttacctccttttcgttgaagtaggcttgagcacaatcgatgtgccgataaccagcctgtagaagcatacaattcagacagcacaaaagaacatgaaaaattaacctgcgtgaaaattcagacagcacaaaagacacatgaaaaattaacttgtcacgaaattcagacaacgcaacatcaccttgacggcggcgtagacggcattgccgacgacgcccggctcggcctgccatgtgccgagcccgaccgacgggatcttggcgccggtgttgaggacgaagcagcgggccatggtattctgctgcaagcactgtacacaagccggaaaatgcatgcaaaatggctacctggacacttcacacttgcaagagcggctaataatggaaagcgcggcgagctcgtgccggtgggcgagatgtacacatcaccgtaccagtagtagtgacacttagggatggggatttcgtcgcggctatgaatccgacaccatgggccacgcatttagagatggctggaggtttttatagcagacgaccggcagctgtttcttgtactatctgattattatatctacatctatctatatctctctcctttataacactatatctatgtatacgtgtgtgtgtatatatatgtatatgtatatgtatatgtatatgtatatgtatctgtatctatatctttattattttgatctttgatagactcacgagtaaataaaaaaggttaattgaatatatgttgttataaatttgacagttttaaaatatgtcattaccccggaaaaaaatatgtcattaccatttatctaattggaacaatagcattgtaaatatatgttgaaatcagatacataccaccacatatccctttgctgcattttttatttttcttggatcatactgcccttgttcatcccctcctctcatgcatgctcatctcttcttcctcctacggtctagagcgagtgagcaagggagcaggagagggaacggtctgagcgcaatgacgctttcgacgacaacgtgtccggcggcggaggacgagtgcggcagcacggacggtagcggtgctcgagcccgcaagcatagtaggcggttgaactcgacatagtggcgttgctagcgcggtgctcgtggcggtagttgttgacgttcctcaagtaccaaatccgaccgtcaattttagcataaaagtaattgatatagttttaccttaacttaaattaagttaattaactcatagaaatcctctctatcccaatcctatcatttaattgttgctcttggaagaatcatgttcttaaattgtgcacatacgttctctgtggatacgctaccctaggatactcttggtaaaagctacaacggtatatgtgcgcttgcagattattctgtgctcataataaataccagcaacacttctagtggcagagctccagcgtagtggcgtcgccggtgcagtgctcgtggcagcacttctggtggcggagcttgagcgcagtggcatcgccggcgcagtgctcgcggtggcacttctggtggcagagctcgagcttgagcggcacgacgtgaccgtctaggcctccgggggagcttgagcgaggtgacgtggccggcggcaaagttttaaaattaatcaaataaatattaattgttttaaaattaaaaataaactaaaaaaatgctcatgcgttgcaataggtgaaggttatcttaatcttattattgttatacggtttagctaaagtgaaattcactgtaagaatttgcttggatattatttttacaagatcatgagctacaattagatcgtcttaagttagcatgcgagtttttttaaagagatttcgtatacgactccttctctatatattttcaaaagcaaacaaatttaaaaacctactcaaatctaaatttgtaattccaaaagcgaatgaactcaataactgactcaaatacggatgacgtatcaaagtaccgacaaaaacatcttcaacttttataattgtagagaagaggtatggatttatttgattcttttaaaaacttttatatataacactgtttaaccgttcaaaaaatatgcttacgaagaacgacaaagttattatagctaattgctatttacaaattagaactcacgctatagctactaccggcaatggatttaattacaaacgtaagggttagcaaccaatgctaaggacatgtttaataggttccaaacttctaaattcaactctaagagttaagtatggagacatggagtaaagttatagagtatccgaattctagctccacatttctagtttatttgtgaaaacacttcagccaactttcgtcatgttttgaatagagctgaaactgtacgactaaacctaaactgaaactttaccgaacagacctaataatggtgataagattgtgtcgggggcagacgcctagcagagcgctgcccgaacgaaacgctcgacgacgacgacgacgacgacagctacggccggtcggcgctccaccactctccgatggcgatccgccgccgcacaagacgtttgtcggtgctgccgtgctgtgtgctggagtggagcgctaatctgttggcatcttgcccacaggcccgcagcacgctacatgggcctagatatgccatgggcctcatcattttttccagcccatgtattacccgatgtcgccgctcgaattttttttatttataattttttttattaaaagttttacaaaaataattttccattttgaaaattgacggaaatagtcgcctaccgccctctgggaggacgatttttaaaaatcgccctcccagagggcggcgaaaatgacgtggcagacggccgttcgctctcgggcgacggccgtcaacgaaatttgcaggcggcccccttgccgccctccgcgagggcgattttgtactgtgcggggggccgcctgcaaatgggcggcgagggggggcatggaaatttgcaggcggcccccttgccgccctccgcgagggcgattttgcactgtgcgggggcccgcctgcaaatgggcggcgagggggcatggaattttgcaggcggcccccttgccgccctgggggagggcgattttgtactgtgctctatattttttttatataaatatcaatagttatcaaatctttttatattgaaaactatacaagattaaaatcttcaagattggtaaaatacaattttattattttttagggcatatttggaatgttaccgtacaaatattttgttaatgccaaaatataagcaagttttggcactaccaaatatttggtaaggtaaaattgcatttgatcatatttggtttgctgccaaaatgtaaaattgtagtgaagaatgttgtacataatctcaattctagattacgtattaccaattaataggcttccattttcgtgtgtggtgtggtagtgggaaagaagatatgaagaggttgccttcagattgtcaattatatagcgtcgttttcactgcaatatatgtgaactcaatgagatacattattcattagatgtgacaagacgatcacgcgtgggcgtgattcactttatgtcaacaggcagcgccgaaagttgatagtgataactcgagctgccgcttttcatgtgtgctgttgtggactgtgcgcgctactggatatggcactaccgtgaagcgccgaaagtgtgttgttgtgagcataagttgttcaagcaccatacgaatgaaaagaactacgtagacgagacaaacacaagtagtactgcagtagtaatagcaaaagtagtactgctttacaagtttgtaagccaaaagaaacggtcacataaggactgaagaggtagaacactactgacgaggcctcttacccctgtccctcctaccctgcgccctaatgtgcccctgggagtacgtgagtcggtccgggggtacggcacggccaacccgtcctgcctgtacaggtgtgacctctggctgctcctgagtgtgcgcctctggagctcctccaagctgagaggagcctagtacgtcctggtggtctgcaccgtgcaagtcgtcgtcgtagaactggctagtaggaccagtcctaccggcgtgagacgaagaggccccagtaccgaagatcccggctgcaaatcctgctggacaaggaccatcagtttcgtataggtatttaacagtattaataaaaagtaaagtaccgtgtgggcgagggatcgacgctccgtgagaggaagagctggcgaacgcgcctgaagaggtggcgaacgcccctgcggagctcgcggaagcgccggtcgtgcctgcgaacgcgctcgaaggcatacgaggtcctgcgatgaggaaacgtgcagttaaaacatggtgacacattcgtgcaaaagctgaaacaaaaatgaactaatatctgggctgaactgtaccgtgcgaaaccggtgctgtaggtcgcactgctccgaagctaggggcgctcgaagacaaacgaggtcctgctccgacggtaggaccgcgaggccgtgggtgtaccggaccagctggaggtacgacgtccacggcgctgcgacaggagaagacgcgcatgaccgcacgcatcttctcctgcatccggtcgaaggtcgacctctgctcaacgtcagtcaagtgcaaacctctgttcaacctcacctggactgcggtgatatcggcactgatatcccgtgccgcatcagcctatgcaagatggaaataaaaaattcagtagttgtcctatattatgcaagataaatgacataattgttggaagtaatacaaattggacgtaccgccacgaagtagtctcggtcacggtgcgtgggatacgcgtccgtgacagcggcaacgtgcggctctggggcgtctggagtgaaggtcacacgcgcacgagtgcgaggaaggtaccagcgaaggtagtcacggtagttctcctccgtgtgtgggaagagctcgttgatcacctcctctgtagctaacacccagtcgtcaacgtactgctgtacacgtggagcccaaagtgcgcctgctagctgtccccgtcgagtcaacctgtgaagagaggtaaattgtatggctcgatgatgtaattatcataaaaatttagaaatgaacaatccgaactcacgagtggtcggcaggggggacggtcggctgcacgttgccgggaaacacctgcctaagtccgaactgtctcatcacacgctgcggccagtgaggctcaacgaaaatgtcgaacaccatcggcaggatggtgagccagtaagcctggtcgcgtgtgcacaaggacgaaagtcctagcggtgctctcgcagcgacggcctcttctgtgtacggctcccagatgacgtcgctcggctggagacggtcaaactcgaacacgaagtccgggtaaccacgtctcacctggacgtgagcgtaacgacgctgcaataaacatgatcggaattagacatgttatgtgaaggaaaaaaaaagaagaggactgataaacttataacgcagcgaagttgcactaaccccacgtcgacaccagtaagtccccatcgtgggaccgtcctctggccactgcgcgctgcgaccaaccccgtagggtgcgctgtccaccactggtcgccctatggcaaacctctcggctgcccaaagctgaagcaacataggacagccagcgatgatcgctcccgcg

SEQ ID NO: 15388 - DNA, 3018 bp, Oryza sativa
ccgtgcgtagtgaaccagccggaagtccccagcgtgcccgtgggtgctagtgaacatcacccacccgaacaaccacaacaggtacgcctcaagggagcgtcggaccgagtaatcatcagcgtcagggtgcagaaggtccgcctacagttaagaatgaaatgttagtacaaaacactgatccggtcgcaaataagcacgtatgataataacaacttatttacttacagtgaactggagcaaccaagccttgctaggcccgactgtagagtacggaggaagggtggtggtcggtcctaggtgtggaaggtgcatcacctgctcgaagcgcgcagtgatatcctccttccacccaaaaacaccgtcgacgggaccaactggtgctcccgccagcggtagcccgagcaggtacgacacgtcctgcagtgtcggagccatctccccacagggaaggtggaacgtgtgcgtctcaggtctccagcggtctacaagagcggcaaggagtgaccggtctgcatcccaccgcttcgctgggtcacggtcgtccgccgccgcctcaacaagcctacaaagtggtagaaggcctgccgcacgcaacctgtatagagcaaacttcaaacataagtataaaacaaagcaaagttgagttgaaatgtgaacatacgcgtaccaaggaacgtgacggaggtcgacacgcaaccactcgcgcgacgtgcgtggacggaaggtgccgagctgtgcaccctcgactgctgacaggaacgagcggtggttcctgtcaatcccacggttcaacagcgccggtgtgtcgtacgccatacctgcatcaaataggttgatcagaaacatataaataattagttcaacataagtaataaatgttcataagcgaattactaacacatattaaacaagagtacaaacaaacaaaagtgtttagtccgaacactcatcacgataacattatgatacaacaccgaatagttcgcaatactactagtacaacaatagtcggaggtactcattacaacaagattgaattgaaattacacgatagaagtatttagtccgaacactcattacatcatgttatttcctaaatcgaaagcattgttacaccatggaatcgcctgctgcgcgacgacgccttggccttgcgcgcctgcttgttgttccttcaccaggtggtcgcctaccatcacttgcctgtccagatggactagcatctgcgccgcttggaacttctgcattcttcgggcatgtcttgtaagtatggccgcgcagatcacacttgctgcagcgtaaagtcctcccacctgcttctgactcatccatatcatttctgatgcgtctagtttggcgtcaaccctttttcaccctaaacttagatggatctggaatataaaaaacttgggcactcagcgttgtgtaagatcctgagatcccgaacccatatatctcctcactccagtatgaaagattgcttctttcctgaaataatttgagacgtacacattgggagatatgccacaatcaccggcagcagcaagaacgtgtgagcaaggaaggtgatgaagcttcggcttcatacaactgcaggtacatccaccatccgccttcaagacacattcctgcacggcttgcttgcgatagataccacgcctgctcctatcaacacacattatttcataccgatgcacttgtgtgccttgagcaacaactctatgtctccgtgcctttttgattttatcttccatgtactttgtcactacgttgccaaacactatgttgttatcggccatggacggaccaattttcttgtatcgatccctaaagtaggcttgcgtgccgtgaaggatgaattcaacaatagcaaccaatggaagtacccgaactcctcgcattacccagttgtacacctctgccaaattggttgtcattatgccataccgagatccatcggtgtcgaacaatagagcccacttctccttaggctcattctcaatccactgagagaaatttctgatggccgaccctgacctccttctcattgttggggggtcatcatgtaatgcaccaagaggtatgggaggctcgtcaccttcaacttgtggtctgcgagattgctcatctggttgattcgttgtcaactcatccaacttgtcccacaactcattaaatttcttctcttggttctgtgcacagagcctcttaaagagctccataagatgcttgttcttgaattgcttgtagaaatttgcacccatgtgacgcatgcaccaccgactccgaacatcaggccacttagctggaagtcccttctcatcccaaccgttctgcaagtagtcaatagcccgcaacatacccgcatgacgatcatgtataaggcaaacgttgggcctcatacgcaccactgcaatgtgcactctctctaggaaccagtaccagctttcagtgttctcactctctacaaatgcaaaagccataggtagaacctggttgttcccatcacacccaattgctgtcaatatctgacctcggtatttacctgtcataaaagttccatctatgcatagaacaggtcgacaatgcacaaaagcattgatgcaagcacccaatgagaaaaaggctctttgcagcacactctttgttctatcttcaaccgatgtaaatgtatgtaggtcatagtaagtattattattcctctgggcaatggtggctaacaaacgaggcaaattatcataagaagcttcaaatgtgccatacctcatctcaatgatcttttgtttggctctccaggcctttgcatagcttatggtgtacttgaatttgttctcgatgtgcctaataattgattttggttcaaagccaatgttaccaacaacactgctgtacatctcacttgccacaaaagctgaagtgatgtttcggtgatacttctccaccccttgtaagtagcacttgtgctcggtcacaatgctaactttccaataatcattccatttacccttatatgcatgg

SEQ ID NO: 15389 - DNA, 894 bp, Oryza sativa
cgccccgaccacctgcatgatggccaggatcttggcgcgctctggatcacagcagagggggagggccccttgggggatgagggatgcctccacggagctgagattcagcacccgttggaccaccatcctgaagtcctcagggtcccagtcccatttgcgcccctggtgggtcctcatgtagtccttgggcccggtgtactcccaggcgccccgggcgcgccgctggagcggcgcgatccggcgatgaaggtagtcgccgaacaccatggcccccgtgagcccctgggatcgcagacccgccaggcggtcaagaacggcgtcgtagccgtctcccagatctaccgccgcccgccagctggaggcctgcgccgggggctggctcggaagtcggaggcgcgcttcgtcggcgaggggggtgtagaaccagtcgctcttccagtcgtcccactttttgcggaggacgtagggagcgtagtggttcagcagctgcccccgcggctggaagtagcagccaccgactaccgtcggcggcgacaccggctgtacggtaaagaaccaccggaacagccggagagatgggcgcaccccgataaacatctcgcacaggtgtgcgaagatggccaacgtcattatcgcattgggggtgaggtgcgccatctggagatcataaaactccagaatatccatgaaaaaaatagagaatggcgggaccagccccgccattgcgaaagagaggaagaagacggaccgccccgggtagtgtggcgccgggcgtccctcgcccagcgcgaccacctcccggccggtggcagattccggcatgaatcggcgcggcagcccggcctgcctctcgctcatgatgcgggaaggcggcagcacgctaccatcgagcgg

SEQ ID NO: 15390 - DNA, 1039 bp, Oryza sativa
aaggcagaacatgttcacattccagggttacttaatcctctagaaatacctgatatggcatgggctcatatttccatggactttattgagggactaccaaaatctcaggggaaggatgttatcttggtggtggttgacaggttaacaaaatatacacatttcttagcattgtctcatccttatactgtggagcaggtggtacagatatttatggataacatacataaactgcatggaatgcctatcgccatagttactgatagagatcgggtatttaccagtacatttttccaggagatttttaaaatacataaggttaagctcagatttagcactgcacatcaccctcagacagatgggcaaacagagagggtaaatcaatgccttgaatcttatttgcgcagcatgacctttcaggaaccacagaaatggttttcttggcttgcattggcagaatggtggtataacactacatatcatacatccatccaaatgactccatttcaagctctgtatgggtatccccctccacaaattagtgagttttctattccctgcaatatttctgaagaagccagagtaactttagaagataaagcaatgatcctgcagaagttgaagggcagtatgggagaggcccagagaaggatgaagttttatgctgacaaggggagaactgaaagaaccttagaagtgggggatatggtgtatttgaaactacaaccatacagacaagtggctatgggaatcaggggctcattgaagctcaggtccaaattttatggaccattcaaggtcattgagaagatgggttcagtagcttacaagttgcagttgccggagggagctgggattcatcctgtttttcatgtaagccagctgaagaaacatttggggcctagagctataccaatgcccaatttacctgcagtaggacctgatggccaaatcaagactgaaccagctgctatcttacaaagaagaatggttcccaggcataatgaacctgtgatacagtggctgattctttgggagaatt

SEQ ID NO: 15391 - DNA, 6331 bp, Oryza sativa
atttttagcaggaatcacgcttcagatgttgttttgatgctacttttcttgtctttatgtttttacagctagatgtaatgcctgaattgtaagctactaatggaggcctttggcctggagaagaagaacagaagcaaactacaatttactttgtcttaggattagctaaagtagcttagaaccctaaaatcgctgcactgttttcccctgtttcttccatttcgcactcagggtcttgacacccccgcggcgagctggttcatgccgtcgttgcaggcgcccgtcgtgctcgccgcacgcacccgcacaaagatcggtcacgatacggctgcgtggcaacaagggggtccggtgtttaaaactccgaccccatttggctcgaaaagaaaagaaaattcctatctttcttttcagaagtgccaacgcgccatcatgccatattgccatgtgcccctttgaatcaaaggatttatgtaggaatttcataggatttaaatcctatagaaaattttcctatttggccatttgattcaaaggattgaagctttccaaatcctatgaaattcctatggaatggcatattgcatgtagattttggaggaaatttagcaagagctccaacctcttggaaaatttcctttgagtctatctctcttatccgattcctgcgttttcctacgctccaatcaaactatcattcctgtgtttttcctgtgttttgcaatcctctgttttacacttcaattcctgtcagaatcctgtgttttttctattcctccgttttttctaccctacgattcaaaggggcccctaaaccggcaatattcaggttcaagctctgttgccacggaatgacttggcgtgcagatgaattattcctcccaaattttcacagcaataccaacttttccaatcttccgtgcactgagaagagaagatacatcagaaatgttgtgcgttgtgctgtgcctatatatgtattgacttgctgccagcaggctaataaattcatatgtgatttgctccaggttcccatggactcgatatatgagagttaacaccaaacaagaacggacgcaacagaaagcttgtgcatctgtgtgtatgtgattatacccaaagctactcgacaaagttttcaagatttgtcctctcagtgttgcactccaatactccatttcacattttcatttccatggttaggacaattaaagcacagtagaaaaaattacacctttgctactcgccgggcaattaaaagaacccaaacaattactgtcgaatttactcaccgtcgatcgtcgtcctccttggcaatggcggcatgccaatttagggttcgggggtgagtggtgtgtcagtggtcgtgtggcgttgccttggtcacacgagagcgattggctagtattggcgacggggaaatcttggcagtgtggttaggaggcgatgattgaagagatgcaaagtgtgcgtaaagtagagaaaacgataaatatgtcactccattagtagggtttcgataaaatggcacctactagtatgcaaaggataaaatgtcactcaataggttaccttcataatattttaccttgggaagtttaaagaccacaatatccctacccgttggagagaggaagggagaggggcccagggaaaaggccaagccagtgcttgcctgccgtaggcggtgagagtgtatggacgggtggcgtcttggaaaggagaatggggcgacaaggtagcggtagggacaatagagcggagggaggatgaagcaacaatgcagtccaatgccgcccacctggacgcttgcaactcgtcgctttggcgcagacaagggaagaggacggtagcattcgcagctccccgccccactccatccattttctttgatgccgattggggagaaagatggagtggccagcgccccatctacctcgccgccccatcctcgcccgcctcccgctcattctggcgggtagcatttcattgaaagcccacgaatggagtggcgtattatccgctttctcgcgtaaagtatatgcaaaatgcaacattagttgctctgaaaaagttgtggctttcctttcctcgtatatgttaatgatgctaaaactacaagcctgttcaatatgatatcttttccaattaacccaaaagaattgccttacttatttcttttgtggacagcacgcagcgagccaacgatgcagccaccatggccttaacatgttgaaaaagatccagatcagttacagtaggattcgcggcacagatttacatagcacctctgagattattttcagggcagccgattgatttgagtgtatatatcagaaaaaaaaatttcaagcgtgcacgggctcaccaaattatcaagggacgtacgcaatcacaattaattgaaacagaaatgttattatcaagcagaggtgacctgccacctatacctgcctgcttggtcacagctggctattacccacaccaattaccaatgtaattgcaagaatgcaatataccgtcattcttgaactacggagtagcaaaggaaaatgctaagacaataacagaatgctgcatcaccaagtccgtacataaggcagcagcgcacgcaacgttaggtatctctcaaaaaaggtctttctttactatgaacaactaaccaaaacataagggaaagaagatgtgttgtgaagcagaagttgcaacatgaaagagctgaacatttcgatcaaatcttccattcagtagtttctagaaaatgttcactctaaaggacttatgaacttccccagcatttccacttttcggtcgtgtggttcactacatattcttgaaaatgatcctatacaaaatcaaagctaacaagataaaacagaaaaaaggcagcactataaacagaacttacacaggattatatgcaagactagaatgcagcaaggagacagaacatgataatggctgatgtagcactaagtgcccaagacaaaaatgcaagcgctacagcaagttcgaatctcccacaaggcagttgtggataccttctgcagaaaagcacgtcccttttaaacagaaccataacacctccagctgagcaagatgcagcaaaggacagaagtgcagttacctgcatcaaatagatggagtcaatttatgctgctgaagtctgtgaattataaacgtggttgcatgaatgacaccccaattgctcaaaaaatgtcgcaatttgattgaaaactcaatccaaaccaggttgcataccatgcaaacaacatagatttccatgtcaaacaatagtatttttatatagaaaataaagagaactacaacaaaccaagctccctcttgccatataatagtagaatgcactatattgcagcaatcagttatcttcagaaaataaaaggcacagcaatcaacagaagttgcctaacctattctattgtaccctctaaatggcacttctgtggtgtttgctccagtaggaagtgtaacaccatataggatgtgcctaactatcacaaacaatctagtggagctgatctaaaaaattttggatcaaacaaaaaaaaaatccaaggcaacaagttaagtgataagtgatagagttacagagtttaatcattacccagtctccaatgacaaacaaactcacgagaagagcattgttgagatcccttttgactgtcaaggcatacacgtcaaggcatgcaagtcccaagctccacaatgattgtaatcccattgatgcaatcaagtagctgaaatttgaaagccacaacaaactcattacatgattcaaaggaagattgcgccaaagagggtgcgaatacaggaaggaccgttgtaccggtgcctactaaaaccgactaaatacaaagttaccaagaaaaaggtcatcactgcactagaattgtaatacgaatgattaaggtacaccaaatccacatgcatcatatgaaaaataggaaacagagcataaaccaaaggggattatcaattatctttgccgaatgccgatataaccagcattaacaacaaaagccaatgttataagttatgacatgtacacatacctcgtgaacataaacaactggatagtatagtgatagcttcataattttttttcagatcttattagaggttgtaacttgtaaaccacattcccagctaacgcacagctgccatttgatagtgaaaggccctcatttctacgattctactcgcaattagctaagctccttgtgaatcatccactcctcactacccaattttggaaggccgcaagccaattactcactaattgttccaaaaccatcgagcgcaaaattcatgctcttcactgcgccccaaccgaaattacccaccaaatctgccatcatcaactcgcattgctccaggcgaagagaggggacgagacgacacactacacggatcaacaccaccaaaatacgaaactccgccccccaaaatcaaacgggaacgcgtgagggcaccgtaccagaaggccgtgtagttggcgaagccggccccggacgccatgacgccgatggaggctccggcgaaggcgacctgccccacccgcatcgccagcccgccccacgtcccgggcctccaccacgccacctcccacatcccacgaccccccaaacccctcctcctccgccgccgccgccctccccctcacctacctccaccaccggccatggaccaaccggatcaccgccggcgcactccaatcgaggtggttggaaaccaaatcgcgcccaaaaccgccgcagtttctaggctcacactcgcggaggaggaggaggagaaaaagggggaggaattctggctggcgccacggcggtggtggtgttagtagagttgttggtgcgacgctgacgctgacgagcgcgcgcgagagagagagcggcgcgggacccagctgcagcgtgagcgcgtggatgacggaggcgaggaggaagacgacgacgacggcgacgagtcgacgaagcggtttgtttgggctctccgatctggagatccgacggctgtggggttagccgagggggtggaggatgagcggtcgcgatcgtttgttaacgtcagggtccgtacgctgacaagatggcgagcgagtgagggtgtgtttagttcacgccaaaaaaaattaaaaatttgatttaaattggaacgacgtgacggaaaagttgaaagtttgtgtgtgtaggaaagttttgatgtgatagaaaaattaaaagtttaaagaaaaagttgaaccagatgtgaaacattgaaactgcaccgctgttgcacggatgggtagatagattttggcattttggtacggaaaggtggcgttgttgcttggattatgcatttatgctgcatagaccgcatggttagagtaaaaagtaagcatgagtagtaataattagtaaagcgacccattgacaaaatatttttcttcgacgtgagatttgtaactttttattttggtgggttttaagttttgtgcattgtacatgaaagaaaagatgaagggagtgtagcttaactggttaagtttattgtgcttaaaccaatccatccggatttaagccttagatttgctaaaagtgttatcattttcgactaattattttcagtgatgtacgacatactttcttcgtccaaaaaaaactcaacctagtattggattgaacgctttctagtatgtccagattcgttgtactaaaaacatcacattcaatactatattaggttttttttgggacggagagagtgccaattaacaatgagacaaatgcttcgatattttggagatatttgtagggataaggggcttgtttgatagagcttcgacacctaaatttagtttcaggagttgagtctatagtgaagttttagagctgcataaacccatctccatctctctagttcattttgtgagaaaactccacccagttctgctcctattttttatgaaactgaaattatttggctgaactctagcttgagctggagatgtgacaaacagatccaaggtgtgagtgtgtgggggtgaatgtgtgttatgagtaagtcttggccctactcagcaattgaaaaataatgctggcgaaaaagaggtttatatagtttagtaatcgaaagggtaaagctatggtcgaagtggaggtgaaagtaatactactgctacgtcagcgtggcggcgaaaagtggtatgcgaatattcggtgcgatttcttttcttttacggtaacagaaaacgcgacacaaacaaacgggaccacctatacgtttatcgataaattttcttctaaaaatttgacagatgtaatta

SEQ ID NO: 15392 - DNA, 8424 bp, Oryza sativa
ggcatccctcatcccccaaggggccctccccctgtgctgtgatccagagcgcgccaagatcctggccatcatgcaggtggtcggggcgtcgggggagcgggccccccgaggccacgatggcgcgggcgggagcagcaggggggaacactctaccccgggagggggtcgtgcttctgggccccgcgacgggggcccggggggcagccgccctgccgacgcccgggggaagaggaagcaggagggtacccctcccccatctcctccccgagggggcggggcggtgcgtgccagcagcaggcgcccggagggtgccgtgccgacgccgcagcccgagggggagcgaaagaagaaacggctccgcaagatgggggggatcgtgccatgccgggggaacctcatctcgcccccgaggtggtcgtttagccgacctccccgcaggttcatccccgcgcccaccgcggccgtattcattctcccatctcccaaggcgagttttcactcacccgtttctttttgtcttctggtttttcttctgcctcagcgagatcccgtcgcctcccccccccccccccgccattccaagtccggccggtctgaggccgaggagacggcgaccgcagaggcccggaggcgggaagctgaccggcgagaagccgcggaccgcctccgggaagccgaggaggctgcccaggaggccgtccgggctcgccaggctgaggaggccgctcgggaggaggccagactccgtcgggctggggagtccatccgggaggcagaggcggcgcgcgcacgcgaggcggcctgccaaacccccgacccgactccgcccgaggcgacgatgacttccgaggccacccacgacgaggccgcgggcgcgccgctcgggcccgacccctcgggcgacgcttgggtcgagccagcttcgggggacgcccccgagtccggcacgtcgatcggagggccgagccgcgcggcacccacaccgagggggctctcccctctgccttccgctgccccactgagcgcggagcccctcctgcaggccttggccgccgcgaacatcacggtgctggactggttaagtgcctagatggaggccctgcaggcggagcgggcggagctcgacgcggcgtgggcgcgcgtcgaggaggggcggcgctcggtggaggccatggtggaggtgggccgcatggcacaccgtcggcacgcctcacaactcgaggcccgtcgtagggacctggtggagatcgccagggaggtggaggaggagcgggagactgccctcatcgccaccgccgtgctcgacgaggcgcgggacgacctccgcctccaatacgggagccgggcggcggagctagaggagaagctcgacgccgcccggggagcccttgacgccgccgctgcccaggaacggcaggcggcggagaacgaggcggcgtcccggcagcgcgaagaggcccttgaggctcgcgccacggtgctggaggagcgcgcccgcgccttggacgcgaaggagagagacctggcggaccgcgaggccgccgtcgccacccgggaggcaacactggcggcgcacgaggccgcctgcgccgaagaggagtctgcactccgcctccgcgaggacgcgctcaccgagcgggggcgagctctcgaggaggccgaggccacggcgcagcggctggcggacagtctgttcctccgcgaggcagcgcgggaggagcaggcgcgccgcaatctggaaggcgcccgcgccgagagggccgcactggatcagcgggccgctgagctcgaggcgcgggcgaaggagctggacgcgagagcgcacagcggcggggcggccgtgggccacggcgacctagccgcccgcctcgcagccgccgaacacaccatcgccgagctgcagggcgcgctggactcgtccgccggggaggtcgaggccctccgcttggcgagcgaggtagggcccggcatgcttcgggacgccgtctcccgtctagaccgcgccgggcggcaggcgggcctctggggcgggcggtacgcgaagtacgccgtcaaccaggggggcctcgcccagcgcctctcagagatggctggggccctcgagcggttccccgaggagctcgaggagacgatcaagtcatcctcgagggacctcgcccggggggcggtggagctcgtactggcaagctaccaggccagggaccctgacttctccccgtgggcagcgctggaagagttccctcccggaaccgaggacggcgcgcgcgcgcaggtctgggacgccgccgaccacatcgttcacagcttcgagggtacggcccctcggctcgcgttcgcgctcgactccgacgaggagggcggtgacgacggtgcggacgacagcgacgacgaggccgacgacccgggcgcgtcggagtgagcccccaggcccccgccaatcttaataacttttccttcttcttccgaggccttcggacccccttcttgtatagactgatttaatctgcaatcaagtaaagaggaaatttctgcgtcagctctgtttgttgtgtgtatgagatgaggatggtctgtgccgcggtccttctgtgtcttggcttgaacaagggctcgtgcccaggtcccagcctcaaacggcgcgggtcggggctagtgcctggggagatcctcgtgtcgagactggccaggccgggagcgcggtgaccgagggttaaggatgacccgattgtgggcctttgccgattcctacccggagttcaccacgccccggggcacggctcggttctgggccccgtttggcgattttagccggcccgggccaccgagggcagggtcgagcacgagcgtgctaattcaagccaagattcttcaaaaggaaacgatggcacagacacagtcctcaggaaatcgaaaatgcttttattgaaatacggaagagaaaaaaggtaagtatatgcatgtggtagcccccgaccaaccctgcacgcccgggggggtgcggggttggcccgagcccgagacatgacacccgaccccactaggggtagaagcgacgaaggtgttcgatgttccacgggttaggcagctctgtgccgtcgctcgtggccagccgaacggagcccggcagggggacgccgatcactcgatacggaccctcccacattggtgagagcttgctcagtccagaacgcgtttggacgcggcgtaggacgaggtcgtcgacgcagagtgatcgggcccggacgtggcgctgatggtagcgccgcaggctctgctggtagcgcgcggctcggagggccgcgcgccgccttcgctcttccaaatagtcgaggtcgtctcggcgaagctgatcttgatcagcctcgcaatacatggtgacccgaggggacctcagggtgagctcagatgggaggaccgcctccgcgccgtagacgaggaagaaaggcgtttccccggttgctcggcttggcgtggttcggttcgcccagagcaccgctggcagctcctcgatccacgagtcgccgtgcttcttgaggatattgaaggtcttggttttgaggcccttgaggatttccgcgttggtgcgctccacttggccattgcttctggggtgggcgggggaggcgaagcagagcttgatgcccatgtcttcgcagtagtcaccgaagagctcactagtgaactgggtgccgttatccgtaatgatacggttaggcaccccaaaccgagcagtgatgcccctgatgaatttaagcgcggagtgcttatcgatcttgatgaccggataagcctcgggccacttagtgaacttgtcgacagcgacatacagatactcgaacccgcccggggcccgcctgaacggacccaggatattgagcccctagacagcaaacggccacgaaagaggtatggtctgcagggcctgggccgactgatgggtttgcctggcgtggaactggcacaccctgcaccgtcggaccaggtcgaccgcatcgttgagagccgtcggccaatagaaaccctggcgaaaggccttgccaaccaaggtgcgtgaggcggagtgggctccgcactcgccttcatggacatcggtgagaagctcgacgccttgttctcgaggaatgcacttcaggaggactccgttagccgcgcgccgatagagggtcccttccaccagcacgtagcgcttggagatgcgccggacgcgttcactcccttcgtggtcctcgggtagagtcttatctgcgaggtacgcctggatctcagtgatccaagcaatcaatctaggggagctgggagcactcccctcgggtcccgaggcctggactccgacgggcctcgggggccgttcaggcgcgtccgtctcccctagggggtcgggtcgcgccgacggctgggcaagcctttcttcaaaggcgcccggtggggtctgggctcgcgaggaagcgagccttgagagttcgtcggcgaccgcgttatcccgtctgggcacgtgccgaagctctatcccgtcgaaatggcgctctatacgccgcacctggcgcacgtaagcgtccatctgcgggtcagagcaccggtactccttacagagttggttaacgaccaactgggagtcgcctaacaccaggaggcggcggatccccagtccagctgccactctgagtcccgcaaggagtccctcgtactccgccatattgttggtcgcccgaaagtcgaggcggaccaggtatctgaggacgtctccgctcggcgaggtcaacgtgacccccgcaccggcgccctgaagagacagggagccgtcgaactgcatcacccagtaggcggtgtgaggcagctgcgaggggcccgagctggcctcgggggcggagacgggctcgggagctggggtccactccgccacaaagtcggcgagggcctggctcttgatcgcgtggcgtggttcaaagcgcaaatcgaattcagagagttcgattgcccatctcaccacccgtccagtaccctctcggttatgtaagatttggccgagggggtaagatgtaaccaccgtgacccgatgcacctggaaataatggcgcaacttcctcgaagccatcagaatagcgtaaagcatcttctgggcctgagggtatcgggtcttggcgtcccggagggcctcgctaacgaagtagacgggccgttgcacctttcggcgggccgatcctcttcgccaggggccgcatctccagggcgctcttcgtccgagaggctacgcggggcgcactcggcttctgtgccgacgacctcggggtcggagggcgacaggcgcggccttcccgcagtggccccggggccatcctgggggtcgggggcgcctggcaccgtcggacaagcaggcggagggccagctccggccgtcgggggccttgggccgccgttcggctcgggggcctctcctccctgctctctcccgggtcgagtcgacgcagggtggggatgcgcagagtgagggttgtcctcgtcgcgctccacgaccaacgccgcgctgaccacctgcggggttgccgccaggtagagtagcaacagctcatctggctacggggcgaccaggactgggggagaactgaggtacgccttcaactgagtgaaggcccgctcagcctcctccgtccaggtaaatgttccggagcgtttgaggagcttaaataggggtagtgccttctctcccagcctcgatatgaaccgacttagggcagccatgcagccggtgacgcactgcacatccctaagcttgctgggggggcgcatccgctctatagctcgtatcttctcggggttggcctcgatgcctcgggcagagaccaagaacccgagaagcttgcctgcaggcacgccgaacacgcacttatcggggttcagctttatgcgggcggagcggagactttcgaaagtttccgctagatccgagagtaaggtctcttggttgcgcgtcttcataaccaagtcatcaacataggcctcaacattgcgtcctatctggctacccaaagaaattcgagtagtacgttgaaaagtaggacctgcattctttaacccgaaaggcattgtcgtataacaataagttcctatgggggtaatgaatgcagttttttcctcatcctccctagccatgcgaatctgatgataaccagagtatgcatctagaaaacacaaaaggtcgcaccccgcggtggagtcgacaatctgatctatgcgtggcagggggtaagggtccttaggacatgccttgttaaggtcggtgtagtcgatgcacatccgaagcttgccgttcgccttgggaacgacggccaggttcgccagcctctccggatggattgaatccggcctccagaagtcgcgccacctcctcgcggatgaaggcttgacgttccggggcctgccgccgcactttctgccggaccggccttgcgcccggccgcacggcgagacggtgctcaatcacctccctggggaccccgggcatgtccaccggtctccaggcgaagacgtcggcgtttgcccgcaggaaggagacgagcgcgtcttcctatttgtcgtccagaagaccaccgattcgtgtggtcttggacgggccgtggcccagggcaacctccttgaccgagacctcgtcgcacgtgaccatccgctgccttggggcggccgggacggaggtggcgagcctcttgtcaccacccgcgggcttggacgccgcggcgaggtggtccgcgcgctgctccatacaagcaagcgcgactttgaggtcgccatggacggtaatggggccagcggggcccggcatcttcatctggagataggcgtagtggaccgccgccatgaacttcaccaacgcgggcctccccaggaccgcgttgtagggcagactgaggtccgccacatcgaagtccacccgctccgtgcggaagttggcggaacctccgaaggtgaccgggaggtcgatatgacccagcggccaggtgtgccccggcgtcacaccgatgatcggctgggacggccggagcaccatccccgtggccttgatggcgtcaaaggctgcgggggaaaggatgttgagggctgcacccccgtctatgaggacacgccccaacttcacattgcaaacggtgggggaaaccaccatcgcgatctgtcctccccgggcaacgcacggcgggtggtcagtctggtcgaaggtgagggcaacctccgaccaccgcgcccgccgcgtcgcctcatgggtaggggccgcggccagaagctctcgcttcatggccttgaggctccggcgagaagcgtgagcgcacgctcccccatcgacggtggcgacggtggcctcaggctcctggaaccccaggtcatcgtcgccatcgtcgatgtcctcggcggtggccttctgcttggcctcacctcaccggttgccggcgggagccgccggggtcttgccctcacggcgctcctgcctcttctcctcctcccacttcctcgtccgttcagccaaacttttgaccgcgcggcagtccgcgaggtcgtggagggaggtgttgtgcacggtacaccacttgccggttgggcgctccctgctgggagcgccggcctccttctttttgtcgctcgcaggcctcccctttcggggggcccgcgaagcgccctcgacggcgagaacatgaccctcatcgtcggaacgggccgaccccttcttcctcctcctgtcctgccgccctgaccgagcggcggacccgggggcggccggagctgccactccagaaccggaggagttccaggtccaggcctcctccttgcgagccacacggtccgcgagctcaaaaagttgcgcggtggtctggggctccttggaggcgatcttctcgaccatgcggttgtgccgcacgccccccctgaacgcgtagatcaccgcgtgtgcggggatgcacggtatggtgttgcggacttgacagaaccgctgaatgtacgagcgaagagactcatcgtcccttcgctgtaccgcatgcaagtccgcttcttcgcctgggcgcggatatatgccctggaagttcgtggtgaactgctggcacaaatcctcccaagagtggaccgacgcgggtggcaagttcattagccaaccccgcgcctgacccttcagggccatggggaagaaattcgccatgaccctgtcgtcacccccggcggcctcgatcccggtcgtgtagatctggagaaactcggcggggttgacgcttccgtcgtatttttcggtgatggtgggccggaaccttgggggccaacggacgttccgaaggctcgccacaaaggttcgacagccggtaccgccaaccggggacacggggggccggcccccgtgcccggaccgaagtggcgctccggacgaggaagcgccctccgttgcgtgggcgg

SEQ ID NO: 15393 - DNA, 1092 bp, Oryza sativa
aatggcggacgaacggcgggtaacggccgccgctcgccgcgccctccgcctcgacgacatggagccggcggcggctgcgccagaggcctcggtggcggaggaccgcccgccggcgcctaggcgctgctgcgccgtcatgaccaagtcggccacgtcatccagccaacgtcgggctggagtctctggatcggggacgacgggcgggtgacgcaggagcgcgcccgcagcctggagcgtgccctggggcgtgccgccatcgccgtagacgaggcggcgacgcgccccatctcgccgtcctcccccgtcgcccgcggacggcgaagtcgcggatctttcgacctccccgagcgcctccccccgcccaagatttcggcgagaggggaacggtggggtgcgagcccgacggcgcgggttctgctccccgtcgtcaccgctagcgttcggagagaggctgtgcgccactgcccgttcggccattgggctgagcgggagaagcttggcgcacacgaaagaggacgagggcttagaaaaacacgcgcgccccctacctggcgcgccagattacggagcgtggggctcctcaccgggagaccgcgcaggcccccctttgccggttcggccgggggcgctaagtgaggttcttcgccctcgatctgaggaacgtcagcgagagaggaaatgcgcaagacacgggcgacgtagacaggttcgggccgctaagaagcgtaataccctactcctgtgttctggtggatctgtgcgtgaaggaatacagagaggccgagagcgaaagagagttcaggctgtagaaacccttcgccagagtccccactccccttctttcctctctctcctttttttctaggcctgggcctcctttttatctggtcaggggtcaccacatgggcctctagctgcctaagaagggaaacatgctttttacaatcagggctagttacagccggaagtgacctctgacaagcagagcacacgcctcctgccctgctcacctgctttcccggtggacgcccatttcaaccttcatttaatggccagcgacttccttgccatacttgcgctgaagcctagaat

SEQ ID NO: 15394 - DNA, 9625 bp, Oryza sativa
ttttttcgttttaaatgtcaccacgtgcattttcaggttaagaataaattaattaatgcatatacttcttgtttagttttagtggaattccgatagaacaaattaaaaggtcccattctggcaactgtatgggctgcttatattattatgttaaatcttagttgcctggttcttatcactcatgctcagtctgaaccactctaccttaatttgttgcaatctgcacacatttctgactctgaaaactgcacgtcgtcgttcttccatttctccatatataaattcaaggtgattgtactgcaaatctgcagcatctcctactcctagctgtacatgattgcagggtagtacgtactactaaaacgtacctacctaaaattgcagatattgttgccaaactaattaaaatatcaatatgtatacatccagatagaatattgtaacgtgtgataccacaagtgcagtttttaattgggcaagctgggtctgaagttaaatattttcaggttatctgcttgactgcttggcattagaaattggcagtgtccctgtaaagccagctattgtgtcagggcagagagaagagaaatgagatgaggcaagtgtgctaatcagctctcagctcagcatggctgctgcatgcttacctctgatcacaatactgattcggccccatgagtgagaagaggcgtctattttatgggcagacaattacggcttacacatgtggtgcatacaataaggtacaatccgctgctgcttagcatataatatagtgttgattagaggtatattttatatggtgcacacacatgttgctgggtgttggtgtggcacaggaggcagtggtaatatatattggccagttgctgtattttggggaggttgttttgtttgtgggagaacagcatgagggtagttggcctgttggactcaggaaaagggcctttttgccatagttaatttgtacttgaatcacttctagaaatgcttgtgtttacatcgatcgggttaacaacttcttttgctgtctttgttatggagtgagctagcttccatgctggattaagagttaaattacaaacgaactaaggtctttggctagctaattaaggttatcatctgtccatggggtttttaatatgttctcggttggttgatgcatgcaactagttaaccaggtaaaatcatccatggctaatccttgattacttaattggccgattaccacttcacaaaggagtaaacaaacccaagttgatcccactgtaaggtgcatgaatctcccacattatgtttgtgaagggccagcagggctccctgtggattggttgagcactttgttgacccgtggacaacgctagcttagcacggggtgtgtgcactgcgcacacaatacatctcaagtggacatatataaatgtaggaaattagcaaattaaggagaagagtattcttttcttttccttgaacttgtgtgtctgctttaatttggttgaaagtgttcgtcaagttttgcagtgtcatcaatccaaacccttaagcatgttcaacacaccatctgcaatgttttccatgtcatcaagaaaaaaaacactgagaatctggtatatacaaataaaagaaaacattaaaaaaagttgcactcctttcggccacagatataaatatttctaggttatttggcaaatattaaggtagattagaaagtattttaggcccatcattatataaaggatggttaggagaggaagggtgattgaggtaagatgtgaagaaatttatgtgagaagtaattgatgtgacaaataaatactctaggaatattatattcatagataaattaaagaaaatacttgaaatgcttttttttttcacgaagaatgatttttttaggctgaatgactaaatagatgaaatatttatagtaaattatttgagggtataagcaaatgaattagatattataaaattgaaaatagaattagaaataaattcagatataaaaagttagctacacatacgtgcgcattcatccatcattccattcctcaaaaaagtatagagattttatcacttactacatatatctactttttatatatacatatatattacaaaattgtttaaatgtatctttcaactttataatatttaattcattcatttatacccttgaacaatatttattactattttttcatctattcaatcattcaacataaaagaaatgccagtgccccttctttccacacatgtaaatattccaactatttgaaatccatccgaatataaacattcagtaccacttaatccatcgatcatctttggttcaaatttcctcctatcctaataaaaaatgtccctacaagcattttttaagaagaaattgtggacgtgttagggattgaacacaggacctcaggttgaaaccacacaccccttgctactgcactatcaagtgcatctgctctatcctactcccaactataattccccccccccccaccatccctcgtttattgagaggcatcaaagtttcttttactcaatcttaattttatctatgctagataaactaaaaattaatgtgtgtatttgtggacggagggagtatagttacctctactttgaatttgctcttaagcccggcatcccagtgcagggttaaatgcatcttccacaatttatatccgtttctcttagcgatctgtcgacctgcaatcacatgccatgcatatatggtgtgcattaacattaattggagctcaaaaggttatatagcaagagaactgaattaccaagagtaattgcactgcggcttacagctagcaaaagaactgcatttattcagtacgcttgtagtgaagtcaaagtaaaatgtaatctaggatgaaatatattaatcattttgctgaaaagtgatagtactactccaatgcattagggcatctggaaaaatcagtatgaaatgattgggacacatggtggctgatcaatttggtcaacttttaaaaatacagaaaaccgatggcagagttgattagaaatgctcaattaaaccatctaaaccaagtgttagttttgggtgaagttaaatgtctcttgcgacgatggcgcgaagtttcagtttcagagaactaggggactcgtcagagcacttgccctaagagctaagatcaacaaaaccataaacaactaaaataactgttctaaacgtcctacgtccataagcttgtaaaaactggagcattaattaactaattggagagaacacaaaaattagagtaaaatttgttaaattgtttatctgatgatcgattgcaattgggctggtagctagttgtatttgcatgcgcgcttctgataatgacgcgctagatctgtaaagatcgactggatgacttaatagtcgctggtcagactacagttaacgcactgatcgatatatacaatcttggtgacacatggattctgaatgatttggatagatcagattcagaggcaatcctggatatatctcaggatggttcgccatggagactagggaagataaagcaactgtacatctgcacgcatgcgtattgtccgtgtcaccaacatcaacatctactgatttgtaactggcagcttatatagatttatatgcagcaaaatgtacaataactgggtagatcaatcagcaacttggcacaaagcgcatgcatactttagtttgaccagcttgatcgtcagaacacaagtctacgatgtgaccatatatggggtgaagtcagcgcggggcaattcctttcgcaaatacgcgtcaatttgacgaaatccacaagtccatgtacatacatttcgtttcattcttactacgctgtgtacatgtcaattgtcaaggttagcatagctgttgtactaccgcagtttcctacatgtcctttgtcctctccttcaattttctactacaaacactgttcctaatttatggctttactgcggtacaccacaatattatttgttggaagtttggaagagttcagcacacaggacacatatatactatggccacctagccgtcattattgcaaatttgcaagtaacatgaatgcatagttgtaccaaattaagtacataatatatggtacaggtatacagtgtatagtactatagataccatgatggtacacatatgcaaatgttgatgtgcatacaccctagctaggcatgaaaatgaagtacttctgaaaacactgaacatatgctaaggtagctagattaggcccccagcacccctgcaaggctgcaatcataatgcttaagacacaagcatgcatgtggtaaaatgagggaggagatcagagaagggggaagaggaagctaaaaaagctggacagggatgtggataggtctgttgcatagaattgtttgcacgttgtatagcaaagctagcaatgcaagcagcaagggaagttgcaggtgaatattaatgaaagtaagcagcctttttctagctagtcttaagagaagctgcatgcttctgctgcccactgcatagagaaagtcctcatttgtgctttaggccttcatcagaaggaggagatgagataagagaagagaagagataattcagactagaacagaaatgcagagagagctagctaggtgcagccaaattaaatagacacccttcactctttccattacactgcaggcccaataggagcactttgataggcatcagcatgcaggagcaggacctctgctcccctttgccttttcatggcgccccatcttatatgcaaatgtcaatgtgtcattgtgtctgtatgcctaggtacagctaaatataaaagtagcttaattcagcttgatagctatgcataccagaagaagtcaagaaaccatgcacatattgctcaagcattagcaagtaaatcatggcagtacattgacgtgtgcatgagagggaaaatgacttcaattgatggatgtatatatcgacaggctaactactacaggtatcgcattagcagaaatgcagaagagttttccttttttttttgtcagtaatagctccattggttgtcctaataagccaaaacagaagctagaatttaaatttttaaagttaattgtaaagttgattttaagatattttcaacataatttcttttttatattggtttttaggtcgccacgaatttttattgtataataaatattttttgacttattaagaaatatgggaaacgacgaggatctaataaaacactcacagcaagatattaaataactgatgttatatgcgggggaagcaagtaccttttgagccgatcaattgaagcatcacatcacttgcacgtcagggccacttcatgaaaccgtgtatggtttttccgggtgttgcttaactccattttctgttcatatcctgcacacatgaatgccctgattgagcgaacagtgttgtgccttttgcacagggcaacaagatcgagaggtcccatgtatgcttgcaaggatgtgtactactacaccatatttcaggcccattaagggtgtgtttgaggagaaggggattggagagattgggaagatacgcaaaacgaggtgggccattagcatataattaattgagtattaactattttaaattgcaaaaatggattaatatgattttttaaagcaactttcctatagaaattttttgcaaaaaaacgcaccgtttagtagtttgggaagcgtgcgcgcgaaaaacgaggagctttctcacccaatgtcactggaacgaacacagcctaagcttactatatacccttagctagctagctagctagggtccttcatatatacgtgctctctactttagcagagcaaaaatttgaagaagaatctaaggtgaataatcaagcatcattaagtgagcatggcatctaataccaccctctcggctagctctagctgtatacatatatagagtagctactctagtctttatgtaggagctaggtttatagtacagggatggatcgatctctccctctcatctggcccctgagggcgcgggatggaggtcggcgcggggtcccggccggtgatggatgcttgccgtcgcgtgcgatgggctctctgtcgccgtggcatatggcatttagctagtaaaggagccacaggccggtgaggggaccggcgcctttgagaatgtgactggtgaaggctgggccggggagagctaactagcaagtgaagagaaggcagaatcaagcaaggccaaatgaatgatcgatcctgcataagtattacgttgtgccaagatggacttgacagtgcagtgacaagggatatgtgtttttaacccaagatcccatgttcaatcctccaatatgcttataatttcttttaaaaaatgtttgaaggaacatatcttcctccaaatctttttttttcttttttattaaggtgtgcctaatatactgactgacctgccatgcttaggctcccccccccccctctctctctctcgcataatggagggatctttgggccaatgacattccgggtgaggtttggcgcaagaggagcagcatatttctggtgttttatagggcatatgcacatgccatggaccaccaattatacagcattgagggcgtggccctttcaacatcatcagaacctttgtgattgattggggtctagtactatcaaaacctagctattacactagatttgtagtactaccttctaagtgttactccctccgtcccataatataagagattttgagttttttcttgcacagtttgactactcgtcttattcaaaaaattttggaattattatttacttttttgtgacttactttattatccaaagtactttacgcacaacttttcgttttttatatttgcataaattttttgaataagacgagtggtcaaacactacaagcaaaaactcaaaatcccttatattatgagacggagggagtattgttttagactctctttactcttcagaaattttagatattaacccattttttctcttatgtgatttttatctgaatgctatcacactcatcaataaatgaggtatcttgacactttcttaattcctatgcccaaatctaaaacaatttatatttggatttggaaacaaaagggaactagaagtgtttatgtttaaatacttctattaaaaagatagcaagaatcttcccagtttgcaagagaagttgggcacccacacactagcagaacaatttgaacacggatgcgtatccccagacactatccatggttaaacaccctagaggcagatggtatcatatatatgcgtgcagtatgaactatgattcatagtgaagggtcaagtgttgtcaatatatactgtttgagatatttaaccatttgccacatttagatgtgacaattaactttttgccattagacccacatgtcatagacatatgtggacccacatgtcattgagataggggtggtaaatagttatttgccaaatctaacagtggcaaatagttaaaagcccctgtactgtttagattactccaaattaatattagctgaaaagagatcacatatatgtaccctatatatgtgttttatataaagtgtgcgcgcacgcatgggcagtgcatacgtgactcaactagcttacttgctaattgactacagccatacttcaaatttttctggctataactccgcttctgataaaattttttgatgatacatcgatcatgaaatcagcattttttttaatgatcatttgtttatatgtacggatcagtgattttatgcagactatgatgtaggagcaactggcctaaacctaggccactaaactacatacattgtcagagcttttgtaataaaaaactggatttatatatataaagaaagaactgtatgtacttgatgggccttgcaattttttttttaaaaaaaagctagggttggaggagaaagctgcagcctgtagataatcctaatggggaacctgtatatgtttgataaccaaatcctttttgggatgataatctttgggctgattcaggggctccaagttgggttttgcttgtgccaggcctgcaaccgtccactttgggcagctggagtgctggaccatgggcctgccaaactattgtttcggtcgcttctacaactacgacactgcaccctgtcacctcctgcccatcccgaacgacgccacgtcaccctctatgcacacaagaatccgtcgtacgaattgtgttactaccttcgtcgcagaataagaggaaagtaaggataaaatgataaataattgtattgggatttaatagtcttttttttattgatatatgtgtaggatgagtgaaaaataaacttattttcggacagaaggagtcctaagcaactgcaggcaagtatggatcctagagaagtgctctccaagggataaagtggaacaaatgatttgaaatagtgggcattgctaccgggttgttcagatagcaacagccaaatatgcagctgatgccttgaatcccctatcaaattgcatattgactgtcctatatctgcaaactatccaccacaatattccccgcatccaagcgatacaaaatatcttgagttaaggatagaaaaggaatacacatacctccatatcttgctatattagtgggcacgttgagttgagggagatggcttcaaatggcacaccttatcaagctgatcgaaactacagtcgacatcattggacccacgtatctgcggcagatcaaataccagccacacccacagccacagttccacctctgacctctccctttcactatgcaagttttctccacttgatcagaattgtgtcacggcaggggagcaaatctgacattgctgttgctcctgctgtatgtagcccctgcaactgggtcatgttaaaagggggaaaaaaggaaatggcaatgagggatcagtcctgtcctaaacagatactccctccgtcctacaatgtagcaacctaggatagaatgagacccatcctaggactacgaatctggacatgagacatccagattcgtagtccgacccatcctagattgctacattatggaacggagggagtagagatcagctgtcacaaccatcggcttactccaactcaattgcatcggtttgcttctgcttccacaggaaatgaaaaaagacaacatccatgtaaaagtcgtactctcctttttttcccctggtacacattgtatgcaacatctcccctcttttcttgcatgaattgcttcttcctgccaattggagtggtaaacagtaaacagactgttacaatgcagcttgaaaaattcagaaggcatcctggacgatgaggttgaaaaattcaggaggtcttcccagcatacaaatcgactaaaaatctgtgttctagcccatgttgagctgataggctcacaccaaccagatccttggctggtggccggtgctattagctccattaaagatttcctctagctacattgcaaacagtacagatgtcctggacccctggcttggatattagagaagaggttgaatactaaatgatgtggaactgtactatacgtccatctccaccagattgc

SEQ ID NO: 15395 - DNA, 10505 bp, Oryza sativa
aatcagggcatcactcccatacctgacatcaaagaacaaaaaggttcaaaatcctcgcagccagctagaaaaggggcattagggtgtcacaagtgaaagaaaaactacttcctccgtttttttaatatatgacgtcgttgactttttgagatacgtttgatcattcgtcttattcaaaaactttatgtaattattatttattttattgtgacttgatttatcatcaaatgttctttaagcataacataaatatttttatatttgtacaaaaaaattaattttgaataagacgaatagtcaaacgttggtcaaaaagttaacggtgtcatatattaaaaaacggaggtagtatataacagtacacaaatcatggaactactaaaaagctcaaaagagattaaatatgaaactactaaaaagtacatgtgcaattgtttcaatcataagaatcaatagggcacacatcacatttacacagaagctcataagtagcacgagttgttgaagttcagttcaagtgaccaaccccgacggttgatccagcaaattatgtcaccattcctgcatacatagacatatttaagatttggaacatatatacagtatgaacttaagctgtagttacctttccacttccaaggactttatggatgaagagaagtcttcctggttcaacccgtaatggataatgttctgtttgataataatctgagtctgatgacccatcgtctgaatgatcttctggtatcccctccggaattttcaaggattggaaaaaccttaaagcatcatcttcgagctgcttcgtattacttgctgcttggcattgattagtggtgtcatctaatgatcttatattacccttatcgcacacgaaatctttgtgcctagccataacagtaacatcagtttgctttttaatactagatagaaacttgtcaaagtccacatccgatgagcttgaagagcccgataaacgtttaacaaacgaatagaaaggtgcagcagtatcaacatcagttttacttgattccacccgctctttgataggttctaccactacagagttcatgctatcatcaccagacttcaaagtatccatactaactgcagcagtattatcaaaaccatttgtttttttgttattacttgtttcctgctgctcctcatcacttccctcgccaaaggaacatatactatcaccacgggatctcaaaactctcaattgagtaaagacaccagcctcaacttcatttgcaatgcttctatttactttaggagattgtccatcgccagtattaccttcctcaggtagcaaggttgcactacagatagtgttttctttcacatggttttgttgtttgctaggatcatcaagcacttcatcacataacaagctcttggatttggacaagctagaatcttggacatctaatggaatagtaggaggtgcaccttcaagattatttaacttccaaagtaaggagatgctaaaaattgttgatataaatcaagccttaatagacatgcaaaatatactgacctgattgttgactgtgatatttcagtgcaagttccatacgggcaagttgaagttcatacttgagtttacacatggaagcttctgcttcgatccacagattcttatatgccagcacatgtgcatctttatcattgccagacttattttcctctatagatagattctgcaaacaagggagtaaagcacatctctgagaagaaaatcactattgtccacactaagcagatcgcaacaatattttgaagtcaatccaggatataatataaatcaatatctgtaaaatagatgttttgaaatctgtgataatatctgacagaacaggttcaacaaacttttgagcctggcaagtatttccatcacaatttatcttttccagttttgattgaaggtagttgatattggcatgatcatcgtttaatagacccttgcatgagacatagcataagcttaaatgacacaagaaataatttgattttcattgttgagtagagataccaccaaacttttgtttagcagattagcattttcagtgagcataattccaaaagtcctttggcagagttattattagaaatggaagtcaacacagtgtgctaggcattaaatttcttcagataatacagggatcatgttaagcttaaaatggaatatcagtcattgtgaatgacctatcatttatccaccatgacaacgcaatataagtgtagctatttttagcaccttcagaagaaaattgaagtgaggataaaaccatcacaatttcaaaaaccatgtacaagttaaaagctataaacgaaaaacgttcaacacagatgtgatatgaagcatagctgttaaatacaagttccaaaacttctattgattttaagttaagcaatcagtactcatgaaaaatataattataatcagtatgggtgaggtaatgttcaaaagttaaataaaatatatgtttttttctcaaaacatgaaaaaaatgaaatgtgtaagaaagagtctgcatcacaccttgcttctttttggactcagagaactgagattttgtatggcagattgaataagttcttgataagattcgtccaactcataatcaccattgcaactagatataagcgctactgacaaattgtacattgacttgattaactctgcatgatagttacatctgtaggtgatgttctcacaaaatgcattcaggtcctcctgaacaagtgagtgatgatgagataaaggttcctgaactctgctcataggcacttcagaacacagaatttcctgtgaaaaccttccagttatagaattctcaccaacattacaagtctcgccagaactattagctaaatagtttcccactattcccgtatcgttagtacatctgttccagtcgctgcaatgtctatacgcagtctgaaagccagcatgatctttctgctcatcctgcacgctatcaaaatgaccaatattaaacctacatgggtttgcatattgcaggaatcgacccttcaaaacaggatcacttggtgacggatctattcttttcatgccacatactacaggtgaggcagcaacagatggcatggataggccataattcaaagatgttgagcaggacgtaagatgtgataggtggctatcataagaataacggccatcagattgatgtatgggaacaggttctttgtcgaagcaatcaataatgctgggaaacaaagaaggcttatggagaactgatgatccaatctcactggatgcagctgctgaagttctttggtgaattactggaattttctcttccagccagcttgatcttcctgttgttgagggaatccagggatgcagctgcttgatggaactaaattgatcctccgggtatacattgtgtagtgcactatcgctaaacagaaatccatcggtatttgcagtacctgcaaattaatttggtttgtcagttgtatacaatgaaatttttgtcaaagccttggtgacaatttcttgatgtttatatttacacacgaagatagcaacaagagaaatagtagtcctcttgccaccgtcaaatcatctgtgacgctgaaaccaccaagcatcagtaacaacaagtgaacaatcagatgtctctatatgtacaactttaatgccacatacggtgagactccatgcactaaacaaaatctttatctaagatgatcacatacttttagaagtaaaaaaaatcttaatgtagtatttttagaagtaaatcgcatagttaactacccaccagtaattacgattgtcctcgaccgcacacaaaattccagttagtatgactgcacaccctaaatctacctcttataaatcaaatacacagcgtaacgcgtaaattaaaccagtgtaagatgcattcatgaactgtcaccactcaccactaccacaacacccagaaaccaaattaatcacgcagcacgtacagatacaggccctaatcacgggaggagcgcaagctagctcacctgcataccccgtctccgcgataacggggtgcatggagctcgccggaggttgcgccgaagacgagtagtacgatggggcggtggggaagtcgggccacgggctagggggtctagggctgtgggattggggtaatgttcagcgaggcggtgacgatcgacggcgaaaagaagcgcggcggagggccaggacatggccgcgtgcggcggcgccggtgccggctgggggagcccgcgatcgccggaggagtagggcatcatctcgccgccccgccgcgccgctgggtggaaatgtggaatcgcgtcgccgaagcgtgcttccgatttcaattgggtcggacgcccaacgccgcgtgggccactccataatgggcctcatggaccgtggtcggtaggctcggcccaggaagaaatgaggatggaataagttcatccgaggtcccttaacttatcgacgaatccgattttcgtccttcaaccggaaaaccagatacaacgggtccctcaactattaaaaccggtgcagactaggttccttagcggtttagatagcggttttggctgacgtggcgcctacgtggctaatttgactaggtcttcatctgacgtggcattgacgtggtgcttacgtggcaattcgatttggaaaaataataatatatgtgggacccacatgtccgtttcatacaccaaataataaaaaatggtggggcccacgtggaccccacatgtcatcctcaatcccctacggctgctgctgctcttcttcctctgttcttcgcgacgcggctcctgacagagcggggtggggggagcggcgtgaatgctgtcgcggcgacgctgtggcggcggacttgcgggaggacgcctcctagctagcagcggaggtggaggcgaacatcgcctttcccttctatgggaatccgatgatggagtccgagaccaacgccaacgcggtgcggcgcccacaaaagcggagagaggcgggagctctggagactagggtcgtacggaggggcacggagcagggtgcgcgtggacgagtgtaacatactgaaaattagctattttctaattatgcatcatgccggtttttatgttcttattaaccttctaaacctaggaaaatataattagagagagacctccaaaaattaacttgcataaaatccctctctggtatttaatttcttttatgtctttcctttaaaaatatatttggttaaattaaggtgtttctcgacttggttttaatttaaaaccttattttgacaaaattccttttattcaaatttagtttggaaaccccttttcatttgtatgaattatggtccaagaaaaccctccaaacctacactgtgcaattccaactttaattggaattaattgtcgacccatcctttgattctcgatccaaatattcaaatcctttcttttaatctagccaccaatttaattcttgtggcttgattttcttctcggcacaagaaatattattattgcaaatattatgaataattgctcttgtgctaagaaaatagattatatcattgtcatccaaatttcctattagcctcaaacaattctttgaaacacatgccatatattttgaggctaaaaccctacttatccttctccaattatcttcttcccaccttcctatttacacattcaattttattcatatatcccttaccctttcatttgagtgcatcaaataaattccattatatgctacctctaaaatattgcactcaaataattaggaaatatctctttggaaattatctccaaaataaattcatctcaaaggttagccacttaaatttcttccaaatattaatttggattttaactccatccctcaattccctacacaaattagaaagccttcctattcatttgggccgaattttctctcttccttcggcccagaccggcccaagtcggcccagcccctcccactcaagccgactccctgctcctcctcccgtgggtgcttccaggcgccgccaccgtgcgccattactgccgccgtgcacgactcagctaccgccgccgccatcttgccgtcgaagcgaaggaaccgccacccgacgtcagctacacttcattccgccgacgtcagcaacagggacgaaccgccatcgtcggccaatcagaggacagagcccgcgccgtcattcttttctccacgtcgctgcagccgtgtcctcatcgaccttctcctctgaaccgccatcagccaccacctctcgccgcctataaatataaggcgagccctccccttttctccacacatcaacagagcctcgagctccctttctctctctccatccatggccgatcgtcgacgccgtcggtcgatctccccatccgtagctccacctcccctatcctcgcgccaccggcttcgcctccatccggcgagtccgtttttcccctttcccctctccctccacctttaagtcaagccaccaccgccatcatccatgccggctcgaggtgagcccttgccgccgccgttccggctatatatctctccctctcggccagccaccgacctccccgggtgcgcgtcgctcgggaacacgcgtggccgctgtcgtcgaggccgttcatccaccggagcatcggcgcccctcctctcccttctctctgtttgctcggctggaagagaagaagaagcagaagaaggaaggaggaagaagaaagagaaaagaagaagaagagacaaagaactgacaggtgggcccctgtacagtactatttcataatttccctatttaattcaaattctattctttagaagtccatatctcctaaaccgtagatccgattccagtgaaacttggacctaaattcatctaaattcaaaatctacattttgatatcaaattttctattttaagattttatttgaatttattcaaataccgtttgaatttatatttgacttttcaaatattttcctttatcccaattaccctttagccactaaaaagctgtcggttggaactttacgccttccatggagacattcgcggttttctatccccgacgttgaaccgttggttgtaaagcccggcataaaccaaacccaaggtcaaagtgctgctcctggcaccccacgccttgatgcgtatagcggtcggagcttcactattccatcgacctccatagcacgccgcacagttagctctcggactctgtgtgatcctagccgctccgctgccacccacggttgtcgaagtaacacttccgccctactaaacctgcacctacctcctattccctctagccgatatgatgtctgctgacaccggctagagaagacactaaatctagtcgttatgttgccaactctagcaacaactagcaaacaaccaaatcctagccgataccctgctagtcaaatcccaattgtcatccaaatttcataccctctacaataccacttatccaccatactctcagcctcatactttttgtctatcagaacctatacataaaatatagagcctggccgatatattgccctactcctcaatcggcctaaatataaccaaaccctaggtataatcttacacaaacctaccatcagccaataccagtcacatatctgctcaaccaattcaattatccactatactccctatccaccaaccaatcaaagtctgcacataaaatataggtgatcttagccgcttaattccctctccaccccagctgccaactctttataacccacacataaaatatcagcccagtaatccatataccctataaaagagataggctatacactaaatcctaaccctcccaaccgtttatctctttcttgctattttatggcttttattgaatttggttcttcctcttctgtagtagagtctattatattttggatggcaacctgtggtatttcaaagatcagataatcaggttgcctatctcgcatttatttgcgttggagcaaggcaagttattattcctctcctttgagcataataatcctatattctatatttccagtatcttgtgcattagccatacatgattctaaatgcataacctgaatatatagcaaaccagatatatgctagattttgcttagccatgcctagttagattacataaaatataataaacttagattggaatagtacggtagaaatggttgatttccgggtggctagtactgttccaaccgacataaaattgccaagtacatgtgaagaacatacgagtacgaccgcaattctcgtatgggcatagacctagctgattaagttatctagcaaaggtggtacctctatacaatggttctattttaagtcctcgagcaggaggcaaatttacgccgagcagggcgattgtgatatttaccgaggcacaggtaaatatatgagatttattgatgtcgacttgtttgtgaaccctgattgcgatgacatggtgtcatacaatcagttctctctaaagaccttgggaacgctagaactcctctcgctgctgataacgttacgttcagagcgtatggggactagagtttatggaacaggtaccactgatgttagtaaccgaaaagctttgccatgacaaggctaatgtgtttggcacgtcatggattgcgggtaaagcgtacatttactgcagtaaagtataaatgaatctattcgaatagccgtgctcacggatttgagtattgagactcatatggtatttggttagaaactttattccaaactttattaaatactgttgcatttaaaacattttaggctttcttcctctatattctttgctttctgcaagtaaacctagctctactcagatattaccatttcatgcattcattattgaatataatagcttgctgagtacgttgtactcacccttgcttcaaccctttttttttccagagtcaatttaatgttcttaccgaagccgggagttcaatcatataagttagtgtcatttcaatctaattctcaagtctagattagatagatggtttaagtctatagcaaaacattagagttggctcattctatagcttctactgtaatagttagccacaaatttgtaaatacccgtatattttgtaataacatctcctctggagccttgttcaaatgtatgcaatgaagatctagattgttgaacctgtatcaatctactgatccagggcttgatacagtctaaacatgtcggtttccgaatcattagtttcgggacccgacaacgagggggagcgccgcctgggggggagcctgctgcggggtcgccatggccgccatgggtggaggtgaggagggagacgagtggattctccatgtctcgatcgccctctcctggcgccgcgaccttccgcatgtcccgccccaacgtcgactacctctacaccaagctcaccgccgccatcgccaaggaggacgccgccctccgagctgccatccccgtccgccagcacgtcgccgtctgtgtccgatgcctcgccatgggggagccactcagtaacaggacgcggtgcttcccggcaggccatggagctcatggagggttaagatgaaatttactgtgggagttcgcttggatatatatttttttaaaaaaatcatgagctgcaattaggagtccgatcgtctcaagttaatatgcgagtttttttaaacaaatttcttatatgattccttatgtattaccaaaagtgaacaaaccgactcaaatacggatatgtatttccaaaagcaaacgaacttaaaaaccgactcatatacggatgacgtaccaaaataccggcaaaaacatcttcaattgttataatagtagagatttgggtcaaattgccacgtaagcgccacgcaagtgccacgttggacgaagacctagtcaaacaatacacgtaggcgctacatcggtcaaaaccggggtcaaatactgccgagggatctcgattgcactgttttgaaagttggagcatgtgttgtacccagttttccggactagggacgaaaatcagactaagcgacgaaaatcagacggagtgacaaattgagggacctagagtgaacttattccaatgagagtactacgtacttcagttggactgggccgagaaatgcagatgaaattcaggcccagttacgcgtggggagcatgagcatgagcatcatcttcgggcagctgctgctgatgtgttgctgtcgacgtcgccgctaaccgtgctttcagctcgtgatccgatcagatcagatcagtcgatcaatctcatcgcctccgcctgaacaaattcccggggtttcctgctttgcttagtagccaaggaataatccgccgagccgggtatgtacgatcgagacgacgacggcataaagcgtgtacacgccgccagccttgccatggtgatggtgtcgtcaaaacattaatattcccccggccggcgaggctgccggctagtgcgccgggaatct

SEQ ID NO: 15396 - DNA, 5050 bp, Oryza sativa
ccccccccccccccccgcggagcgctttctctctttctttctcacctgcactactgactactgctgctgctactcgaattcgacccattcagctgcatttgtgctgcgcccgcggtatggagcagcagctagctagagtgaggagagtagctagcacactggtcgctagctgcttctggatgatggataagggaatggatgccattctcaatttctcatagcaggagagagagagagacatatggcgatgcagatgaatgcatatgcgtgcatggatggaattggctagggggtgtttttgattttacttaattcgatcgcgacgcctttagctatgttgccaaatattcgagcaagttgaaatgggtggtaaggtgaactggtcatgtgcctcgctttctatctggtatcgtcgaatattgcaagtggatagaagatggtaatttactgaacgtaacggtagtcggcaggtggttttctcaaggtttttcaggtaagcaaacatttgtggagtatattttaatatatgtgtttttttttaaaaaaaacattgaaagactcctgaattttgcatatctgcatctcatgtcctacagtaaaacagttcagcaacaggagcaggctacttatgcttattccttgaactttcactgtacataaaacgaaaaggtgtttcaagagtacagcaactttcaacttaataggagtacagcaacttaaaaaggactgaagtttatctactagactactatagtcttgtaaagcagagagttggcagtttgatatttttaagatgtagacttgcagaggcagtgaacttccatcttgttttactatcgaccccttcaattgcagattgtagtgtcttgtgagctcaacttcagcagtaagcaagtttttcttgcttttgatattctcagcttttaggatacgttactttgcacctttgaggtgcagttctcttccagtgttctgccctgacacacagtacttgtgtttgttcagaaaagcactggcttttcctctaaatctgactttgtgtttagatctgattccagcatggcactgcattccattcgaaataatagtttgcttaccttcagatacaacttaaaaattacttactggaaaagaaaagtatattgaatgccaaaatgaaatttcctaaagatttttacagtactgcatccacagtggaagttttaacatacctgtcgtggaaacgataaagcagagaatatattaggaaaaagacaggaaaaatatttctttcagaaaaaaagaaacaagaaaaaaggattggaaaactttttcaacaaagtaactttgtctctatcttctcttgcaaaaaaatatcaagaacgttctttttaaaaatatcctaccaaattgttattaaccacctaagaagtactttattccatggggaaaaaaaggtaacatcaatttggattctacctaaagtttatcagaataattatccttaacatagacatatcttctccattaccacctttttttttgtgaaatacacagatttttatcttcaaaattcccttttgttcttctccatcacctgactgttcatgttttagcaaatcccagtttcaccattgcaatttcttccatttttcatatgactaacaccaagctgaaatttgttctctcctttattttaataaagctaaagtttaaattaggtgcctacaagaataagtactttcaaaggctgtatatattatctaagtcctttcaacaactttgccatgaaagaaccattcgtacatccaaaaataacccaaatcccatcatttcaagttcactcagcggaccatccatccagcatctcaaagaaaaaagaaagggaccatccatcagaaccaattataccccattactttcattcaaaaattataccccattactgatcaagctgaatacactaactcaaatggaagcctgagggagagatgtacaatgattatagtgcgcaataagaaattaggaatcgatggttggtacttaaagttgacaaggcataaatctttcaccaaaaatttaaaagataatcggatggctctgctcagtgtaatctgaataagatatcaagctgaagaaacatgaaatgggagacatgggacaggcccctgattaaatcaaaccaagacaggaaaacactggtcaaaagagcagctttaggtttaagttgcttaattagttggcataatgaggacgaggccatagccgaaagaatttgcagctgcgcttattataatcatcagataaggcaggcactattcttaacagtttgaccattgaggcttcaaatatttcatcatgtaggtgagatcaatcaaattaatggactatagcttgatcacatagcacatgttcgccgcatgaattcccggcaccgcatgtcaagttgcactacgttcaattcgattacgtgtagcgcatttcctgataaacgcattgctggaatgctagtagtcactagctaattaagcatacgtgagcaaacgattcgacattagtttttgcaccgaggtatgaactgtgaccatcctatgctaattcagccactaacaactgttttagcattgccaacttgtcttgtcaactcaattatttcacaagaaaaaaaaagactacctaagatagctagatgctctgataaaagcactattattgcatcaacactgtgagaggttccaaagctggaataaacacggcagcaaaattcagaaaccaaacagacaggataaaattacacagagaaagcaaggaaaaaattcctctgagagtcacagagattgctaagttaagagcacatgcaacagtggtgcatgccctgcgtacaaaagcttggacagaataagcacaaggcataatatcattgagggaggcacgagctttggaactcgttccaaagcgacactggcttgaaatctgaagaagagaagaaaaaaagagtcgcgagattttttagaatatttcagagaactttgcctttcctcccaaacctgacatatattcctccaacaaacacttttcctgccttctgcaccacttctctcagccggtcaatcactaagcaaacacttcgtttttgcagagaaatcagtcactaaacactcttgatactaaacacttgataagcctgcatttacataatctcttgtctcccacgctttgcagtgacagtgtctctgagtgtttagtaggcgttgcaatcgagcgtgagtttcgaaagggaaaaaaaatgacaccttgcatgcgtgattctgaatttccgaccattgttctgttgttggacaattggtattgtaatttgtaaagaaacatgaagaaacgggaacgctgaaatgtgaacttcaccaaaagacactcgctgccattcgtgtccgttctgatgcaaaaaggctagacacgagcatcattcgccagctcatttccctgcatcttgagaatactcgtctctctttttctagcataattagtacttacctgtaacaagattccaaggattaatccacggatgatgtggcagaacaggtgtactggatcaatcctacgccctttcctcacaaaccgggggccccctttcacccccatttcaagcaataaaatgagggggaaaggcaagggttctacactacactgccactgcaacaccctcttctcctcttcctcccccaaaaaaaagcctataaaaaagtataaaaccattgcaccatcgagcaaggcagtagcagtgatcgaggagaataaaagcagaagtagtagcagaagcaagaaaacactttgagcatttttgttttgttctccttgcagttacagctgaagcagcaagcagaagattaaccctcttggctaagattcaggttaacctgcagcgagaggttagctcagctcagcttagcttagcttaagctttgctcgagcttgccgtgcactccactgtctcttttccggtggtataatttggtgcggcggtgagctgccggccatgtcgaccgtctcctccgcgctgtcgtcgttcctctactgctgcttctcccccaccggcggccaccggcacggccaccgcgccggcgcgtactactacagcagccacccgacgagcaccaacacctactactacgagggtggcctcgccggacgcaggatgggcaggagcaggccactgtcactgcaggtatttgttcttcttcagcttgctcgttcgttcttgctttgcttgctctgttcctcgcttcctctgtttagctatgctacgcatgcagaagacggacatattctttgttcagatgaatacgtatttgcaagctagcttgtttatgcgatattgcgattgcgactagtcgtgttcagattattctcctcagatttttgtccgccacttctgatgctgtctcctagcttaacgctaattaatttcctagcatatgctcgtagcgataatctgtgctgctgtgcacgttgctgtctagaacagcccgcgaaaccaagctcatgcatgcgtgcgaaaaagagagcgataaaaggttgaaggaaaaaaaaagggcaacttacataggacaagggaaacttttccctcggcttgccgcatgcgccggtgttggagacagtaaaaatgtactcgtaccagtagcaaaatactacagtaggtgtatgtatcattcatgcgtgcgattgattgaattgctgcatgcgagtacatacagtaaaatatgaacggttgtctcctctgttttcccccagacagtggagctcaaggttcggatgtgctgctcaggctgcgagagggtcgtgaagcatgctctcatgaagctcagaggtatagtttgcaaatctcaattatcataaaaagtttttgaatcttggcaactaagggtttagatcaatttgttgtgacaaatttttttggcaaaagttttggcgggtaaaaaatttggcattgaagttttactaattggtgcatagatgcatggtaaagttttgtcattttactagcaaagagagagagagcacggctcccaacgtg

SEQ ID NO: 15397 - DNA, 8043 bp, Oryza sativa
tttggatctaaacacagccgtagttaaattcataaatatggataattctgagaatcgggtttccatggacaattcatgtgatgatgttcctccgtgtgagtatagcaacgaatgggatgccagccagggtatcttcttgtgctcgtagctatagctagcagcagctaggtttggtcgttggtgattgtggttatgccagtttaaatattctccactgctggctgcatctgcacgatgatttgatggatagtactactccagccaccacagagagaaaaagcctgggaataggacgggagcatgatggtgttcgtggagcctgcggaacatacaccaggccaccagctgccaaaactcagccgccaacaatagtgaccctaaaattaaaaggcttactactagcttcgagctcttcagttcaaaattgaggaccgattttagttacaaactttttatttgaacttctaactttttcatcacatcaaaacttttctacacacacttctaacttttctattacatcattccaatttcaaccaaactttcaattttagtgtgaactaatcacaccctgagttcactcttccaactttatcagatatataggcactcgattcagaaattccactctcaaaaatcataacacacacgaacgtttgagcataagaattcaatctatctttgaggtttcaaactaaaatcaggtggtttttgtggtgttcatgtataagctcatctcctcacgttctactccaattcacgtgtgtataggctgtaaattaaaaaactaaaatttcggcccatatgtttacatgggccgtgacgacgcctcgagtagcatattggcctgaagccctgaacacggatgagaaaaaaaccggaaaaaacttggccgatctcctcctcaccgcacggcaaaggctcctttcccctttcccgcaaggctcccacgctgacgaaatcgacgccgatttcccgaaatccccaatccccaatccagaatccactcgcttttcgataaaatttctgttgattgcgtcgaaaccttcgcaatcctctcgcacgcatcacgccttgcgcgccgcatctcgtagccctgaattttgatttgattctgctgcctccggcgcgcccctgattggcgaggaggtggtggtggttgtggtgggtgcggccatggcggcttcgacggcggcggcggtggcaccggactggtggaacgacgtgaacaactcgccgatgtggcaggaccgctccttccacgccctcgccacgctatacggcgccgtctcgttcgtcgcgctggtaagccctagccctacgggacacgttagaatcgatttaggttttgaaaaacatgggctaataataggggaggatattgggtcgtgtagccgagcagtttggaagtttcgtctttaattgtctcgatcgagggcttagatttgatttaagctgatgttttgtgcgggaactttgtagcttaccgtatgcttgaattgtatagtgatggagacatgggcatcagtctcatttgagtcgtttgcacttttgggagaatttttgcaggtccaattgatcagaatcgaatgtagagtacctgagtacggatggacgacacagaaggtgttccatttcatgaactttattgtgaatggaggtgagcatacttttgcactttgccactgcttcattgatacatgctagctttttcggaacttcagtttatgattttggactggtttgtttcagtgcggtcaatcgtgtttgtgctccgacgagatgtgcaacttgtgcagcctgaggtttgtggggggaacagtttatgtttctctgacttgtttctgcaatttttttcgaaggtgcaaagtaggaatgatgcgtaaccatatggcattgtaggtatttcaacatgtgctcattgattttccggggcttgcattcttcacaacctatgctctgttagtgctcttctgggctgagatttactatcaggttagttttacttggatatattttggttttgtcccatgggtgtttttgttctcattggttcatgatggcatttgttaggcacgggcaatgtctactgatgggctcagaccagctttttatacaatcaatggagtggtctatgcaatccaggtgactttgccatccacatttcttactgttgatataattgcttctctctacaaactcatacatgaaactcattatcatgacaattggaaaacttgttactggacggatcatccattgataatgtaaagtgattggatgagtcccaattgaattgttatgtttgatagtatgctatcagaaaaaaggttaaacagagaaaataaagcaaacactatcataaaaccctcgaaataagttagttagcgtagcatgattccaactgactaaatcttgactgcataatgtacaattactcatcattgcacaaatagtttattttattgtggagacaatgatggctgttagcttgtggggactccctggatgtacactttctgttgtgctacattttggtgggcatggatgtcaaattaacctaccacttgccattcagagcatttttcagtgtggacatgttcacaaatttctaccgtattgagagcatatttcaatacatagaattacacaaagttttgctacctttcctttttgaagtacttttggaatgatctgatctttgcatgattttcagataatactttggatggcgttgtggtggaaaccagttcgagcaatggtcatcttgtctaagatgttctttgcaggtaaatcttgtgtaatttgccttgtcttgcagttagtatggattttttattttgaatgagagcttgtggaaatcatagctggagatagatgggaaaactatctgatcataagttaaaaaaattctcgcgtacgtttagttcctcacatcccctaaatattaatgaacatgaaggaaatacattgagtcatgataaaccaggcgtagtgcaattttgagttttcttgttatacatgataatttatcatttattctactaatacaaagttatttgccagcgacatctttatttgctgcccttggatttcttctctatggagggaggtaagctgtccttggttttcttatttttgttgttttgggtgtttgtcttttgaattatggacaagaaattagtatgcttctgaagttatttcccacatgttatgtccatgagcttttgtatattggattatttggaaattggaagtaggcatgcctgggtgggtgtgcagttattgggtactggttgcggtgattcttttcatagcatgttacttagtgtaattttgtggttatctttgtaggctatttctgatgttacagcgttttccagttgaatcaaaaggaaggcgtaaaaagttgaatgaggtactatcttttatcattggcttctattccagaattaatactttagataatttgcatttctaacacatctactttttcataggttggatatgtgacaaccatatgcttttctggcttcttgatcagatgcgtaatggtacgtcctatgtcaatattatgttagggaggtcttcagactttaattactccacttaattagagcatcttacagatgtgcttaaatgcgtttgataaagaagccgatcttgatgttctgaaccatccaatcctaaacttcttctactacttggtatgtcttcctgttcacttgctttgtactcaaccttgtagttttatacattgtttttgtttatctcgtggcatttatatcttgatctcctctaatgtcattgttgtttaatgttagaggctctgtgttggtcattttaatttgccatgttcgaatgttcacatcgaggaaatcatttcttacataattttaactggtgtcaaacaagggataatgctagaatgtgatatagacttgtggaagatatgtttcttttgcttgtttttaccctgattggaacatggggcacatggtgggtatgctgatatcctaattaagtgattgtgtttacaaaaagagctgaactgaaattctgttgggaatgtgactcaaggaaaaatggttttgctacattgtataaaacaagagaggaaactagtgaaagctatttatttggcagaacacagaaattgtatgtgcttatctgtgcataagcattccaaactatagcatattgattttgccgaatgagtttacaaaatgcttttgctgttggagtatattcagattgtatgaagtaattgagactcaagacagtcactgccatatttatttgcttttgtaagaatggtcattaaaaaatggcttgccaagaataaactgcaaaagcaatttctttgtcgtgttattttgaatatgtctagaccaataattgtacttactgagtgcttgttgatagcgttcattttctctttggcagttggttgagattgtaccttcagctttggtgctgttcatattaaggaaactaccacctaaacgggggatcacacagtaccatccaatccattagatcagtccagggatccccaatgtgcccttgcaaattgttccttcaaactggtgagtacagaaatgtaaatcttaaccacggatttctttgtaggtaggttgcttggttttcatgtgaaaaaagctcaacaaaaattctgggatatatatagtttgtaaaaagtctaacatcccgtcatcccaaattcctgcaattgctgtactgcgacccaggagtattctgcaactacaggttttcttctgtaaactgaaggacaaatatgctttgattatttgtttgattatttgtaataatgtcagctttggtttattgttcctggtaaaaagccccttgcacgcttcctcctgactccccagtggtacacattgttcattactacctttttttagcctggacaatactgggcaatgttgtgttccttggcagagtattttcccttttacaccttcctgttcactggattgcttatacaagctctgatgggcctggatgtgtagtagacattgggcctcgttaacatctgtaaacttgagcaactgatattccaaagttgatcatagtgcgggaagtctagcaatgaactgttgagaagagaagatagatccatgttttgctatcaaacattgcaattataggttttgccacccaaaaggtatttacatacataatttgctgagttttatgtattacttttagtttcctttgttttcaatctggagatcattttcaaattgatcattagctgaaactggtagaaacaggacagatgtgctgagcccttgacattcaagaaatttatcaaattttcatcacccagttgtcaaatatgtttgggtgggtatgagatataggcaccagattgattccaatgaaccaaagccagtttggtcgaatccctaataattgtctgatcaaagaaagagagaaaaagagaacacatcgaaggtgacgaatcatgagtgaaaccgccgttaagcaaatcatattacgaacagtggcagatgatcatataataaggagtagcaaattctagagttgcaaccttcgagcgacaaataggcctaaggaggttggagaaaattacgaacctccaggtacaagttaccagtgttattagtcctctgtccgtcccaaaatataagagattttggacggatgtgacactatatccaaaatctagtgtcttacccgtccgaaatcccttagattttgggatgaagggaatacgtggaaggaacaaatgagtatatgaaagaaaatgaaagcacgcacctgtcaatcaggtcgacagcttgtatataccgggagcatcaaattcagaaccacacgaacaggttgtccaattgacagcagaggaatggagacttggagagggtataaacaaagctcatcttcatcttaggccttaggagtgcatttttagaggcttctattctgactggtagctgtgtgttcctgttgggaatatctcaatccaactgcgattcaactcccaatctaactgccatttcccgtttctgttgggagtagtagcgttaatgacgttggaccagccctgctggactgtttatgaactattgtacgtctgaattagtaattccaactctgctttacttgtccggacaaactctgacgaaattcttgtaaagatcttgtgaaatttgaacattccatatttccattctacatctactactgctacatgcaacacaggattctggtccaagacagtaaaatgcttggatgctctctcggatgccggcagggggaagggatcggcaggacgggcccaacaggaaggactcgtgtgcagacaccggacagagtgagagattgctgtgctttgggcagcagatgtgtcagtgtttatccatccattcctcggctaccttttgacagcaagaaatggatctccatagaaaccgcatggccccagcgaattcagcatccacggattctttgcttggatttgatgttcttcttcttcttgtgctatgctctctccttcaggccatccatcatgctcaagtctgaatactgaatccatggctttggctgatgctgtcatccatatagtgtgtgtgtgtgtgtgtgtgtgtgtgtgttttaatgcatgattcttttattgaagtgcattttctgatgagtagttaccgtggatgattgacttctaagcaagtgcggagttggtaagttgtaccacagacagacaacacgtatctcatgtacagtacagttcagcagggtaacgtagtacccttgctaaccagggtcgacagggactcgcagtagttgtaaatgggacatatacactgatagtggtactgttcattcattgattaacggctacacctacacctttcctttcagaaacattattgtggtcatgttattaattatagagaaaattgcaaaaaccaccccgaaagtcacttgaattttgacattccaccctataagtcattttgttgtaaatacccacctgctactaagttttgtttcaaaaaccaccccaatgcgcacgtgtttaaccgaatcaattcgttattgctgatgtaggattaccacaggctaagctagccaagtcaatcttgtctaagtgcttgcattagacttattttccatatttgattgattttttttttgcatatagcaaaactcagtgcaacaatgtttaggctctcgtcaacaattttatatgtggaatctcacaaaaaatgtatcacgaatactctagaagtatttagttttggcaaaggccatattgatggctcacattttataaaaatatgttgattcggttaagcatatgtttaccggggtggtttttgcaacaaaattgagtaggtgggtggatatttgcaacaaaataatttatggggtggaatgtcaaacttcaaatgacttatggggtgatttttgcaattttcccttaattatatgccaaagtagcaaattactccctctgttctaaaaaaactctttttagatgccatagcaacggtcacttaacacattattcaggtaatgttttttccccaactgtttttactgaactgattagtgctaacaaaacgagcggtaactcgccggtgatatatttttcctggctgaagtatgatgctttaccactgaattacatttggggaaaatggcctagcttagagtagcttagcaaacatccacacacaaaggtgaaaacctacaaagacaaccctgcacgcttatattttggaaagtagtatgtagtggtagttggaagatcaccatccagaaatgcgttgagctcccaacttgggacctatgcgtttgcaggaattagtggactatggaggtagttggtgccggccggccttacacttctttttttttttttgaacgaatgccggccttacactcctgaatttgctactccctttaaatttcgaattcagacggcatggattttgattataaattaccactagctcgtagcagatggttcttggccaccttatccatgat

SEQ ID NO: 15398 - DNA, 640 bp, Oryza sativa
ctaaccagtatttatccatatttatgaatttaactagtagtatttaatagagacatcaatacgatgttggtatattagaaacaaaaaaatactacttttaaaaaacgatattcgatcaattggctttagtttcgggcccattgacaatttgcagatcgacagagagtacgtacgtacacagagcctggctttccattgtgtaacccgtaaagggcgccactactcattcgatattgccacactgactgactgactttagcatctgctactactactactccatggacacacagcacactacctgacctgtcaccacggcgccgagcacaagagagaacacacaatgatgatcacacacactcgatcgatctcactgctactagtagtagtagtagtacgcgtgcaatgcgaggcgggcatgggaatttttttacatgatggagcaggcgttgacgtcgtcgtcgttgaagaggttgctgacggggtcggcgccgcggtggggctccgggaggtggccgtgcttgtcgccgttgtagccgtggcggtagtagttgtagctggggcggaaggactcctcgtcgtggaagtagtccttggccgacgtgaagtagagcggcaggtctgggtttggccagaactc

SEQ ID NO: 15399 - DNA, 704 bp, Oryza sativa
ttcctgcagcccctgggcgcaccaccacggacacggagccgccgccgccgccgccgccgccgccggcgccaggtttctcctgcctccctcctcgactcccatctacgaccaccaccgccgacacgcccacgccgtcgggtacgacgcgtacgccgcggccaccagcaggcaggtgctgttctaccggccgttgccgccgcagcagcagcatcatcccgcggtggtgctggagtcggtgccggtgcgcatgacggcggggcacgcggagccgccgtcggctccgtcgaagcgagttcggctgttcggggtgaacctcgactgcgcgaattccgaacaagaccacgccggcgtggtcgggaagacggcgccgccgccgctgccatcgccgccgtcatcatcgtcatcttcctccgggaaagcgaggtgctccttgaaccttgacttgtgaagagggtacggccgtacacgtacacgatctctgctactttatgcttcaattctgctactacgtactgacacaaatggaaatcgtcgacgaagagtgtgaccggagaagtaaacaaaggcggcgatggcggcgcgcaacggcggcggtggcggcggaggtggaggcgcttggagcatctagcgccttcgtatttcgtatatagctcatcatctctcttaaattagtcagtgcagtgtgagggggaacagtttaagaa

SEQ ID NO: 15400 - DNA, 23127 bp, Oryza sativa
aaattttataatctcataacaataaaaatactatttataaaaagttcaaataaaacagatgattaaagttgggcgaaactcatgattgcacttaaaatgggacggagggagtacaagtttcagtcaagaaacacagctggaaagatgttgcttaatttgcatgaccctggtgactcataggagggttccatacgtatcacacatatcgcatactttctctgattctactttttttctaattaggtccgaatgtccttctgaatttaaatataaaacattttatacacttgtgcaaatgatcatgcatgctatcccttcatttatggagtacgtacatatgacaagctggatcatttatatttgtgaaggaataggccagattttcttattttcatttgcaagggcaaatggaggagaaagtattaaaaaaatgtgtataggagttgaaaacaaactacatttatgaaagagttttaggagcttaagcaacttatatttatttaatcggaaggcatagtctacaagtagattcttcgagagaaaactatgcatatcctcaaatacctagataagattttcttttttttttgggtaactacgtacataagttgatatatgcatcaaattgtccccactgcttaaagagagagtcattctcttttcatcactctccctctcccttctacgtaaaaacctcttctctttcatataaatcgttttgaacaccgatttctcaaaaaataaaaaacaaacgacgaatatataaaaacatattatatatagtttgtgctctaaaattattagttttctaaccagagaagttgtggttacatgcatgcatttttttagaaaaaaaaacaatattggacaaccgaggatgacattctaataataaaggaggtgtgagcatgttaataattgaacacgggactttataaatgaaaccaaacatcctcttggctctaacgatgcagtagcaggcgtatctcaccttaatgcttaatgcatgagtaagagtaagttttcgtaacaaaagaaaagtaaacctttgcatttgattccagccaccattagcagactaggaacttgtgatattccttagccgcgtttccatcgtcacgtgatcgttagctagctctacgaactataagatctcctatgataatgagttcatcaattctcactacgaatggttgccaaaagcacacgtagcatgaaatttattcacatgtcatattaccagaaagttatgtaaaaaaaacgtactattatatatggacgtaacattttatccgaatcacaacgaaatatcgctaaaataaatagacaatacaataaggacgacggaaatgtaaatacgatggccccgcgggccgcagcgatgttctaaggacgtccgatatgggtcccattcggcaggcatgtgttggcagcggcaggagtgacagtctctccatcccctgctcaccggtgacgccattaagttttcttgggtggaatgataatactagcagagaaccactgagtcgctgctaggtgggtccaagaacacatcgggcccacacttcagtgaaagcaagaaaggagagatgagtacacgaggtccgtgctggagacaaaactgggcgcgctgcagctgcaggccaatgggcggagacgaaatggcatctttgtcatcgtctcacgccaactgcaaatgctacgcagagactaggaccacaattcagtgagagctaatctttctcgagctcagctcccaatgcaagcaagagtattctctgcattttgggttactctcaatctcaatacaaaattctgcgatcttctccgtattcaactttaatcgtccgtcttatttaaaaattattttaaaataaataaaaaaaataaatcatgcataaagtatcattcatgttttatcatctcatgacaacaaaaatattaattataaaaaattttcaaataagacgaacgattaaaattgaatacgaaaacgtatggttgcagttaaactgagacggaggaagtaagtactctcctcttgcatattactctcctctatcccggttagttccagtagttgactagtagttggcccgtactaatactagccaggctttaactgttgtggtaccatacgctactgttcatgcttaccaagccatcgtgtccatgagtgcatccatcccttgaacgcaatagtgagtactgatcgagtagtggtcgctcctcagtacttgcattgcatgcacgcatgaatgatggctgcagattgttgaacagcgagttattgtagatagagatcgatgactatatatatctcctgatcctttgattgctggatgagaagtgagacaccatcatgggattcatgcaaggagaaatcattggtttagctcattcattattgttgttttatccgtgcttaaaaatgtgggtttcgctcgtgatacgtctcccgcgcgaccagtcgtgtacatgaagcgcggttggatgctccgtggctgatcaagtagcgcatgcatgagctgctctggtgtatgttagtaggacccgccctcatgtgaccgactgctggctagctcctgcaccctgtcattccacagctgttctcgtgccatgtcacccgtacttttaaataaaccgacatctatgaaccggtacctattaggtattttgtagtggtgctagcttgtgcactacttcccatcccaagggcgaaagaggtgttcgtacatgttcatttatttgcaaaatgggtgtccctggcagcttgacgacgctagtgacatagcctcacgcacggtgcttggcagctcggcatgttgtcaccaccaagtccacgtagctcgtgccattggtcctagactcccagcgtttgacagtgcgtctggacattttttgaacataagaaattaattgttcgatcccaacgagaatcgaattgatgatctgtatgaaaatattgtaaaatcactcaggacgccctattgatgcgaattggctataggtgtcagattcctatccagaaccaattgggggcacctattctcaaccgtataggtgccagttccaaaatcggcacctataaaggttgtaggtgccggttattagttaagaaccagcatctatatatagtcaatgaataaaaaaaatgccagctcgatgcatcagctcaagcagctcgtcaccggaccgggaccaccacgttgctcaccgtcatcgcgtactgcaccattatccgtcttgcagagcatgaccagaggacaaagcggaggggaaaggaggaactcacatcgaacccttggttggcagtgacgcctccatccacctcaccgctgcgttctcctcctggtctcgacgcaatgctctctggcccatccattccccatcgctccttgtccccaatctccccatgcactgtagtgatttgatgcatccttgcatctgcttcgcaaccaattgaggcatacaaatgtagaacacgtcaatgaatacgatacaaattggacacaaaatgatctcacataaacatatactacactattaatacctggtctcacatgtcatgctcacactgtgtcttgtagtctgtgctgcagctgggctacaaatctgtagcccgctgctcttctctctcatcttttatctttttaaaatatgtttatagttggattatagtcagctattgtacctacccttagctagagtagtctcctactggcaccttttgtggcatggtgtgcggtcataaatataatgacacgaaatgcatgcagcgcagggcctaaagaagatgaggcctactcctagatgcagttgcagacacgtcacctggatgggatggcggccatacatctactagctctccccaatccccatgcctgcctgaagctggttactgtagtaaacttcgaaccagatccgagtcttcctttacagcgacgtcccatcgaaaagataggaacaaatggccagaaaagatagcacagagaagccgatggatcgatcaggatatggaagcttaggttccagctacccctactagtgtaggacagcgaaaccctccgttttctgccgccacatgagccatgaacgaccactcgaagttctcagataacacgcaagccaaattaatttgaaacctctgagagcaaatataatagtaggctataaactgactaaatgctgaagtggaagaaaaaagagatgagagagagaagaagtgggctgtaaacttacagtcggcttagacacaagaaccaagaaactgtgtgagagagacaagtgagtcatatattaattgcaaagagctaactaaattatatgggtgagctgaaagaaggctacaaagaaccttatacccaacaagtcggctgtattattagtcttgctcttaggagcatccagaacacggaatcgaatgtaatcactttatcgccagattagtagatcgaccatgcatgcatatgatgatgcagcttactgtccgttagcgcatgtccgaactgaaaaaggatcatcgcgaaccctgaatacattggtccagatgattccagtggaaaaactatagtcctccattattatgcacgcatggatgatatggagttaggcccggtcaaaaagaagcgatggcgactcgaactgcagcgtgtgaaaggaaaacgaaaaaaattcagtagcatatatgcagcacgcatgcacactgttgcagatgtaggtgttggaattacagcacgcatggcttccacacacgcagctttcagctgatcagctcaggccactggcgtcaacagagggagagctagcaaataagctggatctcctgcaggggggagatgtctccgtgtcatcaacatcccagcagctatatatctaatctgttcgatactctctatacaatagaatcgaagtccatctgaccctctccccactcgcttatctcgatcagatgtgatcgattcaacaagttatatatgcatgtgtatgattggtgcttgtatggtggagaagagagaaacgcaatcgtttatagccatacattttcagccatgcatgaaaatgtctggatcacgacttgtcgtagaggccaatatgtacacacgtacagttcggtcgatggatttcgtcagctactatataccggtatacttttgctcgttcaagtccaaaagttaatagtatggtttcattgaatttctggttgtagctagcaggtgggcatatatttagaccaagtacaataatagactataagtcggctacaagtttatgtggggagataagagagaagagagaaaagaaacaggctacaaatttatagccaacagcagcacggactttaaaacgttatatgtgtatgacaagtggaaccaattattaatgatgtagtatatatttatagttaactattgtacgaattagttattagattgactatatataatttggaggtagtagttggctatgctattaaacttgctcttaccgtcatcgcgcgcgttccttgtgtggagatgtttcctgacctgaacagtactgtataccgttcacatcatgcagctatttatcttttgcttttttgacaactacacaggagatatcaggatgcaaagaaacggccggcatgcgcatatagaatcttcgacgactatgcatgcatgcctttaaattccatcaaaactcaatataataattattcttttttggtaatatctggtggtgtcaccagcacaactgttagacttaagctttcaacaacgtccttacaataaatttattctgaaaaatctctggatcactcatgcgaaatgtgtagtactccagtagcgactagccaactatactactgtgccacgaaaataagcagccgcgggcggggcactgtacgcctgtgggtacgtatctctcgtacagtacaccgtaccatacctgtgcggacggagttaggacgtctgcaacgatggcggccgacgcgacatttcaccggccagctgcatgagaattgtattgcgacttgcgagagatatttgtagtactcggcagcatgcatgttacattgttacctgatctcaggacgacgacgaatcgacaaatctttatctacacattgcagatcggcatcggcacgggcgcgcacgcgtcacggagatcggcacggggcattatggcggggcactgtgctactgctagtctgcgacacgctgcaacagtagccacagcaatgcagtggtagtagtagcagcatatgctagctcttggggagcctggaccagtacacgcgcttttcgttctcgccatatatgcagcgcagcacgctgcaggcaggcagggagtgaggagtagtgggtgtgggagattccccttttaactcgtggcgcatgcatgctgctgctgctgacgctgccgcccgactggccgacgagccggcctgctgctgccgctgcttcgattctctgcgcctgcctctgcctgcttgagttcctcttcgttcgatgatcttttctttgggagatgtcttcttgctcttcatgcgctggcgctgctcacgagatcgatctctgcgtgcgtcggctgctgaagaggaaggggatttttgcagcccagcgccacaatcatagcccacgtcagtgtgtagcccatgtgacatgcaggctcgggctcaacgtaagcccagattttgccacgttgttatgggccatatagtagaggccttctcaggctgtaacaatcaaagcccacagatgtcgcgccaaaggcccacactaacagaagaatccacgagcgagcactattggcccgtggttgaagcctcaaggccgtatgtatgcccgtatgtctccctgcggttgccacttgccagtggatagttaaggcctgtttagtagagctcaaacttctaaatttagcttcaggagttgggtctgtagtggagttgtgaagctgcctaaacctagctccacctctctagttcattttgtgagagagctccacctatctctgctccatttttggtggagcggaaactgtttggctaagctaaggtggagctggagttggagctgtgccaaacagacccttaaggtcacagctccagctccagatctcctagatagcctaaccaaacagtttcaactccatctgaaatgagaatggagatgagtaaagtgctctcataggatgaattagagagatggagtcgggtttaacctgctccataactccactttagacccaactcatgaaactaaatttaaaagttggagcttaaataggtttcttattctggctttctattcgcagcatgtacatgcagaggttaaaagatggaacaataaaactatattgtcactataatgtcacagagaagtacagagtgcagagtaaaataatctacgggaagaggggagaagggacgcacgagcaagctaattgagctagctagcacgtaatacagagagaccaaatgaatgatcaaacaaataagtttacaacactctatctagctagctacgtcgtcgtacgtacaattttcaatttaatctcatcacaatcccaactcacacaagcctgccacgagctatacatcatgcttaggtcgatcgatcagctggccaccctgcagtttgtcctgatggtgccggcgttgccggtgagcacgccgatggagcccatcttgaccatggcggcggcgaagtcggtctggaacgagtccgggttgttggtgtagccgacgacctgcgcggcggtggtctggtcggcgaggagcgcctggtcggagctgagcaatccccggttagcgacaatggcggcgtagtagttggtgtcaaaggcgttgggcgtgacggcgtccatgggcaccatccccgccgcgggctgcccctgctgctgcgggcactgcgtcgtcagcgcggcgacgtagctggggtccatgctggggtcctgcccggcgttggggcccgacgagtagaggcggttgctgaaggagctgcagtgcgacacgccgatggtgtgcgcgcccgacagtgccaccatttccgcctgggtgagccccttggcgccgaacatctggttcagctgcgccacgttcgccgacggcggcggcaggttcccgttcgtctcctgcgccaccgacacgttgccgtctctcctcccccccggcacctggtacgcgttccctcccacctgcacgtacacacgcacgccaattgttactctgtttctcaaaaactgtactaaaagtataattttagctgctgtcatcttggctcgtgcatcagcggtgtacctatatccatgtgatacacggaaacatgtagattagggatggaaaccgtacagtggtttgtgttctcgagttagttagacgcggcacatggttgattgggttggtggtgaagcggcggggggacgcatgggccgcacaacgggagggaatggggacaaactaaaccgatcgatccatggcatgtggtgttgtggaccgatgggcgtgccggccacatgggcgtgagacgaatccacgtaaactatccgtcccacttgctcatcctgcccccagaattaaacccctcctcgtagctttcggtatttaatttcctctttggttatcccctaatgtaatcctgattgataccggagagggctggagtcgtcactactcactagcgttgctttttgcaggtatatgtctttttcatcatgtgatgatgtgaaaggttatgcacacgcatacgcatcatctatgtgttgtttccagctccagctgaagtttcagtataacggtcttaacagagcaccatttggagttcataaattgataaatatgctagtgtctatttggaaaatacatgcatttggtcggttgtgaattattgacgtggtggtatatactgtatactccattgacttaccactagtgaggaatctttgactacttgttcagaatatgtcaacttgaacaatatgaaactgcaacggtcgtatgatcagtaatgttcatttaaaaaacacatgtaacacaaaaaatggttctaaacctgctgaccgtatatatcatgtcgtaatgctcctactttaccgttgtggcgtcagtaataatcaaatttagtccaactgaatcaatataatcatacgaacgtactagtactagtactccataattttgctccgatcgatgtctcaacttccttctacactgaattgcatggcgatacagtttacgatttgtttgcatggagatcggagcaaagctagattaggaatgattggagttggcccatcacaccagcctcctaaaataactgttcatcacccccagagggttaaagtgaactttattagtgtgccaagtgccatgatcccacgatcagattggattacttaatctccattcttttggcgcatccccaaaagatgatcgattttggaaagcaaaggctctcttttccttaacctgtgtgagggcgacacggccatgtgacgctgatacggacaccgaccggtgggtccgtgcagacaacgggctcattatacgtgaaccaaccaaaacaaaagaaaaagagcggcctctgcttctcctgcagtcgcatcgcggcatcggcacatatcgtgcgtgatgccgccgtggtgcgttgcttccagaaaagcatcggcaatgaatcacctcccattctacgccgggtcgggccggcagcatcgatcggaaaggagaagaacagagtaagttcctactgccagtcggagtacaactactttcagcgtcagcttttggagaaagatagaacgaaagttggggcaatccgtgtagggcccgaccggttttatattccaggctcgatctatctatctatcactcgcaaatcacccaatccaccgacgaatcaaccgtgcgccgtgcgcgttgtgatcccccccgacttgtacccgcacgggcaagtagcaagcactagcagtgatgcgccggaggaagcagctggtaattcaatggagcagaagaaaacgtacgtaccagcgcgagggcgtcccgggcggcgaaggcgaggacgtcggcgcaggagacgacgccgaagcaggccgtctcgaggcgggacttggcgctgtcgatgacctcgaagccgcggaggctcgtgttcgggggcgcgtccttctccgccctgttcccctgcgtcgagtccagcagcaccgacgcgtcgcacccctgcatccacaaggaattcaggtgtctcgctattacgtgcaccacatgtcaaaacgaatgcagtaaattaggtaacacaggtactacgtgcttgattgattgactgtagcactgtactaatgttttggatgctaggataaaacaggggatgccagatggcaaacatgaacgagcgatttctagctgtcatggttccagagtatcccatcgttccgtgcaggtgcagacacggtgcagcaatctaccgtgcgtgcattattcccctacctcgatcggcttatcatcctcgcagtaaaattaagtacagtactacatacgcgagaaacggacgaagcagagcagggtgcgcggcaaaagagatgcagaggctccatatgcaagcgaagcacatccccacagtgacatcacgttgcaaccattggatcactcaaaaaaacacttgtatgtgcagccgccgcatatatgcagttgcaactttgcaaaggcatctatctctagcttaattagcttcacatccccaacaagctagtatacgtggtctcattaatggaggaaccgaatttggtggtgtaataagttactattagttactgtactgaccctgacgaagcagtcgtggaagtggagacggacgaggccggcggccatgccggggttcccggacaccgccttgctgacctcctcctgcacgatgatctccgccgccgggcacagcgtgtcgtagtacccgacctgcagctgcgcctgcgacctcgtcgccatcgccatggccatcaccgccacggacaggagccacagccgcattcctctgcttcctcgcgcctccataatatcgatcgatcgatcgatctgctacgctgctaggctctcgtttgattcttcgcttcttgcttcaggcgctgatcttgcaggactgcagtctgcagcagcaagaggggcagcttttaatcttgcgtggaagcgagctatgcttctcggttaaggatggtgatgaggtggtgggactcgaggtggttttataggcgtgagagcgagagacgacatgtggggggtgaagtgggggagcgagatgcatggtgccaattggggtggtgcccttttgggggcgagcatgattgagtggaggcgatagaaaggcattgcaaagaaacaactttgatttttggactgtaaaaaatgctccaggcttttggtcttcatctgcattctcctgtaaatactaacccgagggtaattgagcatttgaactggatattgataggcagtgcactgcagtagcaacaagcagtcaagcagaacacatgttatgttacaggaaaaccgcgggcagggtgcatgttgggctgagctggcatttgagatgatgagaacgactcttatttgttttcttttcttcttctgtagcttggaactttcttctctgttctcaccttgtcagttgtccccatgcaaatctgggccctggagtagtagtactacatcagcatgcgattattgctaaagtaaatgatgggacaatggatgtttcaagacagaggtccctcggaatcacgtctgctgttttgagcttgtgaattttgcgactttattacctgaacatttaacgattgggatgtgaaactgacggtctggaagaaatggctggatgtgccctgcttccagcacactcctgatccaaacttaagtactcctataaatttcgctatatcacacttcagaacaagccaaccgtgtcctccggaacgcaccgtagcgtggtcggtttgtactaaaaatgttggggttgcttcagtttgtagtgttctactattattgtcatctctcccattagttgcatccggtacgcaaaatagcgtcagctacgcggaatgctgctgcccaagctcttcgttgccagctagttacacttcacggaatccacaggcatcatcctaatcgattgcttcgtttgactcatgcgtgctactcctacttacaaactgggtcctccttgcttccacatgcatgatcgctatcaggttttctggcagtggttaacaagagaaaaaggactaactgtactggtatagtgcggttcgttagggcagtgcagacgacagacaactcaaagccagattcttgcacgatggcttccacgttaaggagaagctaccttagcctgaaacccttttcttcactcgcaccattaaagcttaatggtgtgacactacgtttggatctgttcggttagctttacccaaaggaatcatagtacatcatgaagtataaacgcagggccctgcagatttgggtgaagttgcatgcagtaattaaccaataataactgaagaaagtaggaacattccttaggctgtttcaggacaaaacttcactgtcagaataattcgagttcaagcttctttagcattcagaaacgtgtttatctacctggaaaaaaaagggataaatcccctctgttaactgctacctaccagatggatgagtaggggtggtactgcctgcacatgcatgcagatgcagccatgcaggtagtcgtgtttggtagaagctggatgcataaatcgcgcaaagaaacctggcaatttatagcctaccaatcaatccagcatggactgctgtcgctttgacctcaatttgagaagccatgataaagtgaggttgcataaatcagtaccagcactgtagaagaaatatctttttcagcagtttgcttaatcagtaacagtactaatcgaattgcttgcatgatcactaccatacttcattaataccggtatcaggattcagaagtattatttccttagactcgtcttgtactcgggcgaaccactaagtcctccttttgtttgttcttccatcttgatatcaaagttggctctgctttggttgcattgcatttgcaggcctgttgcctcttttcgccagcatcaactttacggccaataactaacaattgttcgtagaaagtctcagccttatcaatattcagtgtccggttcaacataaaaaattgcgattgctagattagattgttaggttggctttcaattttgcttggcacatgactaaaagtgtgtacgcagcgtgtggcgccgatccatgcattcaccagctaaataaaaaacacttttttcccctgtatttccaggcaacgcgccatggcttcgcaggatttttttagcagagcttcgagaacctgtgagcttgcatgtctgctaatctctcgtgcctcactgtactgtccaaattccaaagagcaatgaatatctcacgcgtaatggttggataatttagttcaaaaccaatgcgtaattccattgaatttttgccgtttgacaaattaaagcatagagacaaaagaagaacaaaaactctctgatgataggaacaagtagaggcttcaaaaatgttgttgttcagcaagcgaggcctagctcagtttgcaaccctgcagtttgtgcggatctggccgtcgctgccggtgagcacctggatggcgcccatcttgaccatggcctggccgaacttggtggcgaagaggtacatgttgtaggcgttctgcgccacgagcgcggcggtggcgttgtcggcggtgagcgtctggtcggaggcgaggacgccgcggccggcgaggaggttctggtagtagctggtgtcgaacgtgttctcgctgccgtcgtccatggccaccgtgttggcgctcccctgcgggcaactccgcgacagccgcgacgccatcgccgcgttcagcgccgggtcctgccccgtgctggagttgtacccgtacagcctcgagctgaacgagctgcaatgcgccacccctatcgtgtgcgcccctgattaaaaaaaaacacagagagaaaaatattgtttgttaaaaaaaagaaaaaaataaatcttttcgagaagaagagtggtggatatgcatgtagcctaatatttatagtgacttaagtaccattctaatatcttgagttcaaactaacagcgaattttagattagattatttgtggggctaataagttcttaatttattgcctattcgcctgggccttatgagaattccagaagttgggctgaattgaatagtgggctgtcattaacaagttgacctatgtgggcttttatatggacctgtacctgaaaggatgaccatgtcgtcctgggaaagcccatgagtggcgaaactttgtgtgagttgggccacatctgaggtgggacggggcaggttggccatcgcgtcggacgccacggaggtgttgccgtccctcctcccggccggaacgcggtacggggtgccgccggcctgccgtccaccaccgaccgtatgcaagttaaaaacaaattcgcagccaccgtgaaagagctagctgcgtaccagcacgacgctgtctctggcggcgaaggcgagtatgtccgcgcaggagaccacccccttgcacgcgctctccagccgccgcttggcgctgtccaccacctcgaaccccctcaggctcttgttcggtatcgcgtccttctccgccgtgctgttcgccgtcgaatccagcaaaaccgacgcgtcacatccctaaaaacagttcatcgatcaaccatctcgatcagctgattgatcccatttccccggaatgaattgaacaatataaaggagagatcgaattagagattggtttattgggatcgaccttgacgaagcagtcatggaagtgcatccggacaaggccggcggcgaggccaacgttggcgctcacggccttgccgacctcgtctctcacaatcacttcggcctgggggcacgattggtcgtagaaccctacctggagctgaccttgcacacctccaatgcacaagctcagtgccacgactactgcacctgctaccgccaccaccaactccattgcccctcgatctcacctagctagctactactataggcagctgaataatgcgtcaaagatctgaacaatgtggacaaatttatagctaggaggctagcaaatgatctgaagaagaaccccaataactagtaaatgaacattggtcactgcagtggactaaccagtctacatgttcttatcaactgcttctactactagtaatattcactgacactgacaggcatgcgcagacaagctttcaggcagccatgtgaaggcctgtagctagaaacatggccaagattttcaggcaggcagggctttgggatatttggtgcgatgtgtgcaaaaaactagccggtaaaacagctgctgcgaccagggttggaaatttcggtcatttcagacccctccgatacgatattatttcggccgaaattttttaatttttccatgaattttggtaatatttattcaaattcaactaaattttgctcaaaatttcagaaatttcggtatttcggtgagcaccgatcaaatcggctaaactgataggtttaaccctggctgcgacttgcgattgaccatctgttgtttggtgccattgtagtagtgaccactgaaccactaaacgagtggcgttgtaaattaatttgtcattgttaccaagggataggagattactcggatgagggattttaaactgggacagtgcctgcgaggattaaaaactgcagttgcttcaagatcggtcaaggcatccggctagttgtctcatgtgctagggacagaaccgaacgtgcatggagttctagaggcttggatataaaaatggcagccatcatgtggttaagcgtgcaaatggtgctgatcgaggtagttttgccctttgcagggcatgtcatagggcagggatcggtgaagggcagcacaagtgtgatagtttttatgctagtggggcactggggcgtacgtttctttgacctgtaaaataggaacacaaatgagatcgtcctgcagggatagggcatcctataggttttgtaaagtactgcacatgtggatgtggccaagattgtaaaatgcatgtgagtgatggtgacaatagtccaccaacttacaacttacaagatcatttcacccccttttctgaagaatgcagacctgtttggttggattcagactagagcactgttatgtatcttctgcgtattcataacgcgttgatgccttcttttgatgtctttgtgacactattactagtacatgatgagagcccataatagagctacaagaattacaactgcaataaccgacaggagaaggcatgagcaggaagcgcttttcctcatgcgtgttgttacagatttcaactttttctgcgcacgctgtacatacaaacacgaaacgacatgttagctagcttatcttagaaagatgagataaatatatgcgggcatctgtagaatcaaacaacaggcacggtggatcacctgaagctggttgcttgtctcttctgttttctcgtctaagtcatcctgcaacgtttgtaaaaggcattagtataggaaccaagttaattcagaaacgatgcttacaaataggagctactgagatacttacaatcaacctagtgtgcagatccaactcttcgttgatcgccagcgcaatgtgcttggtgctgactatcgtctcctccagcttgtccaattcgtcgtcttgctctgcatcataattcagagaagttcagtcactgaacacctgtacattacatggagcagcacacgtacgtgctgacgccagacgagaagggaagaaaaaaggtatatcctctcttacctttaataacgttcctctgcaactcaatgatctcacggttgtccatattggcaatgctgcttacatcgatctttgcgtggttgtcgtccggtccaagcaggtcgctcctaaataaagattcagaaagacacaagtaggaagaagtgtttcatcgtaaagttcagagttcagacttgttggaactcagctgaagctgcaagcggttaaactagtggagtatataagcttgcaaattcacctattggagaagcgcttccgggtgaacggagcgccaacctccttcaccttggagctcagagtggagtgcttggctgctagcttgttcaactctttcaggcttctgccaggtttaagcaaacaaaattaacgttacgtttaggccaatttgatcaatatactatcgtccaattgcaatatcacgtgtggcttgcttaactacttacatgcgttgcttgtttgggagttgagaaaggtcttcctgcatcatgtcaagcctggtctcgagaatcgcgactttcctcctgatttcggcggttcgccgctgcagctcctgcggcagcgacggcgagacggactccctctccgcgatcctctcgacgacgtcggccacgagcctctccgcctcctcgaaccgcttcatccattgctccaatggggaagacgccgctgatgatcgatgatcatcgtcattagcacatcgtcagtcggatgcaaaggttaaaaagaaaagaagaaggttgagatgttgatgaagatacccgcgtgctggtacgtgatcggaagaagtggacgcgccatgtgcaatccgcgatgtaaactctacgagtttttcgtctgatcatccttcagtgaagaacaggatggttaataattgaggaaggttctctgatcttgtggtgttcgtttccgggtcgaacgtagggaggaaaccagagcagctacgagtaggtttctttccggcgacgaccggctccgttccggcctcaacgccgtagcaaaacgatcgagattgttatgtacaactaggtaagtctgcacgtagtggcgtagagccgtagaggacaaaacggagaggggccgtgggctggttgactagtacgttatacgaacatgggctgggccatccaggcccactttggcgtggtaacctaactaggcctagtgactgttacgtgggcctttttagacccatatcatagtggaaaaagtacatcgaaagtccctcaacttgtcatcggattacaaaatcatccccaaccgcaaaaccagatatacgtcatccctcaacttacaaaaccggatcactttaggtcctcgggtgattttaaccccggttttgtctgacgtggcagctaagtcaacgtgggacccacgtgggtcccacatgtcagtgaaacaacttagtctacccttttcacccttttcccccttcccccttgcttacgacgctgggtggcgcatcgacgcgacgccgcttggctcgccgggaggtcgaggcaagcctccaacgctagatgcctcgagttcctacgagctcactggcgacgatgagggccaacgctgcccttcttgcggagtcggaggtcgagaggaagctagaggccacgcgggcgagcttagggtcagacaggcttgggaggacgtagcacaacagcggcacgacagagctggcatgaggcgtgtcggcggtgtcagctcgtccgcttcccccgccggccacagccgcgcgtcgccatcgccgacggctgatggcggcgtcgtcgagtcgatctcggtgcgggcctttcgtggcttcggcttcgaccatcgaggtcctgcgtggctgtgcccggctcgccgccgccgtgtcgccatgccaccccgccgcccatcgctagccgccctactgccccgagttgacccaccctccccgggccgcccgcacgaggggggcggggaggtcggcgagctcggccagcactgagcccacgcgccgccacttgggagccgccgccgtaccaccccaccggccctgtctcctccctccctatcactcgccgctggcctccccgcttccctctccgtcacttgccgtctccttgctaagcaatacactgtgacgctactgcgtccgcggtcacggcggagagagctggcaccgcgggagaagctggtgtggaggagggggtcggccgcgggcacgccacgtcgccgtccacggcctccgcccgcggcatttttccaccaccatcacccccacctcgccagcgacgaatttcctccatccttcccttctcctcctccgccccctgttgacataaaacacgaggcctgggagatctgcttaactccagtgcaggtccaaagctcgccttcgggtgtgttagcgtgccagttgatttgatcatgcaatcaacaagaaatagaaacaaagaaatcgcggttaaatctataaatgatagccgatcggctaagtgccgatgacatatcatttatctttgagccgatgtcatatgtgaatcgattggcgactataaatagataataaaaaattaaacctactcgatcgactgtagatattaccaatatatagctcttatatcgatatatatttaaatcaagtgattgggatagatcggtcgccatgccgagacagtataaaccacttggatcgaaatatatactaataacagaactatatatgtttatagcatagccgatcatatagatctagcatgtatcgactaatactccgatactactctatatcaggatattaaaacaaatataatatatcaaacaaaaacttaatatacttaaatgcaataaaatcttgacataaagggcggatttaacatgtcactgaagcatatagagcgaatatggttaaatcagataagatcggctgaaactccgatactaccctaatcggcaactagaaggcatgctagagattggtattctaaacacgacttaatagatcaaactcaactaatgcagcattaagtatgaaaagaagaacaatatctagacaatcaagccgctggaagtttcatagagtagtggatatcttatataatctaaatcaacatcaagatctgtcacgccccgaactagccccgagcggagctagcccgtgacgctccaaattaacctgttaatcgataccagtcccaggaaacagtgctggtatcacaggaagacagaatatcacagcaacggcggtctctttattatagagtaggagtacagtcatgttgggctgcggacagatcccgagctcacaactgcattacaaaagggaaagcggaagccaagacttggaccaaacatcacaggcgcgacttgggaactaggccgaaaccctaaaactcattgtagccgacttgctcctggaagaactcctcgtcagcgggatccgcttcatcttcttcagcaactggggggggaatatttatatagagcaagggtgagtactcagcaagccatgggaattaagtgtttaatgcaggcttcaaggaaaggttgttgtttttgcaattgattttatttaaactcttttctgaaacaactaagtgagtgcttctcaaacgacacggatgggacagtgtgtctcgtctggccggagtatgtacaaggtatcagtcttttgaattgatcaaggttggcatccggccaacagctttcaaacggccacccgggcctggctgatcccagcagccgcagattttccaaacatcgaacccaaaccacatcagcaaattccacaaagcagtagtcaaacaaaactacgctaggaatcacctcacatccacccatgactgtgggcacggctgttcgaacagtttgataacctctgcagagagggtacactttacccacacgacattactaacccgaatcacccagcccgtgtagaacggccacgtctggtgacctaagggctttcatgacaaggcatttcgaaagccgacacaggttcaccatatgccaacgagaggggtcccagaccaacaccagattaggtcccagaccatactgtgccaggaaacccgggggttctccccaacaccaccccgttgaatccacatgtctcttggcatcatggctcccccgattagctagttactcagccaggggtgtcccattccacccatgtggtcgtacttgtcttatgttcggatgaaattccaaggaaacggtccttaagtgcaagagcgggagactgtatacccggtacgttccccagtccgcgattttggaaattcatttagttcgcaagcaccgacccaggtgtcgggttttccaagtcttttgtaatacccaagttttacccatggttggatattttatattttgagggggggtgttctgatgcgcgtacccgaaggcccgtgcatcgaagcacaacagttaacaaggaggtttaagtgttcaataattcaaggagggtaattgcagcaattaggattggggccggcaggccgtttcgcaagccgcggccgaattacttgtgtaaatcctattcatgcaatatttgcggaaaagaaatacttagatttaaattataggtgcaagatgatcaaaggtgacttgctttgctcgagatcttgagcttgatcctcgaaatcctcgcactgcggatcttcgggctccgaaactacacgcgaaacgggacaacacagcaaacggcgaaaataaggccctattattgacctctaagcatgccattaggtagatcttaggatttgaggaattttggaagttgaacggagtaaaacgtacttacggttgggaagatattaaatttctaagattattggatttttggtctaaaggaaaaaggatttatttaaatccttttcgaaaagaaaagaaaagaaaagaaaagaaggagggaggggaattagacttccctcgggcggctagggcgcggcccgagagaaagggggcggctcggccgaacttaacgggccggccggcccgagaaggcggcccaaggcatgcgcgcgggcggggaggagtgaggaagccggtgggccgggtccatcccgcgtggtccagggtaggacccgcttgtcggcggcttggctcaccgtgagcgaggtgcacgcggggcgtgctagggtctggggaggggaggcacggcgcatgcgcgcggttcgcggaggacgcggtgcggcgggcccacgcgcagcctcacggctcgcggtggaccgcatgtgcaggcagggctggagggagtggcggaccggggtcagcttgacccggtcgcggccgaggtggcgccgacgtggcgcctacgtagccgccacgcgggccggcgggaggtagacgacgacgtcggtcggaacggacggcggacggcggcggcgagcggcggagcgaaccacggcgatacaggcgaaagcgagcacaccgggaggttgcacgggacgaggggagacgagccaacggctcggattcgccgggggatgctcgacggcggcggattgcggcggtggcaaccggcggcgagagaagggggaaacggcgacggcgcgacgggagactgattcgggcaagctaaagcatctacgcgactccgggaatccgttgctagcgtcggattgggcggagctacgccgagcgaggccggcgacgagcgggcgctacggagcacgggcggcgacggcggcgagcacacagcgagcagcggcaacggtcggggcggcgctagctagctatgggaggctactcgtgctactacccgagtctaaggggaggagatggaacgagaagggggaacggagagaagcactaccgtgcggggtgatggggcgcagtgacgaggggccgacggcacgggagtgatctcttcgcctcaggccggggaagaggaagaagacgagcgcccggagtccccttccgtgtccttgcgcgcaccggctcctccggcacacgcgacggcggcggtcggcgagagggacggcaatggcgcgggcgaaaaacggggaagattgggaggggaaaaaggaagggagggcgcctgggtttatagggcggcaatgtcggtttggaaaccgaccttgggcagtcaaggcgcgagctagcgctcggtgctcgcggccaaaacggcgacagaggcggatgacgccggcggggaagagaaaaggaaaaaggaagggagaaaggggggcttgccccttgcctctttgggaaacgaacgagggagagagggcgatgaggcagagccc

SEQ ID NO: 15401 - DNA, 15547 bp, Oryza sativa
ggcacgcgcggcggagctgcggcagcaacgccgggtcgacgctggggtcggcggcgcccgtcgcgctgaagttgtagaggcggtcgctgaacgacgtgcagtgcgcgcggccgacggtgtgcgcgccggacagggtgaccatctcctcctgtgtgaggcccttggcggcgaagctctgggtgagctggtccagcgtgaacgtcggagccgggatgttgtccgccacctccggctcgagcgacgccgtgccgtccctccggccgcccgggacgtcgtagcgggggcccccggtgagcgcgacgccgtccctggcggcgtaggcgaggacgtcggcgcaggagacgacgcctgggcaggcggcctccagccgagccttggcggcgtcgatgacctcgaagccgcgtaggctcgggttgttgatcggcgagtccctctccgcgacgttgtccgacgtcgactccagcagcaccgacccgtcgcacccctgcatgcatggatggataatccattttgcatgatgcattgcatggtgaattaattcgcgtgcgtgcgtaccctgacgaagcagtcgtggaagtgcatgcggacgaggccggcagcgaagccgatgttggtgtagagggcccgggtgacctcctggcgaacgatggtctccgcctgcgggcacgtcgccgcgtagaagttggggtgcagtgacccatcgttggcagggaaaccggcacacacgattgccatggtgcataaccacaagaccgacactgctgctgattccgccgtcatgatcaaccgcatcattagtacacaattagccacccgttcgagctagtacagtggtcacttaattggtgagctgacacaagctagcttaattaactggcaattaagtcgtcgaggttaacacacatatatagcccgcggccaggcattgcacattgttaggtgaagtgccacgtactcgcgtgatttgcaatgtgggatactgggattgtggccaacctgcagatcgaccatggaaagtgtatttgggtgggtgggggcgtgtgtgattggatagcgccgggtaattgggttattggggcacactgaagcataaattagctccaggttgagtaggatttggccacgaattacatgtgtgtccggcatcaacttgagagagaggccattactgagttcatgggtcactacatcatgcacgttcccattgaactcgggttggtggtaagcagatttggtggactgtgttccaatgggcgtcacgaccggatggccatattttagatttcttcaaatatgtacgtgccacggcggcacggccgtagtgactggtgatccttgaatccatgagcaacgaatgtgccactaccgagttgtgactgtgagggtatatatgtaatatttaaaaaagaattgacggcaacaacaataggatcctcccccggccccctccattgtgttttttcttttacttttgaacctttttattttaaaaataaacttttcaaaaccttattttcggatctaaacctttagccatgccagccagttggctggcaaaacaatactatgacggcggtctcgctggtgtgatagcgttatttggtcatgccagtctcgctagcgtggcaacgttatttagtcacgccgctcttactgatgtggctggataaaactgtcacgtccattgcatatggcatgttagtgttgttttatcacgtcaggcgggatagtgtgaccaaaaggttcaaattttgagaataagtttttagaagcatttattttaaaactaaaaattaaaaaggttcaaaaagtttaaaaactttcctccagttccacctatctccttatctattggtgtggagaagctccatctctacgccacccatgccattggcggtaatggaacgtgctcttgacacaacaccacaacgatgccgcctacacactatgtcgagcagatccaatgtagagacgtggtgccacttagttggagggagacatcggccaccgtggtgttaagagctaatgacgcgatcaaggcaactctgctgatagcagggagtagggggatcatatgttagtgtcaacccatcttcgtgctcgatggtgccagtgtcgttctccaccaccatcacctccctccgtccaatccgctctaggacacgggcacctagtaaaaaaacgagatttggagaaagagatgtgcctccaaatatttcttgataagaaattatgagcgcattgaaaattgaacacgagacctcgacattgaaaccacacatcccttgtcactgcactatcaagtgcatctcctcgtgggcagccagtaataagagctcgataggcgagaagtgccctatagtaggacattaacttgtttggagatttttgatgatttcttttcaattcattatgcatattgtcgcacattgttgttttagtctattcgatcagatatgctacacatgatgcacactccttcgccatcttaatgcgcccggcaacaatgtagtatttttttttatgttgcagtgcagtcggtatgcactttgcgtggacttaaacatgcgtcaacacgtgtgtatatacagcatagttgtgtacatgttggctgtagctacagaaaaatagtggttctataacttttggtagcggccttaattagttccagatctcccaagtgctccactacatattcgtgcatgagtttgggcgacacgcaagcatgtatgtgtggatatcacccttcagccaccgtgttgcaaaatattactaagagacactccatacgcaggtactcctcctactaattagtagtgctgtgcataagctcagactcagggagaagcctaggaaggcaaagagaggaaaaaatttcggcacgtacactgtcccggtcgagattggcgcatgaatcctcgtgatgcaggtctccggtacccgactgcggtgcgcccgttcgcacaccatcatgctctgttgcacggttgaacctgtcgtcgaccacgctgagccgcgtgccgtatgcctcgcttgccggccgcgcggcgcgggccacgactccatccgcacgagacgggctacccacccatgggccgcgtgctctcctgcgttggcgtccggcacccaagacaccagcaccccgcgcggcccagcaagttaagggataagtcgccgccgcgcgaggacgcgggcgcggactcggctctggtccctccccttatcctgaggcgaccctcctggtgcgcgcgccaccaccgcaagtcgttgttgcaaccgcgagcctcgctcgtctcctcttcctcctcctcctcctcgacatggtcagcgagcaaacggcgccggtggcgaccgccgaggcggagctggagagcagcgccgcgccgcccgtcaagcccgacgaggccgcggccaaggcgcagccggaggacgacgcccccgttgtggaggatgccaaggatgatgacgacgacgaagaagacgacgatgacgacgaggatgaggatgaagacggttaactctcttcctcctcttctccttcttcttctcgtttcgtcttcgttaatactgcaatctttccatgtgaaatgcagcgtgtgtggtagttgggttttactactgtttagaaacgtattagtgcgtcggggtgcttggatttcgttaatggtgtctctttcggttcttgtagcaattactaatgtactactctagatagcaagatttatagcctgacttgcagttttaaatgaccttgaattgaaggtgaacaaggtgcaatcggaaacgagggctccaagcagagcaggagcgagaagaagagccgcaaggccatgatgaagctcggaatgaaacccgtcacgggagtcagcaggattaccatcaagagagccaagaatgtaagaaactgtgcagctgctgcaaacaatctattcattcgaatggaagacagaattaatgttttctctgaatcccgtgtgtttcagatactgttcgtggtgtccaagcctgacgtcttcaagagcccgacgtcggagacgtacgtcatattcggggaggccaagatcgaggacctgagctcccagctgcaggcgcaggccgcgcagcagttcaggatgcaagacctgagcaaggtgatgtccaagccggacgcggcggcggcggcgccggccgacgaggaggaagaggtggacgagacagggatagagccccgcgacatcgacctcgtcatgacgcaggccagcgtgtcgcgggccaaggccgtcaaggcgctcaaggcgcacgacggcgacattgtgagcgccatcatggagctcacggcctgaagccccctcctgctgctgcattggcaccacctctcttcccccatttcagtatcgtgtttttttttatggcgtttcgtcgtgggtttgcataagatgccctgtttgttcagctgctggactttgcatcaaacttttcatagcatgttcccatattagtgtcatcttaaatggagttttcagacttgtttgaacggcaacaccaatagagttcgatattttgagtcaattaagaggagaaataagatgttcaccaaatccatagcatgccagcgcaatggtaatataaatttattggattaatgcattgttttgtttacacattgcacgacagaattatgaggccccgcgcctatcctatgctatcaagctatcctttttctatcgcggctcctatttatcacatctcaccactataatcgccagcgcaggtaaaaataatcctctactctcactcaccagctctggttatgtccttattagccaaagctgaggagcactgaatgggtaattaattttgtgtttgtgtaagaatgctgaatgcctaacaccacaaatgcccacaatgccaccaccaataacaaccacagtgcctacggctgcttaccgtcaggcttgtcagggaaatctctattcagaagctcgaggagaagaactgcagcagagtctttagccttcttcacactaggcattggctctccaatgcattcatccgtccatccacgatcagaagtgttcaccctcaccgaatagacgaatcttttagcatgggcagggccaccctcgtttacgcacctgtactgaggcattggccactgccttctcaagcagatgtcgttcagggtctgcctggtgaacatctgagcaccatttttcttctcgccatccctttcatcttctttctttgttgcggtttccttctccttcaggaccacaagtgcattcctcgctgccaacttctgtgccatcttcttctgagggttctgagctacaccgatctgaacaccatcaacaaatacttcaacagtagctatgttgcctgctcgggatgctttgtattccaggccttcagcctgctgttggcagcgttcttggagctccctaactggatgcatcggaagggtctctggcgtcaccattggatgaaggagtggctgaaaaacctggtgcagaatagttttatttagagaacttatatcgaatgagcacttcaacaaagatccctttcaaacagtccagaaatgattaccttccagacaactgaggtatcatatccactatccaggaatatcgcgccagcaatcgactcaacaatgtcaccaagaactttaggagccttacaatccccaagcccaaaagaattgaaacctggtttcaaaagctcctcttggacatctttcacaaactctcgaatctacggaagattgaattaagagtcagcattgctttcagaaaagaagaggaaaaaggttcttcctaatcaaacaagacctaccaacaatgtctagtttgtcaccacaaagaaaaatacctacctgtgtttctaatgcagatgatccatggcgaagatgtacatgcagcttatgcttaactgcaacccttgcaaaattctcattattaacagctgcagctctcaaatcagtcaagcggccaggaggtaggtcagtatatgtaaaaaacaaatgcctggttatgagatgatccaacacagcatcaccaacaaattccaaacgctggtaacaggaaacaccagaagatggtctcgatgcatgtgttatggcctcaacaagtaaacctttattctggaattcgatacccaagacacctttcaacgtgtcaaagttgatgcttctcattatgctctcaggaatgtcatatggctttggaggtgggatctcttcaggatccaactctgcatgaattccaatccatttcatcaggtggtttgcagcgattttccctcctgctacataatacaccccaataagtgcctcaacaacatccgctaaagttttgctcgacagaacccgatagcagctagagtctccttcaatttcaccatcttcttgcatgttatctgcatagtcatcataggattccttctgtaactcgcaaccagttgattcctcgtcaaagatggaaggttcatactctctagactcttcatcgaatacaggtagcactcctggagctgcccatcttgatggagcaaaccggtctgcttgaatatatgattggagggttttattcagagcatattggtacaggaccatgttactaaccatctgctgccgcatccttgtaagctgtccctcatgcttttgaggatattttaggaagaggaatctactcacgacccatttcaggtatgcatcacccagcagctctgctctttcatagcataatgtctcctggcatgatgcagcagtcaaggcttctagtatctgccatgaaccccaacaagcacttgtgaatttatgaatcaacaagcatatataagcatttttttcaaaaataaaattatatttttggcccacatgcaacgagtcaaaaagagtagaggaaaatattaggtgagcactccagggaggcactgaaatgcaaaatagggagcagatagaaaattaaaaataccatgtaccccctatatgatacatggcatacagttaatcagcaacctcccaaaattaatcattcttttggaaatatagtccttacaagcaccctttagtttaggatgattacctgttatttcaaaactaacataaattatggatgctgagtgaatccttgtttatcacttgcctaccaacactaatcaaaattcaagatttcaagataattgtgggcctcctgtggtaatatgccacatttgacattcggtgtgaagtcatgtcacatgtgctactgtcttctagctaacaagcagaacccactaaagctagatgccctatttaacacatagtcactagatgagaatggtgtgttataaaaaggtaagaaaatgcaagggactaccaggggggacataagatgcttttcctaaaaatgaccatttgggtagtcaaggatgctgagattaccttagttgcaggaacagggtaatcaattatgtccttcaattgaactgcaagaagcatgctctccacccttctcattattgagggcaacctctgagctccacgaactagtgatccaggaagtgggtgcacaaggcacaactcaggtggcaaatacacgtagtatgttttgtcaaggttctcagagaagtcaccttctctagctgttgaacaaatggtagcataataatcacataagactttagtttattttccttcaaaatattgtcatataccactgctcagaatgaaatattaaataataaaacaaaatgactgcataactttaccgtcagaatgctcaaatctaggagaaagaagattcttgcaatatgaaacaccacgggcccgtataagaggctgtttcctatagattaactccacaccgtacctgagaacaagacagtgaatcatgctgtatttctctaaagttgtaaagccataaaagggaaggaaaatggggaactcaagagtaaaaaaaactaaagcgccactctccttgatttcagaattaaataaaaggtcatcttacttctgcttgtagtaatcagcatatgaactatactccaatggccccaggtagccttctttcctagggaatgaattttctgcattcatgttatagcaaatgcagtccacataaaacctcttccctgagtgggcagcagtgacaaccattccagcaagatctttagcattccaacatgaatctgccatgaacaacttgccttggttctgataatcactaaaatgtcctctatcacgagcaggaactaatccagatgctttcacaatgtcaaattcagcaatagctcccctaataccataagtaggatgggccttttgtccaaaagcagtcccatggcgcaatttcccaaacccgtattccctcctatccccaccaagtgttcgttcattggtgcctagatagacatctgggcgtgccctctgaagtggattgttccaggcatcagtgttaacaatgttgttaaccaaagtccaatcaatctctcttaaaggatctgtacacttctcagctcctacagggacaaagaggtatgcttttgcgggatcccaaggtgtagttgagggatcaacatcaacatcaagtactatgctcatgagcctaacatgaaagctcttcagcaacaccagctggaatcacaatattaggtattagctacattaatgtaaaaccatgaaaatggaagttcttcatttgccaagaaggtcaacctgactttctgtaatttcaattcgtccacggaatacgagagatgcctttgttatcattgtccttgcaacaaagagatccatcgtcgtcgataaaacctgaaaagaaaagaacaagtgcttatgttacagttttagactattttattcaagtttcaggacatgcattatgcatatgatggaacatacctctgcatccagctcattgccaaaaataattgcaaaatttgaaagttgtgtaacgaaagggtccttagaagtcccaacgtttacacagttcacagaatacatatataacttaataaattgagagttttggtagccatctctgccagataaaatccattctccctgttggaatccattgaaaaaaattcaagataatggttagttgcactggaaagtgcacagaaataaatgagtgagaatgaaatttctcacccgtagaatatcagcaacaccttcaggataaaactctctatggcgagctgttccaggaagtggttcaccttcatcattctgctcagttttttccccttccccgcttcctctgtcaggtaagagcgtatctgtgaaggcacccatctcatgcagcttcttacaagcagccaaacaaacagcctgcacaaagagaacaagtgtggtttcatgttagtgatggccaaaagggctacaggactggtattattatggtttttttaactcaaacaaaagcatcatattacctgctgtgccagtcgtattgaactgcatataggaccctcaagtttttcgaacggggcattacaagggagctgaagcttgcaagaatattccgatgaaccacctggctgctcatacttttgcatagatgaattccggatgaagaattgagtttctgagaataggaaaatcagggtgaatctgacaccatgatattctaaataagctttgtacactaaaaatacattaaataatttacctgtcacttggcaactgtgaacagtaaaaatgtatgagtccaactgctgagttcaagctgacaacagcacctgttgattcaacctgatacattgaaccaggtgatgtatcaacaggactcaacacagaagtaccatccaaatgactaagatcggttctttccatagcttcctttctcaacgtctcctcactattccgagcattcctcaaaaaagtttcatgtgatatattgcccctgtgcatttacaaatttacaagccaattgagtaaaaataaccactatatcaaatccaaaggcttaatcgttcaattttgtgtctatatttgctaatcgagtaaaattaacctttcaagcattaatatataatcagatccaggctttcttgcacgaccacgtgactgtatgtaggctaagacggtctttgcaaggtcaaatcgaatgacaacattgcactgtcgaatatcaagcccttcctctgcaacgcttgttgcgactaaaagtgtaacctgcaaggcatgtcaaaaacatttatgagaaatcatctggcattgagtaataaatgagctgcaactgacaggtggttatcacttatcgttgacaaatgaaataaattaacattgtcaagaaacatacacggccatcacgaaattttgaaattgtatcctgcatctggcacgcgcgcatctcttgattattgttatggcctatcaagcttgcacatcgaataaaacttagagatggaagttctgccaatacctatcaggttaaaaaaagaaaaagaaaaacaaagagcattaacaaaaggatataaagggaatacatgtacagaaataaaacttcaacagcacttcaccttaggaagaactaatgctgtcacaactctctccacaaagattatggcacgaaaatcctcagtatgctgatatttgagaagtattttgatcaaagcctgcaccctaggagtaactttaccatctgctacggcagcaccgataacttcatctacatgctcacctacagaaacagctggtgggaaaaatgatatcattagaaagagactgagctagactcacaagtcaaataatcaaatattaaaagcaaagtaggcatcaaaatggcatggagaagttaagtcacataatgataaagattaacgaaaaaggggcatcaaaatgatggaaggttaaaaggaaaatctaaaggaacaacaactacataacacacttaaaattaagacaaaataataccatgactgtcaggcagctccccctcctcaaggtcatttgtgttgtgtttttcagtattttgcatttcaacatcactggtctcacttttcattgcagccccttcagtcaactggcagtgtaacagatcaacaaccttttttaaataagactcttgaaacttgacatcaacctgatagtttgccctttcatcattttgtaatgcagtcaaaaaggactgtgcaacctgaaattaggagaagaacaattaaaaatgcacaatgattaatgagacgctaatgttcaacatgaaagaaataccttatatgcacaccattgtccaagttcacctaaagcataatttatagctctcaacttctggattaaattagccgcaccatcactctctgtacgctctgaaacaccatagacaagacgcagctcatctctagacccagcatccctagcccccatgaactgccatttagttctcttagagctagagagtgcagcttcttcaaccgtgctttccatttgtttgatttgctcatgcaaggaccaaagagtggctgctttgtcatattggacaacaacttccaaaggcatggggacatgcttctcaagctctttacgatctttgatggtacaaactactgaatctagtttgctctcaagatttcttatcttgatggcacagtcctcttgactcgtcactcctatccacataatagtattaacaaacatatgaaaaccaacggcgaatctacgtatgaaacagcgattgatcatgaaagatggaaacggtggcaggaacagggcagggaaataccttttagattgacaggagaagccgtcataccgaaaactgctggcctcttctccttcggagtcgtgtgataaaattctgacatcactagagaatatggatgttttttcactgcatgatggcactcatctaaaatcaaaagatgtatcgcatccattttaataatactgtgcctgaggatgtttaacaaaatttgggctgtcataactagtacctgcgtgaaaaggaatgcatctaatgtgagcaaatcacaaaagatatttaattcaatgcaaatacgcctttccttttgtaatagaaaaacataaataatttccacagatggatgcgcatccagccatcgatatacaggcatacagcacgtgataaattgagatattttcaacttccacacgagcaaaacgtgccaagtatgggacgtgcaagaaaacgaaaggctgtggttaattagaatataaagatggttatcaatatatcccaaaattacgagaatatatatcaggtagccgatcccttttaccatcccaatttttctttcatgcatggcaagtcggctacactatgtcttgattgataccaaaagccatgatcacgaatgaaggatgcacaggtcacgttcacaaaatgatgtactatatatgaaggatttttttagaaatctgctatctaggtcttgagtattatcattgataatatatagcaatgccattcacgcaattgctccattataatacaatttaatatccgagggaattgcacaaacaagtgttggtcaaataagagcgattttaggaaaaggtacagctcagagttaggccatgaaacatcctcaataataatggtgtaaaattagaaatgcaaaagcaaattgaagaaataaatttgcctgtttcgactcgaattcgcgctgccactttctagcatcccagaaatcctgtcccatctctccacaataatgcccaacacgatagccggttctgtcacgaatcacctcagcttgctgcaatttcagtaacacagttattcctcccaaaacttccaacctttacagattgaaagcacactcgtttatctgtacctgatacacaagaggcaccttgggaaccaagaagacagcaagcatcttcttgttctccttgagcattttatcgcacacacttttgatgagaagcacggcgatgagagtcttccctgcgccagtctccaggaaggctattgtgttcctgctcttagcttgctcaagcacctctagctggtattgccttgcacgctcctccgcgacaggcttctcccgctgcgcagcccccatcctatctgcctctgccttcttctccatggagcctccatcttgcgtcctggcacgctttgcctcgcggtcagactcctgctcccaggtgcctgagcggaacaccatcttgccgccgcggtcacgctcccagaaaccccgggcctcgcgccgatggtgctcgtgcttgcggaccctgtcgaaatcgcgccttccacgcctgtcatcccacccacgcgagggcggtggtggcagcatcggcctccgccgccactcctgacgcggtcccccgacaccaccggaggcgaggcgcgggcgcttcccgtccctccactccccaccgccgccgccatttgcagcacagccatgcgactccctcctcggctccttcctcgccaccacgcctttacttctctgcacaacgcccaccaccgccacggcattgttggccacgggcgcagaggccacctgtaattgcttttcctgaatcggtagctccggcggagccacaggcacgggctcaggtagcggcggcggcggcgggggtgggggcgcaggggagctctccgcgttgatgctctcgagtatcctgtcgatctcggcgacgaagccgtcgtcggcgccggtgtccatcgcgggtatgaggccggggtcgaagtccgcggacgcggcgaagtcgatgccgcacagcagcgacgcgccgtcctcgcacgcgtcgtaccagtacgccgccgccgcgtgctcgccagcgcctcctccaactcctcctcctcccgccatcgctcccgccgtcaacagcagctgcaagcaagcagtcacacagcaccacaccaacacccgaccacttcactcctccattaatcagaagcagcagaatacaaaagacgagagatgaggaggggaaaacgaatgttggtactactactgctgctgctgctgctactacttccggtgggcgtgggcgttgcggcgcgcgcggcggtgacgacgatgcgacggggagagtggaagagaaagaggcggtgataaaccgtacgaatcacgcaaacgcaagagggaaaggaaagggaagggatgcgatgctccccattccgattccgatatggggagaggggaggcgatggtgggggtccggcacgattcgattcgattcgacggtgtatcaacgctactctttctcttcactctctctctcttctctctctctctctcttcctctttcctctgatctcttctccctcctccgcttccctctctctctctctcgtgtgctcgctctctcgattgagatggcggacgaggaggaggaaggagaggagggggaagggacgcagcggcgcgtggagttcccgattaatggacgcccacctgaggggcagtgcgggggctctcccactggcgtgtggggacacgggcgcaacgcggtggaccgggcctacgcccgatctcgaggcgcgaacgcacggcggggatgggctccggtctatgggcgggttgcaggcggcggcggcgcggcggtacgggcccaactgctcctggactggggcgtttgttacttgtcgtgtgggtatgacctgatgggcccacctctcagtgagagcccccgcgtggggaggacggtgtcgagtgcgatgcgatggcgtgagccgtgaggaccgggtcgtaccgcgcgagtgactcgtgtgtcaggggcggttgttcgcccccacgagccgcggagcggaatggccggcttcgtacggcggaccccgtgtcagtctcatcagcggtggcccatgcttgggcccgttcggtaacagagaagatcaagggcatattcagattaaaaattttacttggcaagataataatattgttaaaattttggcaagattttttatatatttatcaaatttgacaaccaactaaacacagatatttttttggcaactttaccaaaaaatggtacgattgaaaatagcatcaaattgaataggccctaatttataagaaagtcatgtaggattgtttatattatagctaaaataaaccttatcaaattttggcattgtcaacattttagcacgttgataatattaccaaaattttttggaaggatatcttatgccaaaatttgataaaaaaaactaaatatatgcacatctttagcaatttcaccaaaaaaatggtatggttaaaaatatcatcaatctgaaccgcctcataattcatttttttatgaaaggaaaataatgatttgtttaagaaatagatatattgcagttccaaacgataattttgtaatggccccaaatttgccctaaacttaaccttcacaggcaatcccatcaaaccatacgctaatcaaggaataacgctccattttgacttgccctctctcccgacatacttgcgtattcatcagctaattgatgaggatttatagggactcgttcactattgtgttcagttagaagaatttgaggtacatcatttcatggcggtctcgtttttaattcatatgttttgtttgggaattgagcgtagccgactagataggtcctttgtggtggaacaaggccatccatgtttaattcctaaa

SEQ ID NO: 15402 - DNA, 10150 bp, Oryza sativa
tttgtacattttatcctctttttagttgttttctttcaccttttcttttgagaaaaagaccaacttgaataaaccaaaattattgaaggttatataagttatccaatcgtcgatagtattatttgcgaaaatttcatatttcaactttctattttctaaaattcaaatgcataacccatggatgaaattacatttgattttaaaaattaataatttacctaaaaatattttaaaaaatcagcatttgggtatattaaacccaaataaatcatgcttattccaaaataaatattattgcaagcataaaaggtgattttaaccatattatggaactaccttacacaacctactaaaaatgatatattaaacatttttttcatgtactagttttaaaatttcaaaagtcttttcaaccttaaatcataaggacatgtcatacaaaactattttaaattggccaaaggatgaaatgtgaatggtttgtaaagcttaggacggttgatgtccagttttagaatttaaggatgctaaaagataggaaaagtccactgttttccgtgcatgcttcccaatttgctaaaatatgttttttttaaaaaaatatgtctaatagtttcttgaaaattgtaataatctacttctaagtttgaaataattaatatttgcactaatagtttatctcgttttacatatcttttcaaaaaaaatttacatttctcttctatccagcacaccctagagagagtattgtagacttctgtataagttcaaggaagtaaagagaggttttgtccgattatattttgggaccttttttttttgccttgagaaaatgattggccacgacagtagcttatgatcggccagtgtgattgctgctcctcctaattagaggtgaaaacggagcgagtatttcccaactgcctgcccgaccaagaaccgcagaaagaatatgggggagaaaatgggatgccagttcgaatccgaatccgtacaaaaaaaaagggttggttacgggaagagttgtagctgcttgtatgtcctatataatacgaaatatatatgaaaatctattataagtccacctacaaagtagaaatattgattaatcactattttacaagctcacatgtaatattctatatttttcccccttgttgtatctcttttagcactttaattgcatccttatattttatatctatgaattagagacacaaataaatatgcattcctaagtccgattcaaaggaaataacatggattaggatacatatagataatatattacccggtatccagtttcagttttttaaaaaaatagaaaaaatatccgtgcgttgcaatgggtgaatactattttaatcttattattattatactgtttagctaggatgaaatttaacgcgagaattcttttgcatatttttttttagaaaatcatgaactgcaattaggagttggactttcatctcaagttaacatgcaagcttttttatagagatttcttatatgacttcttttgtatttctaaaagcaaacgaacttaaaatcggactcaaacatggatctctattttcaaaagtgaacgaacttaaaaaatgcccaaatacggataacgtaccaaaataccgacaaaaacattttaatttttcgggaaggctaaatggttgtcgaatgatttttgataactaaatcattcatgttttaatatattcagaactgttgtttaatacgttatagcaaaatgttttatgagatgatttggttgtgtttcgattttttaaaagattgaaaccttctcaatttacttggtgaaacattttcaatatgggttagtatatgaaacgccgggattcgtctgaacccgtccattttacccctacccctgatccaccgctccggcgagtccactagagaggacgaaaaggcattaatcctgaaaaaaccacattgttcttcgaaccccactgaaccctaaccattcctatggcccttggggaaaaaggaagagaaaacacgtccaagttcgttttgacaatacgctcctttcagaaaatcgaacaaaatccatcccctgaagcagatatgctacacgaatactacacgatggacgagcacacgggacaaggacagtgagccccaaaatgggcgagaaaagctgtcacttctcctggagaagaatctctgcctttccaccccccaaatttacgacgttcgtcagcggctcgcagtacagtggagtgatggctagccttgctcctcgaccttctcctctgacaaaagtggctcaagtgagcaatagtgtgtgtgtgtgtgagtactgatagagatatttatgggcgccccgacaggggatcctctgcccgggaatcctgtatgattgttgctctgcctttaaggcgttaccagctcggatccagtgtcgtgtgcctaacacaggacattgctcttgacatttccaatcgaccattcagagcaagtagagcaggcatattataaaccagtataaacatattttaaagagataaaagaatatagataagagtagcgggctacagatctatagccagctgtagcacggacttcaagacgtaatatgtgtatgatagatgtgaccaagtattaatagtatagtaaataactattgtatgaattgactattacattgactatagatgatttgaagttagtagtgggctatactattaaacttgatcgtatagtagtaagctagccagctaaatactgaggttgagagagaggagaagcgggctgtaaacttacagccggcttgagcacaagaatcaagaaactatgtgagagaaacaggtgggccctgtattaaattgtaaagagcaaactattactacctccgccccaaaatatagcaatttttagttatgaatctgaacacagttatccagattcatagctaaaaatacttatattttaggacggagggagtatatgggtaggctaaaagaagactaaaaaaaccttatagtcaacaggtcagctgtattattaggcttgctctcaagccaaaagaaaagcctttcttcaactttttgagcattcatgtttgtctgacaactctattcatgttttccaacagtcagaagatttgcttttcgcaaatattatgcgccattcatatgtgtccgacaactccattggttttttccaacaaccacaagcatactcagttatgtaaaaaaaaaaatttcatccagtttcatagtactagaaattatcataatatatactatatatatttactttagtgtgaatgaagtatgcggcagtgtgaagcaactaaatggaactcgtttcaataatttagcatgacattaggtacaggcgtccaacatagcgaatatgccaggaacagtgtttagttaatgcaatgattggttcagcatagatcgacattagtcactacaacagcttcaatccatctgaaaatgtttttgaatgaaaaacccaactccacgacatccctcacttgtagaaaacgaggagcaccgagctacaccgatcgcatagtccgcgagaacatcgatcgacaagtggaggagacaaaggaacaatgagcatccagtgcagggaacatctgatccagcacaatcgtagtcaatgttagagcttgatcattttgatgccattttcaaccttaccaaattttaataaaattgataaaaaatggctgcatttagtttgctgccaaattttagtaactatataagaaattctgtcaaaattttgataactataccaaaattttagcaatgccaaaatttagtaaggtttttttttaacatcagagtgaacaggtcgttagtatcagagtgaacaggtcgttagcaccaacaaaggttcatcgcgagctgatactgagaacctgataccgcgaacgtcctggctgcagaaagatgagaaaattcggcggcccagtagtcaacgacaaaaaagataaacctggcccactcgaaaagcccaccttttctcacagcccaagcaaagtgcaaggccttttttctccacggacggcctctgttggaccacgtgcgcgcgagcccgattccccgcggtagcagcatcccacacgacacctgtcgcgtcaacgcggcagtagtggttcctttcccgggaacaacaccttctaccacacgaaacacatccgcagaagaattcgcaatagttggatggggaagttcttaggcactgtcacatagtatgtttatactaattagaattattaaacgtagactaattagaattattaaacgtagactaatgataaaacccattttaaaactcttgactaattcacgagatgaatatattgagcctaattaattcatgattagcctacataatactacagtaagcattctctaataatagattaattagacttaaaaaatttgtctcgcgaattacctatcatttatatgtaactagttttgtaaatagtctaagtttaatactttatactagttcaacattcgatttgacatggcttaatccctgtatccaaaccccacctataaacgaccccattgcgggcccggcccatataacctgaaacgtacttgtgccgtataaaaagggagaagatacagcccatagtctcactgacactaggggctccacggagagtgggcccatcgtgtcagtgtcgtacaagcgtatctccctttgaccgggggatattcgaaacgtattccgtttcgagtgactgacgtgtgggctcggtggtagataaactcggagacgaattcaccgccacaaatatccccaacccaccaccgggggcccccctaatccaaactgtttctcggcttccgctacacgcctcgccgaccaccatgacgatggctgcggcgccggcgaggtcggcgggggcggcggcggagaagaggatggtggatccgccgcgggtggtcggggagtacaagctgctggaggagattggggtgggctcgttcgcgaaggtgtacctcgcgacgcacctccgcaccggcgatgtcgtggcggtgaaggagatcgaccccaggaggatcgacgagcgcgtccgcggcggaatcctcgaggagaaggccatcctctccaccctttcccaccccaacatccttcgcctcatcgacaccatccaggtagtaacccctaaaccttccaacccaggcacccaaccgccatcgcaatcgcaactgaactccgagcgagtagtaaggttaacgatgtgaaattagtaaaatgacttgtggttttcaaaggaggagaatctgtacctgattctggagtactgcaatggaggcgacctcgaggggtacaggacgaagggcggcgaggacgcccggttgccggacgccaccgcgagggacttcatgcggcagctcggtatggcctcaatcgagatttgaatggagttccttgtcctttagttgttgtcttagttacattttctaggtttttggaacggtgtagttatgcgtcttttgcccctcttttttatttgtagcggaagggctcaagatgctgaggggaagatcaatcgtgcaccgcgacctcaagcctcaggttagatcttacatgcggagctattaaatttttgctgtttgagtcggtttgcaatttttagatgttttgtttggataccatatgcaaactaactgtaatgattatgtctgaagttaagacgttttgtaatttcttgtactgttgtgcaaatgggctccatatttagcatctaaagtgatcaatacctaacaactaatattgacttgattgggctgaccccagtcattattagttcaccaccaaatgtcaaaaagttgcatgtacgatttctctatacgttcatgctattatccactcagtaactcaatatatgtttgaggaaaaaaaacccaaaaaggtgtacattgtaatagtgtccatgtgtttatttttggctattgatttgttttatcctttgagataatatatttttacccataccgaccaatatgtgaaacttgcagaatcttctgctatcaactaatggtgatgccatcacactgaaaattggagattttgggtttgctaggtgtgggctctatttcccttctgttgtatatatatttgtaggcttatatattttttctcctttacttgaattaccgggggccaatccccaaatatctacagctgttacccattttccaatttctacagtttcttccctttttccgaaggttactatgaactttttgttagtaaacaatgtgtgaatgatattttggaattgttcccaggtctcttgtgcaagaaaatttagctgctacaatgtgtggatctccatcctatatggcgccagaaattatgcgatgtgaggattacgatgcaaaggtttgttcattcacctatgcttttgggtgttttaatatagctagacaataatcccaaccatatgttctttcaggcagacttgtggagtgttggtgttattctttttcagctagtcacagggaaattgcctttttatggggctaatctattcaaggtttgctcttatgcataattagatgtatgtggaccataaaaatacatatatcctgtaatattgttcttgattgttgttctttgaatatagctgaggcaaaacatccatgaatctaacggcgttaagttccctaaagaaatcaaggatgatttacatcctgatttcattgacctgtgccgagggctcctacgtcttgatccaagtaagtttgtatttctcttcatttttgtttgtgcaaagcagtgtgtattaactactccctccgtcccataatataagggattttgagtttttgtttgcactgtttgaccactcgtcttattcaaaaaaaataaacttgaatagttatgcactgtagtagattttttaggcatattcactctgaattaaaaaagtcttcaacattaaactttgacaatcaatttctcataaatataagtatttttttccatagcttatgaaattaagataatgcggaagcaactctgggatatgaatttattggtattattcttgtactgcattgcttagaccacttgttctaagctacgtagtatttgttaagtttatttctcaaaatgtttaatttatccttataatgaagtatataatctgcggtcaataatctatctcaattctcaaatggagcctacacttgtaattggactaactgtttgtcaaaacgaacacagtttgatttttttaaaataaaaatatgccttataaaaattaatggaaggaacaatttctttcaagtttcaactgtcatctgtgtaatttcgttaatcattggtcttgatcttattattccttactaattactaattggtgaatcatattaaaacacaatttctattttgcagagaagagaatttcttttgaggaattcttcaatcacaagtttttgtcaacaactgggtcgaccctttactctggtggaagcattcaaaggtctatctggctatgttgcaaaatgtgcattgttatcataatccatgtccatacctaatcttcaatttaacttaaccaaatactactctgctgctgccaatacggcattcatcctcacttgtaggcagcccaaaaaatgtacataaagagacatacatgcattgccttcaacataatataaacctctaaaatttcaagatgaattgaacatatgatatttggaatggtacattgtacatttctcaagttctcatgaatggtgaattactcaatatacagcatacttgcagtcttttcccatactctccatgtatttgtggaatagttgccataataatgtggacatgggtttgattgtgtcatatttgtctcctgtgttgaagttttctgattctttttccaggaaaagagagattagcagtgagcccaatcatcctgctgatttattaagggatacatgccagatcatttcttcggatgtcctgaaagataagtctgaaagcgtggattctagaaatttgcaaggtaaattagactcccaactagtattcagatttcatacgtccctgctctggcattaactctgtatatttttgcagcatttgattcatgggaatggattgaacgagaatatgtacttgttcaggcgaactctacttccacggaaattttgtcttcacttgaaaagtcaatgaaggatggtacaggtgcaaaacctgccagctatgataggtccactgttaaacggtctgcttggaaccaaaacagaaattcagtcagtagaggggttgctataaaaagcaatggatgcaccccattgtctacttcccatgaatcaacagctgcagaaaatctgctaaatccaccttattgttacacaaggcttcaactccttaaccagtatattgttgttcttacagaacttgcagaggagaaggtattactactgcttttactgggatataacactatgtccattgaatgccatctgtgttttgtagttgtgtgcagtctgtagctccttatgtttgttatgatgaaacagtggttttttgttgctaagcttcatctgctcatatacttactatgttccttgctagaatgcttgttgagttctttgaccagatgaatgtttgtagagttatccctagtaatttaaatcatgcaggtgatgtctaggtttaaatgattttcatcagatgtagaggtcacagccttccacatgccatttttcattgatatacccgtgtatcaacacattaagcaatactcttagtctccaagtcatgatatttctggcatatctcttcttctcagttttttttaacataaagctttgtccatatatatattgtatagcatcaaatagatgaatcttttgtgcacttctcttcagaatgtcgatgccagacaaaattctccttttgtattgatgctcatagcatagctatgatattttgagaattgagaacctattagtccagtttgatctaagaattatgttttgttgtttttcatattggcatttctgtgtggatgcagctttttaaagggctggacttggaggcactatctgttgaacttataatattagctatttggaacgaggcccttaatgcatgtagtttatccacggatgctacacatgatggattttttttgacccaagctcatgtcaatttcctgcctaagaatgaccatcgtccatctcgaaatgtagtacaaggattggatttcaccaggctcgtttctgtctgttcctgggctgaaagtggctttatcaaggcatatgaccgtgcagagaagatatcacataggttgcgggacaacaatggttagaacattggtatcttcatgtcctagtatagttttgtttttgttttttgctataacccttgtttgtttccagataacaccgagatgccagatgcagtggagatcatattccagacagctttaatatatggaacaactggtgctgtaagtatcagtattctaggttcttgtatggtttctttacagctttcgtttttccttgcacttcatggatttggggggaaagtgggggagtggtgtatgcatttcacgattttgggtaacaagcaatgatgctacaacggaaaggaaacctgtagacttgtagttaatgtgtaccagcccaggatccaccgctgtgcactggttgtccaggcggttggttagttattatcactccatattctgttagaccacgaacaaggggcagaaatgaatactattgttttaggctgtgtttgagggagagggaattgagaagattgggaagatacgcaaaacgaggtgagccattagcacatgattaattgagtattaactattttaaacttcaaaaatggactaatatgattttttaaagcaacttttctatagaaaatttttgcaaaaaatacaccgtttagtagtttgaaaagcgtgcgcgcgaaaaacgagatacaatctcccctttctcatgtgaacaaacgcagccttagactgcagtgggaaagaaaaacaactttcttttacaaatgagcaaaaatgtttatagccagccagtctctgctctctacttctattaaagcgctattcatgggggaaagcggtattcatggggaaaaaacttttatgaaa

SEQ ID NO: 15403 - DNA, 4818 bp, Oryza sativa
atgtagctttggttgaggacttaaagtataatttgctttcagtttcacaaattgttgatgaaaattttgaggttcactttaagaaaactagaagtaaagtttttgattcttgtggtgattctgtgttgaatatttctcactatggaagagtgtttaaagctgattttgaaaatcctgtttcacctgtgataacatgtttggttactaagtttgataaagatgtgatgttttggcatcacagacttggacattttggttttgatcatctcactaggttaagtggtttggatcttgttcgtggtttgtctaaatttaagaaagatcttgatttggtttgtacgccatgtcgtcatgctaagatggtttctacttcacatgctcctattgtttctgtgatgacggttgcaccggacagctattacatatggacactgttggtccagctagagtgcaatctgttggaggaaagtggtatgtgttggatattgttgacgatttttctcgatattcttgggttttctttatggcaactaaggacgaagcttttcaacactttcgtggtttgtttcttcgattggatcttgaatttcctgattctttgaaaagaattcgaagtgataatggtggtgaatttaaaaatgcttcatttgaacaattttgcaacgaaagaggtcttgaacatgaattttcttctcctcgtgttcctcaacgaaacgttgttgttgaaaagaaaaacgtgttttggttgagatggctagaacgatgttggatgaatataaaactcctagaaaattttgggccgagacgattaacactgcttgttatatttcaaatcgagttttcttgcgatctaaacttcgaaaaacttcttatgaacttcgatttggtcatcaacccaaagtttcacatttgcgtgtttttggttgcaactgctttgtcttgaaaactggaaatttggataagtttgaggcacgctctaccgatggattgtttcttggttaccccgcacatactcgtggctatcgtgtacttattttggggactaacaaaatcgttgagacttgtgaagtttcgtttgatgaggctagtccaagtactagacccgatattgcaggtacactgtcacaagttaagggggaggatgccgtatttttgaagacgagagcgactacgacgacgacgatgaggtcggctcggccggtcagaccgggcgccaggccggtcagaccgccggcacacctccggtcaaaccggcgcaagacgtgcggtcagaccggccagggttgtcggctgagggttccggtactgttgatgctgatcgagatggtccttcggaaactactacttcgaccagtaataatacaaaacgtggatcaacttcagaagtcactgctcctttgcacattcaatgacgacatccgccggaacaaattattggtaatataggtgagcggactataaagtctaaggtaacgactcatgatgtttgtgcaaattctgtatttgttgcttcttttgaacccaaagatgtgtcacatgcattaactgataaatcgtggattaacgccatgcatgaggaacttgaaaattttgagagaaacaaagtttggactttagttgaaccaccttctggacataatattattggaaccaagtgggttttcaaaaataaacaaaatgaggatggtttgattgtgagaaataaagctagacttgttgctcaaggttttactcaaattgagggtttggattttgatgaaacttttgctcctgttgctagaattgagttaattagacttttgttggcttttgctgcttcaaaaggttttaaattgtatcaaatggatgtgaaaagtgcttttctaaatggttttatataggaggaagtttatgtcaaacaaccaccaggttttgaaaatcctgattttcccagccatgtttttaaattgtctaaagctttgtatggtttgaaacaagctcctagggcatggtatgataggcttaagaactttttgcttgcgaaaggttttacgatgggaaaggttgacaaaacgctttttgttcttaagcatggtgataatcaacttttcgttcagatttatgtggatgatatcatctttggttgttcgactcacgccttggttgtagattttgctgagactatgcgcagggaatttgagatgagcatgatgggtgagttatcgtactttttgggattgcaaattaagcaaacacctcaaggtacttttgtgcatcaaacgaagtatacgaaggatcttttgagacggttcaagatggagaattgcaagccaatttcaacaccaattggttctatagctgtgttggatcctgatgaagatggtgaagctgttgatcaaaaggagtatagaagtatgattggatctttattgtatctaactgcttctaggccagacatacaatttgctgtgtgtttgagtgcgcgctttcaagcttctcctcgtgcttcacatcgtcaagcggtcaaatgaataatgaggtatttgaatcatacacttgagtttggaatttggtattctacttcatcttcgatatgctgtcgcgaccgagaaagttgccttttcccgaacgctagtgtattaatccccgtcccaggaaaagccggggtacaccaaacaaacatgatataaaagacacatctttattatatcgacaatatttacattattacaaaggcgcttcaagcctgacaatcaaaaataaacagcagcggactagcgagcctacggctccatcttcacaggcgctcaactggggtataagccaagactccacctaagacttcttctctaaagcttctcttactgaaggggggagaaagatagagcaagaatgagtacaaccacagtactcagcaagccacaccggcggatgcacgattaatgcaaggggggtacaggggtaatgatataggggttaagttttgcagaaaacaacatttaaaagtcacttagttgccccaagccattttataaagacgatcctagagtcacacagtgttattaatcaaggccgtgaaccctcacgaacctgccttaacccaaggcctacgatgattcagaccgaactggcaacccgaccttgggtcccagctcgtcccaagccaacccaggccaaccattccacattttagttgttgagcaaattttaagaattaaaacactaacttgggtacattgctcggcttgcccataaccgagggcgcggctattcgaatagattttactctgatcagaggtgtacatctttacccacaagacacatcttcctcacgtgtaaccacgtgccacataccaccacggtatacagacggaagacgtgacatagttcccaacccatcctagccataaacaagagtaccgacccaaccccacctacggccggaacccccgggacaggcaggcaggattgagccccctagcagcaggacaccagccctgtgccatgacatctcgactaccgggccgcagctcgtgtagccttcatttgtcctagagatgtccatcgacccccgacttcgtccatctccatccgtgtacttttgtttataaccagactgagccacaaactaagccttacccagtagacatgtggaagtacagtagtgctttgcaacagaggcccgagcttaatccttatagtaaccgaggtacgactaaccaaacctaaccacgcacctcgagcccagcctaaaaccattttgggggttttgaatagagggggaggtgtgtgtccaattccaacaaaagccaactatttcatagtgtccaagtgatatgagaattcccaaagtctaaagttataaaaccacctaatgttgcctaattaatcagcgaagcatctacctaaattcatactagtggaaccatgaatagagtacccactagttggggttttgtttatcctagggtgaacaaggtaataataacaatagcaataataatgtcttaacaaaggtaaataggcatggctaaataaaacagtgataacgcgggaatttaaataaagcggtaatgcattaatttaaattaaaataattttataaactgggattcaatatgctcaaggatgatgtgacttgccttgctcactttcccaaacgtcggcttcaacttccacgaagagcggatcttccgaagctgcagcgtctacacgaccaacggaaaagaaacggcttttactctaataaactccatataacaagcagaaacaaagcacaaaaatgggttcttgacttcttaaggaaaaattagagacttgaacggtccaattccgagttcaaatggccaagttatggccatttgaggtttatatgcgctttaaatggatatttgcgaatttcttcatttaaattttaatttaaaatcggatttattgcgtcagccgggagagaggagcgcgcggaccgggtccacgggagtggggcccacacggcagcctctcgatccacggtggaccgggagcacgcggcttacgccggccggcgccgtgggtccctcgtgtcagccgcacctaagggcgcgggcggctgacagccgggccccacacggcagccgcggggcgcgcccgaaggcggccacgccggcacagccgacgggaggcggcgcgcccgcgcccttatggtcgccggcggcggccataggcacggcggagcggtggccgagagaggggagggaaagggggaaatgaagcggcggttcacggctcaccccgggtcgacggcgacgacggaaacggcgaccgaagcggagagaggcggcggcgcggctcgggtcgacg

SEQ ID NO: 15404 - DNA, 1825 bp, Oryza sativa
ggcggcggcgctagggcgcagcctgggcggcaggagcggcgggaggatagagatgacaggtgggccccacccgtcagcgagggtggcgggcgggcccgcccgtcagcggcgcgcgcacggggagaggccgagtgggccgcggggagaggagggagaggggagggagatgggccgggccggccagagagagagagggaaggaaaaagagagggagggagagagaactttggccgcgggccgagagagagagagggaggtctttgggccagacttggcccaaagggaggagggggattatttttagctttttctttttataaaatcattttaactttgattatttcttcttaattgttatttgtgctctgaaaattccactaaaatttatttacgcattttaggcttttaggaaatatacaaaaatcctctaggccttatttgacttttaacttagcacattttaattgttggaggctttcacatggattttaattattctaggcataattttgaggatgtattttagagtcgttttgggacgcgacatatgcttaggtggatattcaaatgctgattttgcaggttgtggaattgataggaaaagtactagtggaacatgtcattttcttggtacatcattgattgcatggtcttctaggaaacaatctagtgttgctcaatcaatatgttgctgctgctagttgttgttcacagattctttggcttttatctatgttggcggatggcatgaggcccttcgaccaaatctgccgaaacccatgacgaaggctatggagcaagaacggcgtgaggcgaagagtcgtacgagtgccttgccaggccaaaggagtctcaggtgaagggtgcaaggcaaagactatctgccgaaggaagacgacttcgccttggcaagttcgcccatacgagggccgaagaagcctttccggcccatcaagcctaggggcaatagggccggcgatcaccagacggcccatcaggggcccatgaacccctatatcatcatgtacccctgtaaatgtccctttcataagggtaatcatgtaaattcccctgtataacctaaaccctagaagtaagaacctgtaatggggctataaatagtcccctagggccatgtaatgggaaaaaaggaaagaagggaaactcaaaatttaatacactttgttttcttcctaccactgttgagtaaccacgtctttcgacgtatgcggttgtcatttcgacaacagctggcgccgaccgtggggacctccgagcgaaaccactgaaagcgaatgccaccgaagaaggtcgtgaaggagaaggttgcaaggcggaaggaaagcaacgccggaccggacatggctgtcgcgaccgagaaaattgccttttccccaacgctagtgtattaatccccgtcccaggaaaagccggggtacaccaaacaaacatgatataaaagacacatctttattatatcgataatatttacattattacaaaggcgcttcaagcctgacaatcaaaaataaacagcagcggactagcgggcctacggctccatcttcacaggcgctcaactggggtataagccaggactccacctaggaaatcttctccgaagcttctcttactgaaggggggaaagattgagcaagaatgagtacgaccacagtactcagcaagccacaccggcagatgcatgattaatgcaagggggtacaaggggataataatataggggttaagttttgcagtaaacagcatttaaaagtcacttagttgcccaaagccattttataaagacgatcctggagttacacag

SEQ ID NO: 15405 - DNA, 7424 bp, Oryza sativa
cgggggtctccgcgggaaacggagggcaagccggggaaagagaggccactgcgatgctggaggaggcgacggcgcgaccggatggcgctccggtgaggagggagaggcggctggaggcggccggcggcacgggagagagaggaggacggcggggagagggctagggaccacgggagatcgcgggagggggctaaaacgatagaacggagcgagggggttgcattttatagcggagggaagcgagccgagcacgggagagggcggaacggcgacgggaatggcggccgtcggccatggaaagcggccggagaaaacgcgggcgttcccggcgattgggggcacgatccaagggggaaattgggggggaattgaagaggaatcaatgggatttaaaaccccccaattaattttggaatctatggtttgatttgcgcggatttggaggaggaacggctctaggttttcccggagagggagaggaggctgagcgggaggaggaagaagatgacggccggcctggcgcgtgggccccacgcgggcgcgcggcgtcagcgcgcgtgcggcgcgcgtgcccacgcggctggctcaggcagggggggcgccgctcgggttgggcccggaggcggcctaggtgggagggggcggaacggcttgggccgagaggcggcccaggaggagaggagggcgagggagcccgggagagagagggaggagggagtgggccgggaggggaggaggcccaagaggaggagggagagaaggagagggagagaaagagagggaggagagggagactttgggctgggcttggcccaaaggaggaagaggattttttttttagctttttctttttaataaactttgataattgtttttgttgcttaataattatttccggtgctctgaaaattcaagtaaaatttgagggctcctttttgaccaaggagaatttaacaaaaattctccgggccacattcgaatttttcttgtgcgtattttagtgtttgcagatttctttccgaattttaattaattctattattccttttagaaaatgatttttatttcgggatgaatttatcaggacgtgacaaatccaccccccttacaagaatctcgtccccgagattcgaggaggctagcaagaagataggttgggcggtcttctcttcttatctgacttcttccgtcgcgtcttctataacaaacttgcctagcaaaacttctccactctgtactgcttgtctcgatctcctgttgcagatggaatcttctcttcacctgacttgtccctggttgaacctttagctgacttcgtctgggttgcggcacttgaagatggggcttcagttccagaacttcgtatagttcatatttttggcgtcaacctcatagaagttacccatttcacgttatgcgtcgagatcagctcgtcattactaggataccatgcttgtcatcatgagaatatcatgcttgtcatttacttctaagttgccacaaactgcctcatattagctttcctggtctccgggtgctagctacttctgttattcgatgcgagggtcgataattttcgcctttcaattatgtttctcaacagagtcaacttatcccacttgacatgctttgacgcctttccagatgacttcactgctggacttgttatggtttgatcgttaccctgccaaatctgaagcttcgctgttacatgtgattttaatctgacctctgtaaactatcttcgaacatatcacttggttcataactgggaatagctcccatgaacaagcaactcggattcactttctttacattcagtttacttcccactattctcttcatgttgtcctcagttagcattcaacgtattcctttacacctttgaccttgatcacctttcgacctttgtcaactaagtacttttcactccgagagttgtggatgcttctggtgacgatgtggtacttgagcctgctgcctttcagagaaaccttcaagtggttcgtcaaaagctagactagcggttgttgcctttgatccaaaaaagacacatctgaaactcttagtccaaacaaatgtctctttggttaatcgcttgattttcttttccatcatcaggttggttattaactcgaggttagaacatagttcctctgaaatgagaccctaggtctcctttgacagtaaacaattatacacataatcccatatcagcatcttccgaaataatcctcatagaacttgtttttattacacatgtctcccttattacatgaatacaaggccttgccttaaacaaaaagggaaggtgcttaacatcggtacattgcatcctcaacatgaatcatccataagcatagcaagctcactgtttatagacatgaatatatttatgtattacatgattgctgcaaactttcgattacacaatgataagtagcgaactgaaaaccacaaacatggctgctcattttgattctggagagatatagctggcattgttctagtgactgcatccttgattggttctgtgatgatgtgataggactgcatattgctatcattcacaggagaagcttccttctgattgctggttgaagcgaataacggtcttctgcttggtatcatcctcctgaggttgattgcccttcgctcggcctggagtaggtcggggagagacacaacttcttccatcgacgacaattctttgctgaggccgtcggtgcagagaatggttggtgctgaaggtattattgctatgatttattgcagagtcaggtgcagcaagaggagcattggtgctgtggatgatatcgtcgatgttgctgttggagctgactaactgacgagacaatcgtagggttgttcgttggatttctgcggtcttggtcaacaacacactgagttggcaatccttgggcacatggtttgtaccttcgcacagaaaacatgtgaccttgcgggtgggacattcacctggtggatggtcttcctcacaatgagggcagagtgtgaaacacatgctagcaacgtgtccaatttctccacaacgggggcatgcttttgattccatctcttcctcgccgagatgtcggagagactcatcttcataatccgaggagacttgatctgacccttcactatcagatactctgccgccatggcttaggaggtgctgggtcaactgtcgtgcacctcggaaggtatttcctctttgacgtctaggaatagttatccctgcgggaggccattcggtgctgctaatagccatcttacatacttctccttcagttcgcatcggcgcttttctcttctgattcttactcttcttgcctttggcttgcttagtacgtgaccccacgtggtacgaaaggctaggaggaaagcatttcccgggattcaatggattctctccattgggctctctactttgcacaataggctgcaagcttgacttggtgcgaggaggctggtttagcgatgtctgccctgttaaaccaaaggaaggggcttctttggcatatacccatggacaattcagggcatagtgtccttgttctctacaatcatgacaaaaggggacatcctcttctggcattggaagctcattgacatgggtggcaaatgctcgatcaaacatatactgattttggtcttgacttccaaccaatggtagctgtgaactaagcagcatgcttggaatggaccaagggtgtgccctggttaactctcttgaggccagtggttgatcgagttgaaaacttgagttacttggggcatacccgctgacattctttcctttttctctgttaaacatctgttacagggattgaggtgagagaggaaacaagctaggaaagaatagaccagaactagagacaggaccttaaaggaactactcttcttgatgatgtgttgtttgtttcacttattctgcaagttgattaagcaaacaacctagcatggttacatcacaacccaccgatgccaaccacgcgctacacacacaagcaaggaacacacgactaacaacactaccctacagggtggcttaggttctgcgacgggttcccaagatcttcactccttcacagctggcttcactgcttcctccacttcgctagcggatcctgcagtcttccggagcttcggcaaacaattggcgacatcttcttcttcgcaaaactaaccatctagtactagtggaaatccgaagagggaagaagggagtaaaccttttgcaaatagcattaggggaaggagaaaaaaggaactttcgcaaatagttttatttataaaatatgtccttaggttttatccacttggcttatcctacagtcgagatggctctgataccagcttgtcgcgaccgagaaaattgccttttcccgaacgctagtgtattaatccccgtcccaggaaaagccggggtacaccaaacaaacatgatataaaagacacatctttattatatcgataatatttacattattacaaaggcgcttcaagcctgacaataaaaaataaacagcagcggactagcgggcctacggctccatcttcacaggcgctcaactggggtataagccaggactccacctaggacatcttctccgaagcttctcttactgaaggggggaaagattgagcaagaatgagtacgaccacagtactcagcaagccacaccggcagatgcatgattaatgcaagggggtacaaggggataataatataggggttaagttttgcagtaaacagcatttaaaagtcacttagttgcccaaagccattttataaagacgatcctagagttacacagtattattaatcaaggccgtgaacccacacgaacctgccttaacccaaggcctacgatgattcagaccgaactggcaacccgaccctgggtcctagctcgtcccaagccaacccaggccaaccattccacattttagttgttaagcaggttttaagaattaaaacactaacttgggtacattgctcggcttgcccataaccgagggcgcggctattcgaatagattatactctgatcagaggtgtacatctttacccacaagacacatcttcctcacgtgtaaccacgtgccacataccaccacggtatacggacggaagacgtgacatagttcccaacccatcctagccataaacaagagtaccgacccaaccccacctacggccggaacccctgggataggtaggcaggactgagcccccagcagcaggacaccggccctgtgccatgacatctcgactaccgggccgcagctcgtgtagccttcatttgccctagagatgtccatcgacccccgacttcgtccatctccatccgtgtacttttgtttataaccagactgagccacaaactaagccttacccactagacatgtggaagtacggtagtgctttgcaacagaggcccgagcttaatccttatagtggccggggtgctacttcccacaactagcatgcacccaaaccccaccgaaaaacaggttttaggggctttgaaagaggaagagaggggtatgtccaattccacaataagccaaccattccatagtatccaagtgatatgagaattccccaagtctaaagttataaaaccacctaatgttgcctaattaaacagcgaagcatctacctaaattcatactagtggaaccatgaatagagtgtccgctagttggggttttgtttattctagggtgaacaaggtaataataacaatagcaataataataaggtcataacaaaggtaaatagacatggctaaataaaacagtgataacacaggaatttaaataaagcgataatgcattaatttaaatcaaaataattttataaactgggattcaatatgctcaaggatgatgtgacttgccttgctcagagagaacggacttccgaaccttcggcgacgaccacgaaccacgcttcgggaacctccagaacgacgaagactacgcgaagcacacaagcaaagctacaagcctataaagaagcaataacaatacataaaaagaaagcacagggttctttaggttataacaaacattaagagacttgaacgggtcgattcggagctcgtatgaccaagacaaggtcatccgaagtttaatgctgtcatatggagatttgtggattattataattaagctttgcaactataaaacatgtgtaagcgctagcctggaaaagacaggaaggctgcgccgttgacatgcggaccccacatgtcaacaaaaaggaccgcggaagaccgagtacacagagacggtccacgggtcgatggaagcggatcctgtgtgtcaaccgaggcgagtggccgacaaacggagtccactagacaccacacgggctgcacacgtggaaaccacgcggctaccgagcgggcacactaacacggtcaccacacgcacaagcgaacgactaccgacaccggtacacgggtaccggggtcgacaactgcacaacgagcacgggcgacaacgaaaggacgaggacggggcagcaagaggggagaccttaccaccacgcgacgaggcgtgggaacgacaacgacgaacgggcgcggcggacagacggcgagggaacgacttcggcggcgatccttggacgaaggtgagacgcggctggcacgaggcttgacgacgcggaggcgaggacgaagacgacgatggggctgcagcggcacacttgatggatgcggacgacggacaagaacggcttgacggagggacgaacgccccaacgagcgaaaccgggaatgacgagaggacgacgacgacgacgaccggagccggcgaggaggcgatgagggcagccggcagcggctgcacggagacgaggacggcgtgttccacgccgctgcaatgccgacgacggaggcggcgccgcgagatgacgagccggcgaggaggaacgatgacgacgacgacgaacaccggcggggttcggtcgaaggggaggcgaggccgagggcggcgtcgcggctgcgatgccgaagatggtggaggtgcggccgaccggtgcacgggtgaggagggacgggcggccgaacaactccggcgaggcggatggagaggttcgcggcgatgtgcggcggcttccgggcgaaaccgaggggtggacgaggtggagggctacgtcaccatgccgagggggttgcattttatagcggagggaagcgagccgagcacgggagaggacggaacggcgacgggaatggcggccgtcagccatggaaagcggccggagaaaacgcgggcgttcccggcgattgggggcacgatccaagggggaaattgggggggaattgaagaggaatcaatgggatttaaaaccccccaattaattttggaatccatggtatgatttgcgcggatttggaggag

SEQ ID NO: 15406 - DNA, 10272 bp, Oryza sativa
tcctgcagcccaacaattattatatgtgctctgaaaattccactaaaattttagggctccttttagaccaaggagaatttaacaaaaattctccgggccacattcgaatttttcttgtgcgtattttagtgtttgccaatttctttccgaattttaattaattctattattccttttagaaaatgatttttatttcgggatgaatttatcaggacgtgacaatggccgccgaggagggagcagagccttcggcgcccgtggccgaagatggaggagcaccattcgcttccacatgtgcgccatcacaaccgccttcggcccccgccacctctctgcaagtgccgaacgcggccgacatggcgaaggcggctgcggtggcaagggcactccagaccagggcgaagatcctttcgacaagccaactggtggtgccccaagccgctccatcgcagccggcagcggccccgactgcgctcgccgctgtgcaggcccaagtcagccctgaccccgaaacacaagccgaagccgacatggaagccatgcgacagaacatgacacggttccaagacatgcttcgccaaatgcaagaacaacaacaagcatacgaggcggcaaggcggaccaaggtcacgtcggctccaatccttcagtattcggcaggttatgtcccaccacaagtccatccgcaagtgacgacccagccctttccgcctcaagtcgcacaagcgccaatgtacttcgccgggcagcaatcggccgcagtcgctgcccaagtacaccatcaaccacccggccaagcgccacaaacagtggcggaaggggcttcggctctgcaggcgcaactccaagctttccttcagcaacttaaccaaccccacggcatttcaactacaaccccatcggcccacccagaggggactacaagtcaaggtgcgcctaattggttgccaccgattcagccgggcctgggagtttcgctgtgcaatcaaggaccgcaattcgacttcgtcaacgctgctcaggcgccaaccgttcggcagcaagctccaactccaggcttcggaacaaaccaagcaccaatccaagctgccatgacgtggtcacaaccaatttttgacccatccatggcggctcagcaagtacctccagttggagccgggcagccgaatgccatggcccaacctcgcgcacaagctgcgatttcgcccttcgccacaccgtacctgcagcagggtgcggtaaacagggcgggaggcgaaaaggggctaccgttgagtgggggaatcaagactcgtccaatcccaccccagttcaagttcccacccgtcccgcgctattcaggcaaaactgacccgaaggagttcctctccatctacgagtcagcgatcgaagcggctcatggtgacgaaaataccaaagcgaaggtaatacatctcgctctagacggcatcgcccattcttggtatttcaatttaccagccaatagcatttactcatgggagcaattgcgcgatgtttttgtccttaactttcgaggcacctacgaggagccgaagacgcaacaacacctactcggcattcgccaaaggcagggggagtcaataagggagtacatgcgtcgcttcttgcaagcccggtgccaagttcaagacataaccgaggcgtcggttataaacgccgcttcggccggtctgctcgagggcgaactcacaagaaaaatcgccaacaaggagcctcagatgctcgagcacctacttcgcatcattgacgggtttgcaaggggcgaggaggattccaagcgacggcaagctatacaagctgagtacgacaaagcctccgtcgccgctgctgaagctcaagcacacgttcaagttgccgaaccacctcccctcttcgttcgctagtctcagccggcgatccaaggacagccgccatggcaaagccaagctcccataacttggagaaagttcagaacagaccgtgcgggcaaagctgtgatggcggtcgaagaagtgcaagccctccgcaaggagttcgatgcccagcaagcgagcaaccatcagcagccagcccgcaagaaggtccgaaaaaacctctactgcgcctttcacggacgttcttcgcacaccacggagcaatgccgaaacattaggcaacgcacaagacccaaggccgcagcagggaacaactgtcgaacaacgccagatatacagcgaagggtaatccaagtgattacaaggctgacccaccaagccagttgtccaaacggcagaagaagatgcagatccgtatggtccacagcatcacttcggtgggtgaaggggcgccgcagtatctgaaccagctaatttcttttgggccggaagacgcagaaggagttatgttcccgcatcaagatcccctggtaatctcagctgagatagctggtttcgaagtccgacgaatcctggtcgacggagggagttcggccgatgttatcttcgccgaagcatatgccaagatggggttgcctacccaagcccttaccccagcaccagcatcgctccgcggtttcggcggagaagcagttcaagttctcggccaagcacttttgctgatagcctttggctcgggggagaacagacgcgaagagcaaatactgtttgacgtcgtcgacatcccatacaactacaacgccatcttcggccatgcaaccctgaacaagttcgaagccatttcccaccacaattatctcaagctcaaaatgcccggcccgacaggggtgatagtagtcaaggggcttcagccttcggccgcttcaaaaggcgatctagctataatcaacagagaagtgcacagtgttgagaccgaaccgcatgaacggctgaagcacacggcaagataacaaaagtgcagattgatgatgccgaccccacaaagctcgtatcactggggagcgacatgggcgaagaagaagttgagagtatcctagaggtgctcaaaaagaacatcgatatcttcgcctggagccctgacgaggtcgggggtgtcgcggcggatctcatcatgcatcacctagcagtcaagccggacattaagccaagaaaacaaaagttgcgcaagatgtctgccgatcgccaagaagcggcgaaagccgaagtacaaaaattgctcagggcgggggttatccaagagattgaccatccggagtggttggcgaatccagtgctggtgcggaagtcaaacggcaaatggcgcatctgtgtcgatttcacagacctgaacaaagcgtgtccgaaagacgacttccccttgccgcgaatcaaccagctcgtggattcaacagctggatgcgagctcatgagtttcctagatgcatattccggttaccaccagatccacatgaacccgctcgacatccccaaaacatccttcatcactccattcggcacatattgtcacctcaggatgccttttggcttaaggaatgcaggagcaactttcgccaggctggtgtacaaggtccttggcaagcagttggggcggaatgtggaagcttacgtcgacgacatcgtcataaaaagccgcaaggctttcgaccatgcgatcgacctgcaggagacattcgacagcttgcgcacagcaggcataaggctgaatccggagaagtgcgttttcggcgtccgtgcaggcaagttgttgggtttccttgtttccgaaagaggcatcgaggcgaatcccgagaaaatcgatgccatccagcaaatgaagcctccgtcaagcgtacatgaagtacaaaagattgcaagccgaattgcggcactcagtcgattcctctcaaaggcagccgaaagaggtttgcccttcttcaagaccctccggggcacaggaaagtttaattggacaccagagttccaagcagcattcgacgagctaaagcaatacttgcaaagcttgccagctctgataagcccacccccaggaagcgaactgctattatacttagcagcttcgccggtagcagtgagtgctgccctcgtccaagaaacaaagttcggacaaaaactggtctacttcgtctccgaagcactgcaaggagcgaagacaaggtacattgaaatggaaaagctcgcttacgccctagtgatggcttcgcgcaagcttaagcactacttccagacccacaaagtcatagtgccatcacagtaccccttgggcggaatactccgaggcaaggaagtcactggccggctcagcaagtgggcggcagagctatccccgttcgacttacattttgttgcacgctttgctatcaagtctcaagtgctagccaacttcgtagctgaatggacaacggtacttgcccccgaccccgagcccgccgaacaattctgggtgatgtgctctgacggctcgtggtcgcacaggggagcaggcattgcggcagtcctatttttgccgaatggtgtgccgattcggtacgcagcaagactgcagttcgacacaaccaacaataaagcagaatacgaagccgttctcctgggcctaagaaaggcgaaagcactgggagttcggcgcctgctaattcgaactgactccaagttggtagcaggccatgttgacaaatcctacgaggcaaaagaagagggaatgaagaggtatctggaggctgttcggtccatggaaaaatgcttcaccggcataacagtcaaacacttgcctagagaccagaacgaggaagcagacgccttggtgaaatccgctgcttgtggtggcccacattcgcctggcatcttttttgaagtcctacatgctccaagtgtgcccatggacagctctgaagttatggcaatcgactaggagaaactgggcgaagacccatatgactggcgaaccccatttgtgaaacaccttgaaactggctggcttccggtagacgaagcagaagtgaagcgtttgcaactcagagccacgaagtataagatagtctcgggtcagctttaccgctccggggtacttcaacccttacttcgtttgccgtttcggagtgccaaaagagttcattactgacaacggcaagcagtttgactctgataagttcaaagaaatgtgcgaagggcttaacctggaaatcaggttcgcgttggtcgcacacccacagtcaaatggggcggccgaacgtacaaatggcaagatcctagaagcactaaagaaaagactcgagggggcagcgaaaggcaaatggccagaggaattgctatcggttctctgggcccttcggacgacccccacaagaccaaccaagtttagcccgtttatgcttctttatggcgatgaggcaatgaccccagcagagttaggggctaactcaccaagggtgatgttctctgggggcgaagagggacgcgaagtatcgctcgaactcttggaaggagtaagagtcgaagcgctcgagcacatgcacaagtacgccacaagcacttcggcaacttacaacaaaaaagtttgacccacggagctgatgcctggtcatctcgtcctaaggaagaaggcgaacccagtagcggttggcaagcttgaatcaaagtgggaaggaccatacctcatcaaacacaagtccaggacagatcttttcgcctagcgacactcgaaggcgaggagttcgaccattcctggaacgccacctctctcaagcgcttcggccctactagccttcaggcgaagagcctccatcttcggctcagtaaggttgtagtagtcaatcagcaccgccgaatgggccttctccttctccagttcggccttgaggcgatcaacctcgcccctggcctctttccccttatccagctcagactgaaggcgtttgacttcagttttcgcctccttgagggtgttggccagggcctccacctccaggttcttgcggcttatttcgtcgtccttggcccgaagacggctcttaaaaccgtcaaaacgggcccatacggttcgctccgtcgaacagtgagccgcaataatctagatgaaagataggagcgggcgaaaagaacaaaagaacaaaaggttaattgtcagacgtaaaaaaaaaagggacgacgaggaaaacgaagaaggaagaaaaggcatacccgaaccgccaggcttttaatggcggaacactcctcgtcgaactcattaagttcggtgaacaagctcggggtgccggcaggcaagataaggttgctcaccccctccacaaagggattaaggtctacccgagtctcgaaatcaccagggacgaagtggggcgccgcaagggaatactccgaggcaaatgcttcggcggccgcacacttccccttcgccttgactagcggcaaaatagctggctcacgcagagggctcccgaaaaccctcgacgtagccgacacgatccgttcggcagagtccttttgttttagagatcttctgcaccggacctcccttcgccgccttgcccgaggagaacgcaactagggccttcgccccttccaaatccttccgtcgaaggagggagctgttcgactccaccccggtcttgttgtgaccgggacttggggtaggagtgtagccggacgcggtcttcgatcgcctcattcgcggccttatcggccacggcctcctcctcttcctcctctccttcctccttgccgtcgcgttcttcggcatcgtcctcgtcgtcggcgtcggagtccgacgaagcaggaacccttcgcttcctcggggcaagcttcacttgtcctcgcattcgctttcgcgaaggccctgcatcattgtcagctttgtgggggtttgcctgaggaggcaattcgccgttgtaaacccggttcgcccgcccagccgcttgtcgtgttagcaactggctatactcgacgaccgacatatcgccgatcatcctacgggcctcgttttcagcctggtcaagggtcaacgctgcaaaagtaaagtgtgtagctatgttaacagtcagacaaggcaagataacaaagcacagcagtgtatagcaagagaaccgtcttactgtccgtcccctcaggaagaaccaggttcggcaaaccgtcaacctcttcgtcttgatcaactgtgacttgccatgactgggagaggggaaagatgcgaagcatacagaattcctccaccaagtcacggcagctaaggcgggagcaaaccttccgcagcagaatgaaccgcgcctccatagcgccgtccacggcgatcttgggtttctggctaggcgcgatcgccctacgccggcaacggagggctttctccgagtcagtgccagcctcgaaggggatggtgtgatagaatcacctagccatccaatggcagtcccacttcgacatggcagcgttcaccggctagagatcggaccgctcgggacaaacgttaaagttcacgctcccgaacactgtctactttgttccagccggggtaatcaccgtcttcgagttcacggtggcgaaaatatggcactgaagagcttggcgttaggctcaaacccggaagtccggcacgcctagtcaaagatagcgatccgaacaagcaccgacgggctcagctatggaagttccacctagaagaggcgaaggatctccggcaacaacacgttgcagggaaaccgtagccctgcctcaaaaaagacggcgaataccaccgtccgattgtcgataggtttcggcaccacggccttccctggggcgaaagcctgcccctcgaccaatgccccagagctgaccagcttcgccagctcgacgtcgtccacaagagagacccccaaaaaggcggtgctgtcgtcatcgactcggctgggatccagccctttcgctgaagcagggtttggcttgcgaggggccatggcgaacggtgcgtttgtggtggcgaagaaagagaatgggcgaaacgcttgaggggtcaagagatgctgtggaagaaagaaacggaggaagagagcgcatgcggtaaaatggcaagtgtggcggtgaaaatgaaaggtcggtgggaatatatagctcgcccgggcgaccgttcgcctacccaccagcaataaagcgccacgtgtcgcaagggtaggtgaaacggtaacttcccaccattcgagcggcacattgaaaagcccacgaagggaaagcccaatactgttcctttcggctcgggaaaagaaaatatataaaaaatgtatataatatatatatatatatgaatatgccaccaaacgcaggaggcgaagcgcggcaaaataataccagccgcacaaataacaaacttcattcgcagaaataatgtaggtttcggcaggagcatcggtcgaaagggggtgccgcataccataccacacagtttgcacggtctcggccgaagctccaatctcacccttgcccgtgaggggcttgttggcggatggcatgaggcccttcgaccaaatctgccgaaacccatggcgaaggctatggagcaagaacggcgtgaggcgaagagtcgtacaagtgccttgccaggccagaggcgtctcaggcgaagggtgcaaggcgaagactatctaccgaaggaagacgacttcgccttggtaagttcgcccccgcgagggccgaagaaacctttctggcccatcaagcctaggggcaatagggccggcaatcgccagacggccaatcaggggcccatgagcccctatatcatcatgtacccctgtaaatgtccctttcataagggtaatcatgtaaattcccctgtataacctaaaccctagtagtaagaacctgtaatggggctataaatagtcccctagggccatgtaatgggaaaaaaggaaagaagggaaactcaaaatttaattcatccttttggcatggtttgagggggagtttatagctcatggttttatcaagcaataatatgacaatgaaaaaaattgagaaaagagagcttcgtttatgcatatggtattttcttgtgcatgccagcaatactttgaaggtttatttgtctctagcatagcttgtatgtgtcacaccctaaaaattcaaaatttataaatttttgtttaattggaatttttagaaatgattttaaaagcctagaagagaagatctaattttaattaataaattccaatataaaatggggccagataaaatttcattaaatactttgcttaattctataattcctagatttttctgggatttatttgagctaaggaagtatttttaataaatggaattgcatttcatgaataatttaaattgaaaaaggttttaaaaagtcttttttggctttgggccgaaagtcggcccaaaaccctctttctctctccccggcccaagtcggcccagtccgcagccgcagccgcccgcgcgagcgcgctgtcgctgacaggtggggcccgcctgtcggagtcgtcgtcaaccttcggccgccgccgcccgaaaccctagcgtcgagccgccgccgtttccttccaaatccggccgctcctttcccgatccgatgaaattgaaagaggggaaacaatctttgggatctcctccacctttttccgtctggaaacttcggctaaatcggtttggaaatcgttgtctcggattcgttcttcccgaagtttccttcgccgtcgccagccgccgtgggcctttgccgccgcctccgagcccctttaaaaggttccccgagctctgtcacgaccggaaataacccaacgggcattccttacgtgcgtgcattaatccttgtcccaggaggcaaggtacaccaaaagttgatacaattcagagtttaacaagcggaagcgtaattagataacttattacatgggcaacgaaggcccagcacacacagagacaaacgagaaacagcggaagactagggcgacgaccacaggcgcttgacggcaggcacgagctagacaccgaagccttcatcctcctggaactcctcttctggggttgggaaaaattgagcaagactgagtacaaccaccgtactcaacaagacacacccacaagtgcggaataaatgcaagggagtacaaaggagttatactataaaggggttagggttgcagtaaacagcatttaaagatatttagttgctcagggctattttgtaaacacgattctagaactaaacaatattatttatcaaggccgtgaacccacacgaacctgccttaacccaaggcctacgatgattcggaccgaactggcaacccgaccctgggtcccagctcgtcccaagccaacccaggccaaccattccacattttagttgttaagc

SEQ ID NO: 15407 - DNA, 8387 bp, Oryza sativa
tcatcggatgtggcattaaaagcagcaagaaaagacgacttagatgaagaagcatcaacatccaaagaggaagaagaagaaaccaaagcactcgatttagaatcaactttgcgagaaagaacattcatctcatgtgttttcaatttagtataaagtgaatccaaagtcaaagtagacatgttaacagactcctgaatagatgtaactttcatctcccaaatagacatgtcgagaccattcaaaaagtgacgagaaatctcagattgtggataattagcatcgtaagaagaatcaacagatctaagatcactcaaaattttattaaattgagaaagatagtcatccaaagcttctctaggtttcatctcaaatttaatgtactcctttttaaaaagatctcgacgaagctctttaatgttatttgtttcttgatgaaaattactcaaagcaacccaaatctcatgagcagtttgaagattagcaacacaatcataatccgaacgagaaataccactcaaaagaatgttgcgagctttgcaattttgttcaaaagcagttttttcagcagcagtattaatagcttcaggaatcacataagcatgagaaatttttctccaaatatcataatcttaagccataatgtaagattgcatcctactacaccaatgagaaaaatctgttccatcgaaaacatgaggcttaattgaaaacctagcgggagtagccatggcaaaagctctagatcgataaaaatccaaagaagaaaacaaggctctgatatctcttgtaggatcgaatcacaagaactaagccaaccagaggggggtgaatggttggtatacccaaaaaccgaaaacttttagcggaaataaaagttaccctctaaatcgacggaagtcggtctgaccgagattgatctgccggtctgaccgagtagatgctgccggtctgaccggtgttgaacctccgatctgaccgccgaagtcgcctgccgcgcctgtcgccgctgccggtctgaccgcccctatgccgtcggtctgaccgccgcgtgtcgccggtctgaccgctagtgcgccgccggtctgaccaccactcttaaagtggatgacgactttattacttctctctatgttcacaaagtgcaccaacaacactccttacaaaaatttcgacaaaactcgaaaccctaactcaaaactcaattcaattgctctctaaagcgataccgggaagcctcatgcttcccctctatttatacatgaggtaggcagcctaaagccacgaaccaaactcatactaggagtcctaaacaccttaggaaacccactagtacaagaacgaaactttacataaccaatcgtaccaaatttggactccttccaaattcaactccgcatcccatacgcacataataactccatcgtatgccatatggaatctccatcaaccatgtgcatcaactctagccttagtatcccgcatgatctctgaccaccacggacgtcgtcttatcccaagccgactcctggtccatcaccgcaaatactctcccgagacatcgagtcacctacacatggaacaaacaaagaaatcatattccgagaccaagctatcttcaacttgactcattagcagcaaacaatagtattacatacgtatagtatctatctagaagtcataatcatgaaataaactcggatatccaaataaacaacccgaaaccgaaaccgacacagtgtcggccggtcagaccgtgggctggccggtccgaccgctcgatcaccgccgatctgaccggcaaatacagcccggtctgaccggtcacataaaatgacaatcctgcgattcacctgtaattccaatcatctccaaaaccacttcgtgaataaattccaaataacaaaaccaataatctccaatgcccaattgttcatcacagaataataatcaaaagcacctttgattttacagaccctacctaattaacatattaattgcatgtcacatctttcttgaatctggcccactctatataagcttcacttaattgattaatttccttaaccgaatccatcaagaatcaaacggttggcggctgataatttccatcaactaactccaggactctgaagccgatactaactctaggccgatgaagacttgtgggtttatcaaattttgacattaatagtggcatatagtataaagttctctaacagatacactggtggagaaatcgtttgtagtcccggttcgtaacccccctttagtcccggttgtccaaccgggactacgaatccgggactaaagatagcgatctttagtcccgggtgaaataaccgggactaaagatctatgtaccatttttttttatttgcatggccctgtttgctgcatggttgattttatatatatatttatatacatatatatatacatatatatatatatatacatatatatatatatatgcgtatgtatatatgtataaatacatatattacacacatatttataatttaaagcacttaacattttatgtacatatatgttaccagaatatatattaacactaaagtaaatgtacgtatatatataaatatatatatatatatatacatgcatgtatagtacaattcatttgctcgctagctatagctacgacttccacccctggcttaccttcaaaaaaggaaggacccgcgtttccgaaattggtccaatcccgtccgtagtagaattcaccatcgggattaaggacttcttcattgatgaaccccatcagttgttcttgaacagccatgataaaatccttgtgtgggagtttttccctcatgtgaatacgctatcattcgaaaaataatgacatatcaatatatgaaattaataaacaacttaacaaatcgatacgcaatgaaattttgaatggtttatgtatacgtacatcgagctctcgtgtggtgtatatttggtttgataggcagtgggaaaactcgcatatgtagtagccgcataagttagttcccttgtcctgctttgcacactacatgagaaacgatgagagatttaatatactctttatattaactgtaactagagattcaattcaatataattttggatcatgcatgtactcactggaaaatgaaacctccgtccaagtttttatttccaagtcccgcggaccaattgacggaaccgatcccaagccctacatgtgcagttgcaagctatgattaattaaatattacccgagatcaacataatagcaacagagtcccgcgactttggaatagatggcattatattacctgtctatcagttggaagaccttgtcaaaaaccttctcctctttattcattgagtcgtatacagtgactctgcatgcgtccaagtcgaaaaagaacaggacccagtagaatctggaatatgcgtgagatgagataaatattagaatgtacatgtgatatgtatgggaatgaaatttgttcgaacgacaatagaaactcactctgtgttgtacggcaatagtatgaacgtcttgtaatgctgctgcgttaggagatggacgagattgtcctctgtgtctttctcgtacttgtcgagcatttcggtgttgattttccgagggtcgatgaacccagtatcgtaaaccctccgccgtcgggccctttgaatctccattctacaacaatgaaaggaaattattattgcttacatatatgccaggagctaattattgaacgaaacaaatcgaactcaaagatacttacaaaatccatgcgctcagaagagagacgtcgagggcgtcccgatggtacagatcgaagacatccttgaaatggatccatagaacatcttctccttgcaagaagtcggggtttctgatcctcgcgccgaacatctctctaccattggcgctcatttctatgtaccgttcatagaatttgtacatttgtgtcggtagggactgcagctgctcagggctgacaaacggtttaccgagttcaaacttgtatgccacttccgccttcgggattggtgcgcgtccaaccaactgagccatggttagaccggtgtccgaaatgaaatccgttatgccaaagtcttcgccagtcaccaacggctcgaccacttggtgtggttgttctccaagctgaggaactggtttggacttcttgtaataggctttcctaagtgttcggtcatagtccgatagctttaaggcctccttgtttgcggtggacattcccttgaagaaattcttcacgctcgggtcaataggtatcttcttttcaggactccgaggcttgagttgcctcttcacttctcctgccacataagcgtcaagctcctcttgactgcaaccgtacggcggctccttgtttttggtggtgtcaactttggccttcttcgttgcccttgtgctggcaggaggtggagcttggcgagaccttgtcttgggaggtgcaggcggacacggaggaggaggaggcggaggaggcggaggagccggaggagatggtgcaggaggagacggcggagccggaggagatggtgcacgagactccgcttgtcgcctagggaggatgatgtaccgcttgcgccatagtataatggcgtggcttgtgtctcgtagatgcgtctcaccgtctcctccttggtagtccaactcgaggtcctcgtacacggcttccaccagctcaacttcgaccctcgagtatactgctggaatcggcctgcagtggtaagtccctgaaatgtccgttgggatggccattcccgacgccaccttcacgtgatgagaggttatctattagtaatcaacctaagcagcaacttgcggaacgtacgagtcaaaaatcatatattacatcgagcataccttgattgataagttcttgaagggaatatgcagctcacatggtgtccaatgagtgatctcatcaacggggcaggtggtttcgtcctgggtttgcatggcgtccatgctatgtgatactacctgccccgttgaggcgcagctgctacgattgcctgatgggctgaccattggaggaggtatgtacggctggggatcgtgtgaccgatctgctgccatgcgttcatccaccttccgggccacctcctcttgcatgctgagctcgtagctcgataccctgtactcaagatctgcaatcttcgcctcggtatctctcttgctcctcatccgactcctatacgtgtggatgtcctccttgaatcccatcttccagggaatcacgcctttccctcgtgttcgtcctggatgctcaggagtctgtagggcgagtgatagctcgtccttctctctgtcgggtcggaacgtgtcctgagaagaggcttccactgcgtccgttagtcgattcacagcctcgcgtatctgatcgctgaagaccaaggagccatcaactgggctgagcgttccaccgtgagcatagtaccagaacttcgatcgatcaggccacttagcggtggccggatcgatacccctctcaagcaagcttgcctccatctcctcccacttcggcatcgcgacgctatagccgcctgaccccaagtggtgatggtacttcttcttggcggcattttctttgtttctttccatcatcgcctgcccttgttgacctgtcttgtaagcaacaaactcgtcccagtgatcccttagcttcgggaatacgtcgaagttccgtgtctgccccttcaggatgtatttccggtacagatctcccttgcaggtctggaactgttctgccattttcttaagagtccactgtttcactatgttctctgtacccgcagggagtgtgaacgtctcgagcattgtggtccacagcatctctttctctgattccgggacgaagctgtcatcacccccgcgtgcccttgttctgcgccagtacaccttgctgacaggcacgttatccctcacaacccaaccactgtggcgtacaaaattcttggctgcttgtgccggggcactaggtcggccgtctgcgtccacctcagttatgatgtgccgaccctctatcttcttcacggcacctcgttgtccgcgtgccctcttctatccagcggagggatgacttccactagcctcctcctcgttcccctccgcatccctctccacgttcccctcctcgttcccctctgcatccctctccgcgttcccctcctcgttcaagtactgatttggatcctcgttcccctcttcttcgttccagtactggctgcttcccgatgcgattgtatcgtacaatatctgttcctcatcgcgatcagccatctgttcatagaagaaatatttgctaagcgtaatattaacactctactaatcatatatgctaagtctaagtgtcgtgtatttgtacggtatataatcatatatgctaagtctaattaagtttcgaatattacatctctaataatcttatattaaatctctaacactcacatatgctaagtctaattaagtttcgtatattaaacctctaataatcttatattaaatctctaactatctctaacactcaaatatgctaagtctaataatctaataatctctaacactcacatatgctaactctaataatctaataatcttatattagaaatctaacaatcttatattatatctctaacaatcacatctttacatcacttgcctgcgcgaattccttcgagggctagctaccacttcggtttgagggacgacgacgacgacgtcttctctgcaacatgcaaaaaaatgtattagtctaaatgcaaaggaacatataatgtatttcacgtttccaagtatatataatcatatatatatatgctaagttcaacaatagtttaattatctcgttcgtacacatttcgctcgcgttcgttctcacacttttagttcaagtgcattcatgttcattaacgtttcaatcacgttcgtttgcgtttcattcacgttcgttcgcgttcattcactaacactcacgttcgttcacgtttcagtcacgttcgttcacgtttcagttacgttcgttcgcgttcgttaagcgttcgttcgcattcgttcatgttcgttcgcgttcgttcgcatttggtcacgttcgttaagcgttcgttcgcggcggtgggggcacggtccggcgccgtgggccggccccgcggcgtgggggcggcggctgcgtggcagcagcggcatcgtctcgcggcagtgggggcgcggtccggcggcgtgggagcctggcggcgtgggggcgcggcggcagcatgggggcccggcggcgtacatcggcgtcggcttcgtcggcgttcgtcggcgaaagagagagaggcagagagctacatcgagatagagagagagagagagggcgggggctctcacccaagagacgcggtggcggcgtctgcggcggaggcggcgaggaccgccaggcgacggtgagagatgacggcggcgtcggcgcgtggttgccctaggcagtggcggcgaaggagaagccgatgctcgatctcgatggaaaaacgtctaagtgttggtggagaagacgagggcgcaccgggaatatatatacccccggatctttactcccggttcttctcaccaaccgggagtaaagatattttcccgctatttccaaattcttttttaaacccggttagggttaagaaccgggactaaagttaatagcactgaatattgaatttcgttgcatatatgtttctaaaatagtaaataatgctttaaaaattctaatcaagatatgtaaatcccacatgcatgatttaaaacttttaaaaattataataatcatatataattagcatatgcatgatattaaattgttaaaaattgtaactaacatatgtaaatcccacatgcatgattcaaaacttttaaaaattctaataatcgtatataattagtatatgcatgatattaaattgttaaaaattgtaattaatcatatataactagcatattcaatacatccaaaatagtttacaacaattacggcaatagatcggcggtgacggttgtccgcacgtactttctcctcactattgttccttccttgtgatcgctacgtaagtaaggggtgtcttcgtttgataggaggatgctagggtcaaccgtcaccgtgaaagggggttgcccattgtcacaccctgaaaattcaaaatatataaattgttgtttaaatggaatttttagaatttattttaaaagcctagaagagaagatctaacttttaattaataaattccaatataaaatggggccagataaaatttcattaaatactttgcttaattctataattcctagatttttctgggatttatttgagctaaggaagtatttttaataaatggaattg

SEQ ID NO: 15408 - DNA, 7967 bp, Oryza sativa
tcgcttgtacagaggagtggttcctggagcaagatctatccggaactcaatctctcgcttgggtggcataccgggtagttcttccggaaacacgtctccgaattctctgacgatggggatttctgacagtcctatctgatgaagttctgagctactgacagaggttgggggtgcaaagaaaacaaccggttgttccggccctcggtacagagtgacagtgcgtctcacgcaatccactactccttggaattgagccaaccaattcatcccaaggatcacatccaagttcttggtgtctagaagaatcagatccgagggaaaaaggaatcccctgaatttctatagggacggcaggactataatactttgctgtcataacccctccaggggtggtgatgaggagagggttcctaagcctttctacccccaactgatttctccccacgaatggcacagatataaacgagtgggaagctccagagtcgaacaaaatggtagcagggatggaatgaatgaggaacgtaccaacgatgacgtctggagttgtcagcacgtcctcggccgtcacgtcgttcacccgaccccgaatgacatccttaccactgttgctggagcggggaggcgcttggccttgctggcgccgcggttttgggcatttgtccgcaaagtgccccagctcgaagcagttgaagcacagacgctgcggaccttgaacgtccttgcggccttgaccagactgcgcggctggcgtaggaggacggggcgcacgggtcccttgctggctctgctgttgctgcggctgtgggacgcgcaccacgaattgaggtcagggcgcggagcgtggttgctgctgctgttgttgctgctgcaaggaggatccccctgaatagggattggtgtagcggatcctttggttagctccctgttgattgcggaaattcgccaagcggcgcttgtgcgactccagttccttgtgcttggcttccaagcggatgctcttgtccaccagacgttggaaatccggatagtcaccggagactagacggacggacagctcaggatccattcctgccaagaacttctcctgcttttcctcatcttcccgtacatcctccggggcgtaccgggccaggttgttgaactcatgcaaatactccatcacggagcggttcccttgcttcaactctcggaattcccttttctcaagggccatgactccggcgggcacatgggtccttcggaaagcggcggtgaagcgggcccaagtaataggctgcccctctggctgcgtagcctggaaatggtcccaccatagagatgcgggcccctgcagttggtgggcggcgaagacgactttctcctcatcgctgcactgcacggtgtctagctttttccccacagcatgcaaccaatccaacgcatccacggggttgttggagctagagaaggtaggtggacggatgcggaggaactcggcgagtttagagtgttgtgggggtggtggtggagcattctgttgtggcggattttggatgtggtggaggaaagcagccatcatgttggcctgctgggcaaggatttgggtgagaatggcgttggtgtctggtggtggtggtggaggcggaggaggaggtggaggtgggctgccatggttgttgtggttgctgccctctggttggttgccatcaccgatattagcacttctcctggtcgtcaccatctgaaaaccccacacagaaccagcaaacagagagagctgactattaaaactaaccacccacgactaccataattcttgaatttattactgctattaaattggttcattaaagtttaagttgcttaagcaaataaaataaagacaggctccgacacagttataccacacaccggcataaccatgccccacacgactccaacaagaagacaaacgagaaagaacacacgcgcaagcctactaactgctcgtctaccgctgcgacgggccaggacggaaggtgagcaacagcgcatcctccgtgctaccaacgccggaggcttccccctcctgaggaaccacgggcgcgggcttggcacgaggggtctcaacgaagcaagtacacgccagggactgacgaacaagctcgggcctggaggtgctcttgcgggcggtgatcttctggctgcggcagacgcggcggcgcttggggcgacagacctctccctaggcgatcttgagctgatgcagttgcgcctccactgcgtctaggtcctttttcagctgcagattctcttgacgcagctccaggatcttcatgttgttctcgaccatcccacggcgcaccatctgatggaagtcgatacgagccgcgtcgtatggctccaccatgcgcgccaggtgcatgatggtagcgtcatcctccgagctagcatcccggaaggtggcgtagtcgcgggctcctccgcgacgagggtggtagcggtagggcgagtgctgcaactcgtccgggtaacgctggtgaagagtgccgatagcgaggagagcggcgttctggcaagcggcggaaaaagaatctccacccgcggtgactgccaacgaagtcctctcgggtgagccggtgaggatcactgcagtaacctcccaagcagcgtggggctctgcatcgtcaccctcctgctctgggagcggcctgccctggtagtccactccatgcggataccccaggacaacgcacatgccccgcagctccaagacgaaaccagtcaggtccagaccacgacggctgatgctgccggccatctacaaacaaaaacaaaaagagaagcaacatttaaatctggaccacgacggctgatgctgccggccatctacaaacaaaaacaaaaagagaagcaacatttaaaagtcagattttggcgataaatgaagcagcaggacagagagagactagaggattttcacaaataagaaaggatttttatttttgaaaatattgctaaggcttgggatctaaggctcgtactagggtcaagggggctctgataccaacttgtcacgaccggaattaacccaacgggcgttccttacgtgcgtgtgttattccttgtcccaggaggcaaggtacaccaagagttgatacatttcagagtttatcaagcggaagcgtaaatagataatttattacatgggcagcgaaggcccagcacacacaaagacaaacgagaaacagcggaagactagggcgacgaccacaggcgcttgacggcaggcacgagctagacaccaaagccttcatcttccagagactcctcttctgggtttgggaagaattgagcaagactgagtacaaccaccgtactcaacaagacacacccacaagtgcataataaatgcaagggagtacaagggagttgtaatataaagggttagggttgcagtaaacagcatttaaagatacttagttgctcaaagctattttgtaaacacgattctagaactatacaatattatttatcaaggccgtgaacccacacgaacctgccttaacccaaggcctacgatgattcagaccgaactggcaacccgaccctgggtcccagctcgtcccaagccaacccaggccaaccattccacattttagttgttaagcaggttttaagaattaaaacactaacttgggtacattgctcggcttgcccataaccgagggcgcggctattcgaatagattttactctgatcagaggtgtacatctttacccacaagacacatctccctcacgtgtaaccacgtgccacataccaccacggtatacagacggaagacgtgacatagtttccaacccatcctagccatagacaagagtaccgacccaatcccgcctacggccggaacccccgggacaggcaggcaggactgagcccctagcagcaggacaccggccctgtgccatgacatctcgactaccgggccgcagctcgtgtagccttcatttgccctggagaatgtccatcgacccccgacttcatccacctccatccgtgtacttttgtttataactagactgagccacaaactaagccttacccactagacatgtggaagtacggtagtgctttgcaacagaggcccgaagaccggtccttatatggccgaggtgctactatcaaaaccatgcaccccgagcccagcctaaaaccatttttggggattttgaatagagggggcggtgtgaatccaattccacaatactccaacaactccacagtgtccaggtgatatgaacattcccaaagtctagagttgtaaaaccgcctaatgttacctaattaaaagcgaagcatctacctataatcgtactagtggtaccatgagtagagtgtccactagttggggttttgtttattctagggtgaacaaggtaataataacaataacaataataaggtcataacaaaggtaaataggcatggctaaataaaacagtgataacgcgggaatttaaataaagcgataatgcaataatttaaatcaacataattttacaaactgggattcaatatgttcaaagatgatgtgacttgccttgctcgctttcccaaacgccggcttcaacttccacgaagagcggatcttccgaagctgcagcgtctacacgaccaacagaaaagaaaaggcttttactctaataaactccatataacaagcagaacaaagcataaaaatgggttcttgacttcttaaggaaaaattagagacttgaacggtccaattccgagttcaaatggccaagttatggccatttgaaggttatatgctctttaaatgaatatttgcgaatttcttcatttaaattttaatttaaaatggatttattgcgtcagccgaggggaggggcgcgcggaccgggtccacgggggtggggcccacgtggcagccccacggcccacggtggaccgggcgcacccgggctcgcaccggccggcgccgtgggtcccacgcgtcagccgcacctaagggcgcgggcggctgacagccgggccccacacggcagccgcggggcgcgcccgaaggcggccacgccggcacagccgacgggaggcggcgcgcccgcgcccctatggtcgccggcggcggccataggcacggcggagcggcggccgagagaggggagggaagggggaaacgaatcggcggtccacggctcaccccggttcgacggcgacgacgggaacggcgaccggagcggaggaaggcggcggcgcggctcgggtggacgaggtcgccggggatgcggtgaagccgaaggtggcgacgccgaggcgggaggtggtccggggcgacgacggcggcggaccggagctcggcggtgacggcggagagagagagcgacggcgcgagctcgattccgacggggagagagggcggcgagtggcggaaacggtggagggaggcacggggagggtttatatagggttaagaaagggagggggtggccggaggagggggaaatgggcgcgggagatccggccgccattgatggcgccggcgaggttaggggagaggtttccaaacgaatccgagggagagagggagggaaaaatggggggaaagatggagggaatcacggggaatatttccccccactttattgcgcgcgtggacggcgggaggcggcgggatttgcggcggcggcggcgctagggcacgggcgaggcggcgggagcggcgggaggaaggggatgacgggtgggccccacccgtcagcgagggtggcgggcgggcccgcccgtcagcggcgcgcgctggggaggccggatgggccgtgggggagaggagagagagggagagagatgggccgagccggcccaagagggggaggggggaaaaggactttttagggtttttctttttataaaatcattttaactttgtttatttcttcttaattattatttgtgctctgaaaattccactaaaatttatttacgcattttaggcttttaggaaatatacaaaaatcctccaagccttatttgacttttaactttgcacattttaattgttggaggctttcacatggattttaattattctaggcataattttgaggatgtattttagagtcattttgggacgcgacacgtggcatataacactatttaatgacatctaataatctaagcgcctctcttaattacattactaaatactactccagagtgctgcagctgacatagagcaatcatggaaatgattattaaacccacaccattgcatatctctggtaagctagctacataataatatcgagacaagtacaagctaaagtctgcactcgaataattatataaatgaagtaagggaccgaaactatataaataagaatatttaattaatgtgtaaagtcttacaaaagatggaaaatctactagccatacccgaaatctcctagagacttgaagaactgaagaaactattctactcctccactagtgctagaacaacgtaaataaactagagagctcttggaatgatccttcttggtgtactttggaatggagggagtgaagtccttaaatatgctgccaaagacggttatggcagctgaaaatgtcagaaatgccccgcaactgtcattggggaatgatcaggagtgtccatgtggaaggccaggatgagaggccgcagtcagggttcggcggaacctgggctggccactgccctctagcctgctgcttcctcctgggcctcctctgatgactccttagcacagtgatatagttgttgggcccttttgcagatgtttaatatagtttataggcccatccagccacaagtctgccacttgacggacgccgattgattgttcggttattttccatctattctcctccatttatgtgaagatctatgtattcaaaattcctagtacaagtggagatagattatttctaataaaatgtgcattgcaagtatctcctttattctggataaattgacggtcgaaattggtctataacatctgtcaacacctatacatgccccttatggtctatttataggctcaggactggatcacgtaaccttaggatttctatgctcaagggaatttacatgactacccatgtgatagggacatatacatgggtaaggaataagttcaccgaaggtccctcaacataacagtgaaattttttaaggtcccttaaccccaaaaccagaaatggatgcacctaaactcacacaaaccgtgcataaaaggtccgaaggtagtatatatgggtggtttcgctgacgtggcatcctagtcagcaaaaaaaattaaaaaatttacatgggcccacatgtcagctgcacatattttttcttctcttttcttctcctctcttctcttttctctcttctcttcttcagggcaatggcgggtggagagacgatgggcatgcgcagatgcaggcggtgggcgagcgctgtggcggagcatggcgacagagcagcgaagcggtggcaggctgcggcggagtagacggcgggcgagcgccgcggcagaacgcagcggcagagcagcgaagcggcgccgggctgcgggcagagccgacagcgggcgaggcggtggaggaggcggcgctgggcaggggtgcctggggtggcagagtcgagggcggagtcgtcagagtcgatgtgggagaagagggcgtgggagatggcgatgtccgatgtggacgtggaagaggagggagagcgggaggacgaaggcggcggcaatgcgggcgaagagcggcaagtgggcgcacatgatggacgctgcatcccggtagatccccaccacgcccaggaactagagcactgtcacaccctgaaaattcaaaatatataaattgttgtttaaatggaatttttagaatttattttaaaagcctagaagggaagatctaatttttaataataaattccaatataaaatggggccagccaaaatttcatt

SEQ ID NO: 15409 - DNA, 4357 bp, Oryza sativa
cgcgggggagaggagagagagggagggagctgggccgagccggcccaagaagggaagggggggaaagaagacttttagggatttttctttttataaaacgattttaactttgtttatttcttctcaattattatttgtgctctgaaaattccactaaaatttatttacgcattttaggcttttaggaaatatacaaaaatcctccaagccttatttgacttttagctttgcacattttaattgttggaggctttcacatggattttacttattctatgcacaatttcgaggatgtattttagagtcgatttgggacgcgacaaacctacccccccttaaacggaatctcgaccccgagattcggaagaactggcgaagagatcaggatgggctgccttcagctcgtcttcacgctcccaagtagcttcttcttcggcgtggttgctccactggaccttgcaaaaacggattacccggttcctggtcctgcgctccatggtgtccaggatcttcactggcctctccacgtaggtcaagtcttcgcgaacttcaatttgctctgagtcggcctgctcggatggcactcgaaggcatttcttgagttgcgacacatggaacacatcatgcacgttgcccaaggaggcgggcagctccaattggtaagcgacttctccgcgtcgagcaacgatacggaaaggacccacataccgaggtgcgagcttcccttttgtccgaaacctgtgtacacctcgcaatggcgtgacccgaagatatacaaaatcgtccactgcgaattccagatcacggcgacggttatctgcataacttttctgccgggactgtgccacctttagattatcccgaatggttctgactttagcttcagcttctctcaggatatcagtcccgaacacttggctttccccaacttgatcccacattagcggtgtccggcatttgcgcccatacaacgcttcataaggtgccatttgtatgctggcttgatagctgttgttgtaggagaactcggcataggggagactcttatcccaggtcttcccgaaatctagaacacatgcgcggagcatatcttctaggatctgatttagacgctcggtctgcccatctgtctgcgggtgatacgcggtgctaaagtttaatcgggtacccagctcttcttggagcttcttccaaaagtgagaggtgaattggcttcccctatcagatacgattttcttaggaacgccatggagacttacgatcctagcgaagtagagttcggctagtttgttccctccataggtggtcttcacaggaatgaatcgagctaccttggttaatcgatccacaactacccatatagaatcatatccaccttgggtttttggaagtccggtgatgaaatccatcccaatttcatcccatttccattcaggtacttggagaggttggagaagtccggccggtcgttggtgctctgccttgacacactggcacacatcacaaagggccacgaactctgcaatttcccgcttcatactaatccaccagtatttctccttcaagtctaagtacatcttcgtgctgccagggtggatggaataaggactttcgtgagcttcctgaagtatcagctgtttaagttctctgttaactggaacgcatactcgatttccgttccatagggttccgtgttcatcctctgtgaaaccagcggctttaccctgtttcatattcttgaggagtccatgcatgtctggatcattcttctgagcctcgcggatttgatcgagcaaggtgggcttggcttccagcgcagccaagaatccgcgactaactatgcttaggttcagggcttccatctgttgattaagttcgggtggaacgccacggacgttaagagtgttgcaatggctttttcgacttagagcgtcggcaaccacgttggccttaccaggatgatagtgaattcccacatcataatccttgatgagttctaaccatctcctttgccgaagattcaggtccgactgagtgaagatgtatttcaaactcttatgatcagtatatatttcacagcgattcccaatgagatagtgccgccagatttttagagcatgaaccaccgcggctaactccaaatcatgggtagggtaattgccttcatgaggccgtagctggcgtgaggcataggccaccacatgaccgtcctgcataagcacgcaccccaatccttggcgcgaagcgtcacaatacaccatgaaatccttgcgagtatccggcaagattaacactggcgaggaaaccagcttttctttgagagttttgaacgtcttctcgcattgcgggctccacacaaatttctcttctttcttcaacaactgtgtcatgggtcgagcgattttggagaagttctcgatgaatctccggtagtatcctgccaaacctaagaaactgcggacttgagtgactgtcttgggttgcttccaatcagtgacggcggtcactgtttcggggtccacagcaactcctttagcagatatcacgtgccctaagaatttgacttcggacaaccagaactcacacttgctaagtttggcatacaattgatgttcccgcaactttcccaacaccagacggagatggtgctgatggtcttcctctgattgtgagtatatcaggatgtcatcaataaaaaccaccacaaacttatccaagtattccatgaacactttgttcattaagttcatgaagaaggcaggtgcattggttaaaccgaatgacttcaccgtgaattcatacagtctgtatcgcgtggtgaatgcggtcttcggaatatcttcttcacgaatgcgcaattggtgatatccggaacgaagatcaatcttggagaatacagtggcacctttaagctgatcgaacagatcatcgattcggggaagaggatacttgtttttgatggtgacttcattgagagctctgtagtcaacgcacatccttttcgtcttgtctttcttctccacaaaaatcacaggagcaccccagggggaagtactcggacggatataccccttttctttcagctcttccaactgttccttgacttcggccagttcatttgctgccatacggtagggtcgcttgtacagaggagcggttcctggagcaagatctatccggaactcaacctctcgcttaggcggcataccaggtagttcttccggaaacacgtctccgaactctctgacgatgggaatttctgacagtcctatctgatgaagttctgaacttctgactgaggttgggggtgcaaagaaaacaaccggttgttccggccctcggtacagagtgacagtgcgtctcgcgcaatccactactccttggaattgagccaaccaattcatctcaaggatcacatccaagttcttggtgtctagcagaatcagatccgagggaaaaggaatcccctgaatttctatagggacggcagggctataatactttgctgtcataacccctccaggggtggtgatgagcagagggttcctaagcctttctacccccaactgatttctccccacgaatggcacagatataaacgagtgggaagctccagagtcgaacaaaatggtagcagggatggaatgaatgaggaacgtaccaacgatgacgtctggagttgtcagcacgtcctcggccgtcacatggttcacacgaccccgaatgacgtccttaccaccgttgttggggcggggaggcgcttggccttgctgatgccttggcttcgggcatttatccgcaaagtgcccgggctcgaagcagttgaagcacagacgctgcggaccttgagcgtccctgcggccttgaccaggctgcacagtcggtggaggaggacggggcgcacgagtcccttgttgattcgtctgctgctgcggctgtgggacgcgcaccacgaattgaggtcgaggcgcggagcgaggttgctgctgctgctgttgctgctgcgaggaggatccccctggatagggattggtgtagcggaccctttggttagcaccctgttggttgcggaaattcgccaagcggcgcttgtgcgactccagttccttgtgcttggcttccaagcggatgctcttgtccaccagacgttggaaatccggataatccccggagactagacggacggacagctcagggtccattcctgccaggaacttctcttgcttctcctcatcttcccacacatcctccggagcgtaacgggccaggttgttgaactcgtgcaaatactccatcacggagcggttgccttgcttcaactctcggaattcccttttcttaagggccacgactccgg

SEQ ID NO: 15410 - DNA, 6340 bp, Oryza sativa
aatggtcccaccatagagatgcgggtccctgtagctggtgggccggcgaagatgactttctcctcatcgctgcactgcacagtgtctactttttccccacggcatgcaaccaatccaacgcatccacggggttgttggagctagagaaggtaggtgggcggatgcggagaaactcggcgagtttagagtgttggggaggtggtggtggagcattaagttgtggcggattttggaggtggtggaggaaagcagtcatcatgttggcctgctgggcgaggatttgggtgagaatggcgttggtgtctggtggtggtggtggaggcggaggaggaggtatttgtcacatcctgattttcgtttcaggatttataaattatttaataaattaataatagaatttatattaaatgttcattaatttacaagtgaagttaaatgtgggaaataaaatttcctaaatataaagcatggatggatttaatttttattaaattctccatgattaagtcaactctctggaattttctcagattttttcggagctcaattcctaatttttaatcatacaaagagcatttcagtaattacccacatattaaattaatcattaaatggtctaattataattttgttaagtactttgagtgtccaagtatgttcaagatttttcttggaattatttgagcattggaagtatttttaacaattcaaagatcatttcattgattaatttaattggaaaagtaataataatcctcttcctagtcttgggccctttccggcccatcccccctcttttgtgtgcacagccgtgcagccctagtcggcccagccgagtttcccccttctctttctttctttgctttgttttcagccagcccaagacgaaaagtctaatttgcctccctcaacactgtttatcttctacctctagcagccgaactgagaccgatttggctcggtttttctcctccaaatctgatctttccccttgtgtttttctaaaattagttgaggggaaatattcctcttatcctcctctatctttacccccaaaaatcggagcaagttgagtatcttatccgaatcgaactcgttttcgagtttatctccaaaaccgagtttttgatttttccggatcgatttcttgtgggaggagtccgatctcttcaatccaaggctataaataggaccccctagtcctcctctttcgtttgccccctctcccgtggtctcccgtgcctcgtagcgccgccgccacgtgctccaccccgccgtcgtcgccggccgagctccatccgcgtcgcgccgccgcctccgtcgtcgccgccggtcgctgtcaccgccgtaaggtgcgccgaggtgtggagaagcccggccgcctgacccccgaagccgcaggtcaccggagccccgtcaccgccgtcgaccgaagccgcgccgccaacagacctcgtcgccggccgtcgtcgttcgtcgttttgttcgagggtgagtaccgttgggttcgtctcgtcgtcctctacgtgttcatgtcctccaaagtcgcagccgaccatccaatctccggcgaggtcgccatcttggtccggccattgatgaggtcatcatgacgtcatcatcgtttttctttttcctgtttttctaatagattaaatcttcgaaaattcataactaaatcatcgtaactcggttttgagtggttcaagttgctaaattcatctaaaatcatgatctacatgtttgtttactttatatgtactgtttatttggtttttattagtctttttcttcgttttgcgtgttagcttgtcgtttccgtcgttgcgaaggttcgtgagtgcgtcaggagtgttcagaagattaattgaagaccgattattgcaaggcaagtcacacagatcctaaacacaatcctttgagcatgttgatcctatatttaaattctctatttatttcaactgtgcatttattttcgaatgtcaccgggtggtgtgaacttattcctttgttatggccaatttgcattgattactttattccttgataccttgggttattataacttgactagttgggctttatatattggttcagctagatattagttatgattgcttagccatgcttagaaacattagcacactattgggataacttatgactcactattatttaaggatggcttaatgatagttcacgatggttaatcgtgattggttaattaattacttgccaactaaaacttgataatggtgggttgtgagcacatggttttgagagtcgtgctcatgacaattaaggaccggttcgcgagctactgttgtgaaacatttatcgtgccaaccacaagccagcgtgggcaacggctttatcttttgtgtagcgtgattcattatagtgcgccagactgagaagtggcgagaagtccacgggggtcgctggggagtccatgccttgtttataagggggtgattatgatccaggaaaggtgcgctgtaatgggttatgttgtgcaaggggtattgtcacaactcctttccgaggtaccgtggtggtattgaggcacatggtgacatgatgtggggttgtgtcttgtgggtacagtggtacatctctggccagagtaaaactattcgaatagccgtgcccgcggttatgggcgggttgagcaatgtttttcgtgattagtctcacacctctcacaataattatggatgttatacctggtaataatttgcttagctcctggtttggagttagatctgtacagccgggtatggttgttcaggatggttgggcctgtgcagcatgagtgtgctgttcagtgttgattaaaatttttaattaattactctactgttttactactcttaactctttgctaaatgctgctttcgcaaatgagcctatattatgccatcctttggtatccttgtgcacttgcatatttgctgtgtggcttgttgagtatgtcatatgctcattcttgcaataatcaatcaaacctcagttgaagataaaggatccagaaggagaagacgtttggcttataccccagttgagctgcctgtgggagtggagctgaagccatcgctagaccgttaattccgccgctgttttcttttctttgtaagtatgtaacgttattattaagatggatttgtatattaaaattgtcagtttgtgtacctcggctgattcctggacgaggattttatgcacaaataagttcggaaattactagtgaatttccgggcgtgacagtggaggtgggttgccctgatggttgtggttgctgccttcaggttggttgccatcaccggtggcagcatttctcctggtcgtcaccatctgaaaaccccacacagaaccaacaaacagagagagctgacaattaaagctaaccacccacgactaccataattcttaaatttattactgctattaaattggttcattaaggttcaagttgcttaggcgaataaataaagacaggctccgacacagttacaccacacaccagcataactgtgccctacacaacccaacaagaagacaaacgagaaagaacacacgcgcaagcctactaactgctcgtctactgctgcgacgggccaggacggaaggtgagcaacagcgcatcctccgtgctaccaacgccggaggcttccccctcctggggaaccacgggcgcaggctcggcacgaggggcctccacgaagcaagtccacgccagggactgacgaacaagctcgggcctggaggtgctcttgcgggcagtgatcttcagactgcggcagacacggcggcgcttggggcggcagatctctccctgggcgatcttgagctgatgcagctgcgcctccactgcgtccaggtccttcttgagctgcaggttctcttgacgcagctccaggatcttcaggttgttctcgaccatcccacggcgcaccatctgatggaagtcgatacgagccgcgtcgtacgcctccaccatacgcgccaagtgcacgatggtagcgtcatcctccgagctagcatcccggaaggtggcgtggtcgcgggctcctccgcgacgagggtggtagcggtagggcgagtgctgcaactcgtccgggtagcgctggtgaagagtgccgatggcgaggagagcggcgctctggcaagcggcggggaaggagtctccaccagcggtgactgtcagcgaagtccgctcgggagagccagcgaggatcactgcagtgacctcccaagcagcgtggggctccgcatcgtcaccctcctgctccggaagcggcctggcctggtagtccactccgtgtggataccccagggccacgcacatgccccgcagctccaagaagaaaccagtcatgtccaaaccacgacgggtgacgctgccggccatctacaaacaaaaacaaaaagaaaagcaacattttaaaggtcagattttggcgataaatgaagcagcaagacagagagagactagaggattttcacaaatacaaaggatttttatttcgaaaatattgctaaggcttgggatctacggctcgtcctagggtcaagggggctctgataccaacttgtcacgaccggaaataacccaacgggcattccttacgtgcgtgcattaatccttgtcccaggaggcaaggtacaccaaaagttgatacaattcagagtttaacaagcggaagcgtaattagataacttattacatgggcaacgaaggcccagcacacacagagacaaacgagaaacagcggaagactagggcgacgaccacaggcgcttgacggcaggcacgagctagacaccgaagccttcatcctcctggaactcctcttctggggttgggaaaaattgagcaagactgagtacaaccaccgtactcaacaagacacacccacaagtgcggaataaatgcaagggagtacaaaggagttatactataaaggggttagggttgcagtaaacagcatttaaagatatttagttgctcagggctattttgtaaacacgattctagaactaaacaatattatttatcaaggccgtgaacccacacgaacctgccttaacccaaggcctacgatgattcggaccgaactggcaacccgaccctgggtcccagctcgtcccaagccaacccaggccaaccattccacattttagttgttaagcaggttttaagaattaaaacactaacttgggtacattgctcggcttgcccataaccgagggcgcggctattcgaatagattttactctgatcagaggtgtacatctttactcacaagacacatctccctcacgtgtaaccacgtgccacataccaccacggtatacagacggaagacgtgacatagtttccaacccatcctagccatagacaagagtaccgacccaatcccgcctatggccggaacccccgggacaggcaggcaggactgagcccctagcagcaggacaccggccctgtgccatgacatctcgactaccgggccgcagctcgtgtagccttcatttgccctggagaatgtccatcgacccccgacttcatccacctccatccgtgtacttttgtttataactagactgagccacaaactaagccttacccactagacatgtggaagtacggtagtgctttgcaacagaggcccgaagaccggtccttatatggccgaggtgctactatcaaaaccatttttggggattttgaatagagggggcggtgtgaatccaattccacaatactccaacaactccacagtgtccaggtgatatgaacattcccaaagtctagagttgtaaaaccgcctaatgttacctaattaaaagcgaagcatctacctataatcgtactagtggtaccatgagtagagtgcccactagttggggttttgtttattctagggtgaacaaggtaataataacaataacaataataaggtcataacaaaggtaaataggcatggctaaataaaacagtgataacgcgggaatttaaataaagcgataatgcaataatttaaatcaacataattttacaaactgggattcaatatgttcaaagatgatgtgacttgccttgcttgctttcccaaacaccggcttcaacttccacgaagagcggatcttccgaagctgcagcgtctacacgaccaacggaaaagaaaaggcttttactctactaaactccatataaccagcagaaacaaagcacaaaaatgggttcttgacttcttaaggaaaaattagagacttgaacggtccaattccgagttcaaatggccaagttatggccatttgaagtttatatgctctt

SEQ ID NO: 15411 - DNA, 694 bp, Oryza sativa
cgcgtgggacccacggcgccggccggtgcgagccagggtgcgcccggtccaccgtgggccgtggggctgccgcgtgggccccacccccgtggaaccagtccgcgcgcccctcccctcggctgacgcaataaatccattttaaattaaaatttaaataaagaaattcgcaaatattcatttaaagattaaatcggattaaaacacttaaattgattttaattgaattatgacgcaataatgaattatttttgaaaaggaaaaggaggattattgcgtcagcgggctagggttttggtggaccgggcgcacgggcgacggctcacgcgaacggacggccgagatcgacttgatccaaaacggacggccgagatcgaacggtccacgaccggctcacagcgaacggccccgatgacgtcggcgatgacgtcaccactggcggcggcggctcggcggctcgggtttgcacgctcgccggcgaacgacggcacggcggcgcgaacggaaggcaccaacgggtagagcgcgacgcggcgaactcaccggtgaccaaaagagcggcggaagatcaacggacggcgacggcaacgaggaggaagcggcggcaaacttcgggtcgacggcggcgacggtgctccggcggtcttcggcggcggcgaaagagcggacgagaacggcggcgacttggcgatcacga

SEQ ID NO: 15412 - DNA, 19623 bp, Oryza sativa
actttgtctttgtcctacgtggcagtgacatggactggaagtaaaatgtaaatttttaaaaaatgtgggtcccacatgtctgtcatacaaaacataaaattagtggggcccacatatcagtcaaacaaaacacaaaaaaggtgaggcccacatgtcagtgggtcccacatgagcaggtggaggagatgccatggggagacacccctgatttccagctgcatgtagccgaggaatgttagaaggggtcggagagacttctacaggttgtcgagcacaatctcggcggtagacttgatcggggatgtttccggcgggaagaacaggtcgtggatcttcacaaggacgaagaagggtatatggttctccaggaggtagaacacgtcacggatgtgctcgatgttgtcctgcgcgcacatctcgccgccggaggagctgcttcctcccccgaatctgccgataccaaagcaatggaggatgtagaacccatcgaccaacaacagtttcgacggcgtcaggtcgtcgaacttattggcgccgtctgcgtagtatctcctcacttcggcaaggaagttggcggcggcgatctcacccaggtagcggtgcagcgtggaccgctgctcctgctcgtcgccggggagggcgccgtggagcgccgcaagcttcacgggttccatccgctggtcgggattgcggtggtaggggccgacgaggatcgagtcttgggtgtactgggaactgtcgacgttgcgaatgcctctcttcaccattgagatgtggtactctgaagaagggacgattcccttaaccttcaaatcaaattgcgcatgctctcgtacaaaccctcaaccaatgccttcatgtcgatgattgtttgcggattggggtttcctgcaaatcaaattaaaagagcccgttgctaccattttagaccagagaggcagagactatctaatgatatttacttatatactatttacatcgtcagatttttttctttttcacaataatattattgaacgtctacaaattatatggtaaactattatatatacaacaaattaacgcttggacacactgagagataagagttagcacgggcattttaaaattgaacaagtgaatgttattttcaaccctcccaccccctccccccctcccccgggcttaaccatagaagtcaaaagttcatcatgtacaaacgtagacgctcatagcgcgtcatgttaattatagccacaagtcatgctttttgttccttgcgtaatttctgtgcatatgttttcaggcatatcattaacatctgatataaccacaacgtcattcattttatcataagaccacatataaaaaaatataaattccttttggaatactatactttgttggattatcacagtacatatttttaggatgtgtcactattttagtaaaactagatatgtatcctgcgctattgcacagaccctgctatttttctaaatgttaaattgttttttggtaactaaaatttattagtaattacatatttatatccgatacgattttttatatataaggcaatcatacgtcatttaataaatccatcgaggcttgcttgcaggggaagaattggagttcttgtttgcatgcatcaagtttaatatatactactaaaattgagatcttagataatacaaactaattattatttgaaatttgttttttcaatgttttccttagcgactagcgcatgtctcatggctgatagtggtacctaattggttgttcataacattaatatcaattccaataattttaactagatatggagctcctcggcccttttcaaataaagatgatactaataataatatatagatatacaaagttcaaaaaaggtttagtcatcacaaattagttgtcaagggattccattgttgtcatgtgttggtggctcgttgtgatctttgctggactcatgtagtattgtggttggttgactagaaacctaatgcaacttgaccctagtcatcgtcttctacaaccctactctccttgtgacggcttaatacaagcttgcacgatacctgtatgttttttttttctcataacacacttgtaagacttcttttccctcagtatgatggtctagctataacatgggaaaacacatacaaattaagccatataaattatccgacaggaaatttcatacaagttaagtgtttgttattctacctttttaaagaatatatagtgttattatctcaaatttattaacggctttaagaaatttagtaggagggttatatagcaacgtttaatgtgtttaaaaattaataatttataactattgcaaataaagttatatagggtgatataatcattgttgtcaatcatcatatatataacttcgtatacctacataactaagccgtgccggggaaaattgaaccaaagtgatagtcgaaaaagttactatgccattataaaattgtaataagcaaaaatatcaaaacaactttcaagtgttcttacttttatttattatgaatatttttttaatatataacttcaatcctctcttaggtccaatctgttcggtcatatcgggctcggtgattgctatacaattatacaatatattttattaattgatttgtactttttatgatcgattgttttgatggcatgcacatagctagaatataactcgagtaacacatttttacaacttaaaacatagttaatatggatattaaattattaatttttttatctcatctaaccaagaaggaaaaagaacaaaaaagatggtacgtacataaacacgtacgtgcacatccacataagggagatgggaccatttctccgtgtggtttttaagataaatctaattagaaaatcttaaaacggatctaagtggtagctacaaaataggagaagttagctactgatcccttcatccaaaagtacatatttctttttatcaccaagatatgtaattaactcatccatcatgtgataaaaccaacgaactatacacatgcatgcaaccaagaatagatactgatatgacttcttaggtttcggtcaaaaatttaatttagcatgtagagattataaatagttcttagactttctaaaaacaaaaaaaatatatttcttaatctttcggatggaggaagtagaaaatagggaaggggagagttggagggtggccggagggtgggggcagtaagtacttgcacaaccagaaattttttttccgataaagatctattggttaaaattaatgggtccaccaatttaagaaaaaatcaatggttatatatttatcatacctttttctaatttactagaacatcatgtggtggcttattaggagcgtttgtagaagaccatgacggtttgaaagcgtttatgcatgggaagtttaatggacttttagtatataataaatagatagatgtgagataataattataaggccacccaagaccatacgctagtcatacgcatgccaacactgcaaaaataaattaacctaccatccatggtgttaacaaataaatagctttaatatatagcgcgtaggaatgaaaacaaacgatcgatatgcgataaatataagagaactagatataatcatactatatgtttatgtaatttcaagacatgtaacgtccaagactccaagcgcttggctgatgacaaacaaaggaagttcgagttcgcttgtacgaataatggcaaattagcaaaaccattgacataatattaagagatgaccaaagatgatggagaactttccgaaaattgaacaaatttaacgaaaacatttggcagcaaattttgttaataactacgtaactgatatatatatcatggacgtggaacactacattcataaataagagataatataattaatgacgagatgtatgcacgatctacacgtaagtaccttcctccatgagtgacctctagccagctagtttctggagctctagcacttgcttccttgtactccgatctgatttgcctctgcgcatgtaataccgtgcatgcgttctcgctctatatatagagtgtcagcagcttccatctcttgcaaccaaactagctactcttaatttccttctcatttcattcccgacaagctcggagaaacaataaactagcgcatgtgtgtcatccactatccaaagcatttgcctttccgtatggaagacgaattaaaatgcaaattttatgcaaaagcaaaataattgaagttgctttacctctttccatttgtaattgaaattaattaatgattaaagcaataccgttaaagtaggtcaattacgtaccacaccattcgctactactacggttttatgttttaacaggtacattttctgtgtgtactacttccttcgtgctctcacttattctgaacatgcatttttccttcatttggtagtctggaaaagctagctagcttcctaattggaaatgtgagcatcaccaacaaaatatttatatcattccctatccaaaaatatgaggatttatatatgttaaaaatttgctccaacatattctctaatctcattccttatcccgggattatcgttctctttttctaaggaagcattttggcttccaatcgtggcacttcacgtgcaggaagagattgcacacgtgatctagcatgagctggcgtgaggaaggagagcaaaatatattttttttccggtgaagattttatcttggcccaccttttaaattattaggaaaccaattttacctaatctcttggagagaggaaaattttaacaccttaaattattattaggattcccataataaagaaattgggaatgaaattttaggatgctgttggtcatgctctaacttgcttggtgagcatatattaaagtttacccatctataaaatcagacaataatgcccctcccggctatcacatactgggtatatgtagatcaaccctattttcctaagtgtgaaaaaaatatcaaaaaataaaaaaaattgcacatctctctctcctctacactagagatgacaaaaaaaataggggggggggcagccacattggcgcactcccctaccacctcaatgtcgacacgctatggtggcaggaggatggcgccagagaggctggtgctgtcctgttggacgacggcgccagcgactctagctccaaaaaagaatcttttgtgtgataagtttttttaggggtctatttgcgaaataagttctttaaaaagaacaaattgtgaaaaatcctgttttcctgcatggtgattttttactatatacagaaaatagcattccccaatacttagtctttaaaatggtttcaataaaacagatggagaattgatatttcttgatgtccaacacgtggagaccttgatccattttttaccccccgtccaatgccgcctctatgttctctctctctcttgcatagtagctaatatactaatggtgatatatattaattagatacttgttgaatcatttactaaatatatctattgcttcaaagaaacgttagtgatttttgtttccaacagtcacgtataagccttttctgtggatgtgtttgcgtttttgcatctgaatcatctagttttcgccgacaaggcacccaaaagcaagagtgtaaaaaataattactaataagtaaaaatccttctgtttgtatgtcaaaattgtaaaagctgcagtgaaatgagcatagctcaattagttgcctaccatgcatggttcaagtcttagacttgatatgaatattcgaatttacgatcaattattcttttagtggtaggtaatgtacccgttaacactaatatgtgtctatcatgactttataaatatcaaggcataccagctcaatcttttgaagatttttactattggggtagggtatacgtgtctacgttgaaaatggtgagcgtgagtgcgttgtgggcgtctgcatttgtattttgtttaaaagaaatacaaaaaccgccattaaaaccatattttactacctaagctattccagctggttttaataaagggtgcacaatatctaatttcatagttctacgctcgatcgggaaatagttgagaaggttaattaaaatgaactttaactacttttagtaattaagttctaacccatgcatgtacaaatgtgtgcatgttcgccgctttttccaaaagctaacggaagtttagatgcaaaatttgtttaattaaggcaaatactttacaatatatttattactttaaatttaatatggcgtgtgcttttaattaagtcatatgaaattgaaagggctagttttggggatactatactacacctttccagtgcactggtgaataaatcaatatttaattcgaccggacaactaggatttatataattgttattttgatgtaccagtgtgtaagattctctcctccgtgtgccatttgttgtgggttggttggtgactgtgcgtgaaaacagtcgagtgtgctacttagacgctgccgtagttactatcgtatcggatatttggacactaattataaatattaaacgtagactattaataaaacttattctataaccctggactaatttgcaagacaaatttattgagcctaattaatctatgattagcctatgtgatgctacagtaaacatgcgctaattataaattaattaggcttaaaaaatttatcacacgaattaactctcatttatgtaattaattttataagtactctatgtttaatactttaaattcatccgatatgatagggactaaaatttagtgcctcgatccaaacaccatcttagctaacactacttacggttcgacgacgtgcatctaaaacagagagtaaattttaaacaacaaatcgataaatgtaagctacgaaaatagtgcatgctgaaagctcttcaccagtgctaataaagatctatctttagtcccgttggtaagataaaaaaaaaactctatccttttgaaccgggactaaagatatctttagtcccggttttattgcaaccgggactattgtgtattttggccgaccgaccaaagatggtttctccaccagtgattgttccatgcggcaaaatatcaatttttgcatctggacaaacgatccgcattcacccaaaatctgaaaatcggatctttgcaatttacatgcgaaaatccgattttcaaaataatgttttcaagacatggggatagacaaagcaggtcattgatgtatataaatacaatgttttattttgtccaatcaaaatataccatgttttgttttaaaaataagaccatgcgaatattcgatgaacatgttggccacttgataaccgtgtcatttgggtctttacaaggtttcatggattgatcattacttcaacctttgctttattcgcgtcttagttaatgggggaacgtatcatgtgaaaaccagggaagctgtgcaaacttgcaaactctcaatcaacaccacataatcaccatctgatggctagggatagaggtgggctaattttgcacttaagcgcccaccattagccatactaatcttgcttttttcaaatcacctcctcccctaatccccagtgcgcacgctgcctgttcgtttctcccgtcccgtccacgagttgcccgtgagtcgctgccaccgtcgtccgcgtgtcgcccgtgagtggctgccgccgtggtacgcgagtcgccgccgagctggccctcaagtcacagccgcacgccagcgagtcggcatggagtcctcgcccacaacgccagcgagacgtttttcaatgtttcacagtttcagtgctgatcagtgcttagaaaaaacagcatgaatgtttcagtgttttagtgattgtaaacaccttgtaaaaaatctggtagaagcaactgagatacaatttttcaatgtttcagtgtttcaatttcacacacaattgctgaatcattaaaatacacaagttcattacataggaggcaccattgctgaatcactaaaaaaatcagcatgaattttcaatgatatgagtcttctggtacaaacaactgagatacaatttttcaataaattttacacacaatgctccacacacaagttcattacacaggaggcacaattgccattgcagagccattttttcaggcattacagccccagacgaggacgcccttttgttcaggcacaattgccattactcagtttctgatccagtactgactgaagccgtggcaggactgcccttgggtgcctgctacacatgtgtgacaatagcaaaccactgaccatgaaccttgaggtactcatcctgccacacatcgagcctgacctgtaggaagttgtcgtgctgcctctcactcctgatggagtcctagtaatcactggcagtgaagccccttctcattttttgctggtgatgcgcaggtgccggtgaagcgttgctgccgatgatgatgcgccacgctgctgcccatggctccaattcatgccctacagaactgggcagaggtgccaccatcgaggacatcctgaactggaccaccaccgtcgaggacatctccctggcggccgccagcaaggccacctccgaccaccactgcatggctggcgcagcccaacgcgggactcatgaggcggcgcggctgggtctgagatggcgtggcggatcatagtcggcgactggatcgcaagtcgtggggagacgatactggcgtaggggctcgggtataaaagtcatgggaggcggatggcgcaaggggtgttttgcaaaatagacagaggggctggcgggcggttatttgcaaatttagcccacctctatccctagccatcggatgctcatcctgtggatgtgatcgagagtttccaaggttgcacaggctccctggtttccacctgatatgctcctagttaatgaactacaaagtagctagattagtttttatttttacccataagcacctgaggatgtttcatatttccacgttcccaaattaatcatcatacgatgaaaaccaaattttcttaaaaagcgatcataatgtaactgcaactatatggacacatatttcatcgaagtacagttaatgtaacacgaaaaaatatgtgcatgttaaggtgtaattgtgcaatgtgtttttaaactatgcatatgcattgtggcaagatgtatgcatattgtacgtgacgtcttaatcaatgcggattaaactattcttgatcttgatgcacagaacattattatgattatgatggtcaatttaggttctaagagagtatttaaatactccctccattctataatatataatataagacacagccacttttttctagatgttccataatataacgcatgcatgtatgtaggcaattaactatgatccttctccattaaattattactttttttaaatcctccactctcatgttctttaattctattatatgtatgcattgcatttattaggatgatcgaaactacaagatgataataaatatttttttggtctttgggttaggggtggttagaacaagtttaatagtatagcctactactaactccaattcatatatagttaatctaatagccaattcatacaatagttgcttactatactattaatatatgaccccacctgtcatacacatattgtttattggagtccgcgctgcagctggctacagatctgtaacccgctactcttctctctcatcttttatcttaataaaatatgtttacagctggctaatagtctgctattgtacctgctcttggaatggagggagtaccttagttaccttttgttcctaataaatgacttggttcaaattgcataacatggtttagaatctttttgggtcgtaatagctgctgctaacttttttgtccataactcgcgtgtccccgggggaaagcatgccgagcagtagcagcctacgttgggtcctatctcgtgatgacgtccagtcggggtcgtcatcagcggtacttcagcagcaaagcatctttcgatctgataattttgtttgccgttatttccaaactttttctttaaactttcaacttttccatcacatcaaaactttgctacacatataaacttagatacgactctcggtcgggcgatccatcgggagagggttaaatcgggcgctgacgtcagcatgacatcagcgcccgatttacgtgcaaacttactttaaactgatttttctcttaaattacttatccaaatcatgatccgattataccattaaattcgttgcaattaaatcttcaaaacaagaccacacatggatatattccgatgaaatttttttacctaattattgaattatttttaaatgttacacgatgttccaccaggtatatcggaattgttgcactaagtagatcgaaaatgttttgctcatttaaatcgggtgttgtttcaccttatataaaaacgatgtttcagcaaatagcgaaagaatgtttcagttcactgcaatatttgatccatacatagtgaaacattgtaagtacactaggtgaaacatttttcggtggaacaaaaaatgaaacgaattcccttaataggggtttccaaaatatatgggttttttgttgcaatagaatgttttagttcactgcaacattagatctatatatagtgaaacatagtgagtacactaggtgaaacatttttatagagaaaaaagaaataaatttccccaatagaagatttctaaaatatgtgagttatttgttgcaatgacgcgttctataatatcaaaatccaccacaacatttgatccgtatatagtgaaacatcacgagtacactagttgaaacatcgtaaaactactggttgaaacatctaaagaaccatatgcagcatttttaaaaaaaatatcaataaaaaagctaaaatattttttttcgaaatataatcatgtgtggtcttgttataaaaatttaattgcaacgaatacaacggcgtgatcggaccgtagattggataattagtttagaagaaaaatcgttttaaagctattttaaatactcagcatgtggttcgaggcgtccgatttttttcggccgctcgggcgcccgacgcgcaatatttccccataaacattcaacttttccgtcacatcgttccaatttcaatcaaacttctaattttggtgttaactaaacacaccccatttatacccttactttcatttacattttcatttacatgttcaatattaattttattctcaacttttacggtttatatttttgccgttgctattttaactgaataaggtgtttgcccttgtttttaccgaagggagtggagaaagagttatatattgcggtaaaaaaaacagagaaagagaaataatgattttctaaaatatggattgacttttttgccctagggagatttagactactgtctgcctgcactccagaagatttttttttacttttttatgttttaattttattaaggggcaattgtgttcttacctttactttcgattgcaattgtaattttatccctcttttttagactttgctattttgcccttgctttttgaaattgaagcttaggtttgcccctgttctgttaagtgaacttaacggaattaatttggttataaaagacaagtttgccctggtagatttgcctactacgaggcagtgaagaatttgcaggacatgatccgattaggatttaataaaaaaggacaacacagtgaatgaattatatcactgtttgatgtgaaaacaatttgctcgtagttttagatccttccatctctgaagaaccagaattattaatacgtaaggagcactggagggagcacctgcgtaggagcagtccctaattaatgagcttaacaagaaaagaaaaccaacaaaatcaaacaattaatgaagtagccgtagccttcggcctcctcttcgaagactaggacgccgatgctgccgacggcacaatgcatggttttgtaggaacagcaggagttgcagccggggcagcagcggctcttgcaggttcgacgggttttcttctcctccgtcccgacgctgacgatgtccgccatgaatttcctcactcaccaccgtgccacacgcggaccagtctgctccgcttgcacaccaacgcgccgctgccgtcgcttgcccgcgcgctcctcatgctgcctggctcctcacgtgcgccgctcagctacaccactaccactccgtcgcccaaccacagccggccgctgtctcgcccgcacatcgccactgtcttgctcgggttaggggttgggtccgattggtgaataggcagacagatctggatggactccatgctattacttgcttttgagggtatacttactggtcctttctacattttctcagaaatttcttatttttttaattcacttaatctgggcccaccaacatggtcatccaaaacaagggcaaactgtagcttcattaaaaaaaaaagataaaatcactaaccctaaaaactgtgggcaaaatcacaattacattctaaaacaagggtaaaaacacaattgtcctattaaaagaccttttcaacaaatatttataaaaactaaaccttttaaccacgccagcagatgttgtcttgccacgcaagcagtggaggcgtgacaagaggctggcgtgacagggcaacactgccgcaccagctatgggtggtgtgatagagttatttggccacgctataaaaggtttagatttgaaaatacatttgggaatagtctactagtaaaattaaaacataaaaaataaaaaaatttcactcgacaacatcctgactcgaacattccttgaccctggcgcgacgacctgtgcttgacgacctctgcttgcgacggtggttgcggtggcaggtggcatcggagggatggccaggcgtcggggagcagcagccgttggcggcgccctgaccagcggcgagctggaggccatggcggtagagagtagcgggcaagggggtgacctgacctagccgcggcgaggaggaggctaagcggcgcagaggagttgaggaggccgtgcgacacggttcggctccaagcaggcggcaagggatgaggtgcgtggaggcggcggctctggtgagacgatgcagcggtcgatatagatggccatctgggccgcccggcacgagacggcccaagcccggccgtgcatcagccgaagaggcttgtcgggccggcacggcccgaccgacgcaccgggcggtgccgtccccgcccacgctcggcatacacggcccaatactactcggaccgtgccaggccggcccgaaggcacgaaggctcatcgtgctttctcacagaaaaagtctaatttaggtccctaaactctgcgggctatatttaaatggcttgaaaataagtctattttttatacctctcgtcttgggccttgccttatacgattatataagtctattttacatccctatatattttttatttgatcggccgtgccaggcctgcccaccgtgccgagggtacagcccaggcacagcccggctgccgggtcaggccagcacaggcacgaccccaatcgagctgtaccgtgcttgggccaggccaaaatcgcgggcttcgggccgggccgtgggcatcgggccatatggccatatatagcggtggcgttgtggtgcatcgaagcaaagggtgagggtgcgacgggtccccgtccagccaccgtagcggggcggctttggcgtgccggccgctccatcgaagcaagcctgtgaggcggcggcgcagcctttcttgttcggcgcgccgcacgacgacgatgaggcgttgtgctgttgtctctctcatggccttgcggcgtcgtcgtccagcgccgaacgaccactgatccgccgacactactacctgagcaggccgctccgtctcagtggttgtcttgctcaagaagtgagtaggagctgctgcttgctttttttttttttttgcttgtgctacttcttgctacgcttgaagcctggttggctgctgttgctgtccttgaatctatcaaaatttcattgatgattggaatctggaaaaattcgaaacgtgcaataacaagggtacgcatgtctttctgcaaaaaattatcaccgttaacatgtccatctaaaataggtaaaaaaacagggtaaaaataaaaaccctaaaaacaagggtaaaattaatattggacatcaaaacaggggcaagaacaaaattgaataatacatcaggttcattcatcaaatccaatgatctatatcatccaatccaacactccacgtaatccagatcacctaacgacttggtcttcctcaccttccctctgatcccgtcgcacactgctcccctcgatccccctcctcagcctaacctctaacccttgtcatagctagtgcagtcaccgcagcgctgtcgacgatcccccatcctccacatatatgtgtagatttaggtttgatttgttagttgtataaatgaactttacttgcgagttagtacaggattggtctttcaaacaagtaatatactgtcacaccctgaaaattcaaaatatataaattgttgtttaaatggaatttttagaatttattttaaaagcctagaagagaagatctaattttttaattaataaattccaatataaaatggggccagataaaatttcattaaatactttgcttaattctataattcctagatttttctgggatttatttgagctaaggaagtatttttaataaatggaattgcatttcatgaataatttaaattgaaaaaggttttaaaaagtctcttttggctttgggccgaaagtcggcccaaaaccgctctctctctcctcggcccagtccggcccagtccgccgccgcgcgcgcgcgcgtccgcccgctgacaggtggggcccacctgtcagggtcgtcgtcaacctccggccgccgccgctcgaaaccctagtttcgcgccgccgccgttcccttccaaattcgatcgatcctttccgtttccggccgaattgatagaggggaaacaatctccgggatctcctctaccttttctcttttggaaacatcggctaattcgttttggaaatcgttggaatcgagttcgaatcggattcgtctctctcctccgaaccctaaaccttccttctcgtcgccagccgccgtgggccttcgccgtcgcctccgagcccctttaaaaggttccccggtgtctcctctacccgtcgccaccttcgccttcgcctctcgtcgccggaagagctctagcgccgtgcaacctagcgccgccgtcgtagccgtcgctccagccgtgcgccgccgccgtctcggtcgtcgtcatcgctcgggaaggccaccgtcgtgatcgccaagtcgccgccgttctcgtccgctccttcgccgccgccgaagaccgccggagcaccgtcgccgccgtcgacccgaagtttgccaccgcttcctccttgtcgccgtcgccgtccgttgatcttccgccgctcttttggtcaccggtgagttcgccgcgtcgcgctctacccgttggtgccttccgttcgcgccgccgtgccgtcgttcgccggcgagcatgcaagcccgagccgccgagccgccgccgccggtggtgacgtcatcgccgacgtcatcagggccggtcgtggaccgttcgatctcggccgtccgttttggatcaagtcgatctcggccgtccgttcgcgtgagccgtcgcccgtgcgcccggtccaccgaaaccctagcccgctgacgcaataatcttccttttccttttcaaaaataattcattattgcgtcataattcaattaaaatcaatttaagtgttttaatccgatttaatcttcaaaaattcataactaattcatcttagctccgatttagttggttcaagtctctaattttttctaaaattgagatctacatgttaaaaatatccacatgtactgttcaagcttatttatgtgctgttttggtgattttgcttctttatgtttacattctgtcgtttccggagagtccgttttcgccggagaagagtttgaagagttccaaagcaagcaaggcaagtcacacagatcctaaacaaccctttgagcatgttgatcctatttaaagctattgtttctattcaaatattgcatttattttcgaatgtcattgggtggaattaacctattgggtggaataagttattccttgataccttgggttattataatttgactagttgagctctatatgttggttcaactagatgtattagatataattgcttagccctgcttagaaacattagcacactattgggataacttatgaatcactataatttaatgatggcttaatgatagttcacgatggccaatcgtgatttgttaattaattatttgccaactaaaacctgaaatgatgggttgtgagcacatggttttgatggtcgtgctcatgacaattaaggaccggttcacgagtttcagttgtgaaacattaaccgtgccaaccacaagccagcgtgggcaacggctttatcttttgtatagcatggttcattgcggggcaccagactgagaagtggcggagataagcccacgggggtcgctggggagtccatgccttggttttaaggggggtgatatgatacaggaaggtgcgctgcagtggattgtgttatgcaaggggtattgtcacaacttctttcggaggtaccgtggtggtattgaggcacgtggtgacatgatgtggggttgtgtcttgtgggtacagtggtacacctctgatcagagtaaaactattcgaatagccatgcccgcggttatgggcgggtctaacaatgtctttcgtgattagtctcacccttctcatcataataaaaggtgctttaattggtaataatttgattagctcctagtttggaatggtatattcctggtttggagatagaactatgcagccgggatggttgttcagaatggttgggcctatacaacagggtatgttgtatagcgttggattaatattgtttaattacttaactgttttattaaattctcaaatgtttgctaaatgctgcttttgcaaatgaaaccctactttcatttgtctttagatgccgcgcttcaagcctgagtacttgtttggtgttgagggatttgtccaagagttgcgtacaatgtcctttgtcattggatttgggactgcccctttttatgcccagatttctcatgatcgtcatgaagagaagtgccgagtcaaagtcaccttgaacagtaatagtgaagatatcccctcagtgatgttcgaagctggaggaagaaactacatccatgcatgtcaggaggtggcaaggatcgccataggagagctccgcgatcgctatagtgatcagttggccgacacggagtatcgctatcatcctcgtcaaccccagggaagtgaccgtggcagctaccttgagactgaaggaattgagaatgatgctaccacaaggcatttggttgagatgctgtgggctatggatgaaacccgtgcggagactgtgttagcggctcaagatcgtgaagaccggaatcgtggtaagatttacaagctagaagacaaggtggatcgtttggagaaggagctagctacgttgaagggagaagcaccgccgcagaaggccaggattcgtctcaccgcaaggaagagagctctatttgtcccttgctatcaattggcgccaaaggttcgtgtggtggagaaagaagttgccccaaccctagcagatccttcggtcatcatcataagtgacgatgaaaaagaagaatccaagcgcaaccattccaagattgagtgggtagcaactcaagatgatgaagacgagccgaacgagccttcaatcgacctccgatgctcggaagaactagagtgccatgtctaaccgttgtcttagatcgttgtgttagtttgcttgttttaagtttgcttgtgggtgtctcgcatgtgatttacatcagtggtgggatgtaagtgcatgtgtttgtttgcttttgagtgttaggaagttggtgagtttggtggtgtgagagtcttcagtttgtaataatgaaactcagttaagatcaataaaagttaaagtaattccctgtcctaagtagtttcccccggtttctcttcttgtgccctgtctatgccagatggtgaacacacgcagcaacgggaatggccccagtaacaataacaatggagagaatcccactcttgctcaagttcttttcaacagactcagcttatgaacatgatgatgcaacaacttcagaaccagcaaaaccaaggaaataaccatgcacctccccaaaacaagttagcagaatttcttcgtgtgaggccgcctattttctctagtaccactaatcctgttgaagctggtgattggctgcataccatagagaagaagttggatttgcttcagtgcactgatcaggagaaggtctcatttgcatcacaccagttacatggccctgcctctgaatggtgggatcacttccgcctgaataggactactgctgaacctatcacttggcttgaattcaccgctgctttccggaagacgcatataccatcgggagtggtgtctctcaagaagaaggagttcaggtcgctcacccagggatctcgctctgttacggagtatttgcacgagttcaatcgtctggctcgttatgctccggaagatgtgcgcaatgatgaagagcgtcaggagaagttcttggaaggacttaatgatgagctttcttacccactcatgactggagattatcatgatttccagaagttagtggataaggctattcgtcaggaagacaagtacaatcgcatggagcagaagaaacgccggattgctcaattcaagacacaacaggggaataattagaagccgcgtcttactttaggaccccagtccatgccacagggaggttcttcgtctgttgttcgtccgcagcgtcagttcttcaacaacaatactggcaacaacattcgtaatcaagctccacgtcctgttgcagctccaacacagcaacaacctgccaagagggagcaaggcagcaagcccgtggtgtgtttcaactgtggagacccaggacattatgctgacaagtgcccgaggcctcgacgtgtgaaggttgtccctacccagagcaactctaccgtaccagcatcaaaggctcgtgtcaatcatgtcgctgctgcagaagctcaagatgctccagatgtgatttctggccaatcttatcctgctagaatccaaagaccttgatgtcatcctagggatggactggttagccagacataaaggtgtgatagactgtgctaacagaaaagtaactctcaccagcaatgatggtcgagttgtgactgttcatgcattgtcttctgagtctttaaggtcaagactgaaccaaataactttggaagagattcctatagtccgggagtatcccgatatgttccccgatgatttacctggtatgccgcctaaaagggatatagagttcagaatagatttggtaccagga

SEQ ID NO: 15413 - DNA, 26935 bp, Oryza sativa
acaacatccgtaatcaagctctacgccctgttgcagctccagcacagcaacaacctgccaagagggagcaaggcagcaagcccgtggtgtgtttcaattgtggagacccaggacattatgctgacaagtgtccgaagccccgacgtgtgaaggttgtccctgcccagagcaactctactataccagcatcaaaggcccgtgtcaatcatgttgctgctgcagaagctcaagatgctccagatgtgattttgggtacgtttcttgttaacttagttcctgcaacagtgcttttcgattctggtgctacacattcattcttatctaagagttttgcgggaaatcatgggatggaagtagaagatcttagacgtcctttgatggttagtaccccgagtaatcaagcactctctttgcaacgtagcccctttgtcagaatagaaattcaaggaataccatttctggccaatcttatcctgttagaatccaaagaccttgatgtcatcctagggatggactggttagccagacataaaggtgtgatagactgtgctaacagaaaagtgactctcaccagcaatgatggtcgagttgtaactgttcttgcactgtcatctgagtctttaaggtcaagacagaaccagataactttggaagagattcctatagtccgggagtattccgatgtgttcccagatgatttgcctggtatgccgcctaaaagggatatagagttcagaatagatttggtaccaggaacaactccgatctataagagaccttatagaatggcagccaatgagttggcagaagtcaagaggcaagtagacgatttgcttcaaaaaggatacatcagaccgagttcatctccatggggagctctggttatttttgtggaaaagaaagaccatacccagaggatgtgtgtggactatcgtgcactaaatgatgtgactatcaagaataagtatccgctgcccagaattgatgatttgtttgatcagcttaaaggtgccaccgttttctccaagatagatcttcgatcagggtatcaccagttgagaatcaaagaggaagatatacctaagacagcttttaccactaggtatggattgttcgaatgtactattatgtcttttggacttaccaatgcccccgctttcttcatgaacttgatgaataaggtgtttatggagtacctagacaaattcgtggtggtctttattgatgacattcttatctactcccgaaccaaagaagagcatgaagagcatcttcgccttgcattagagaagctacgagaacatcaactgtatgctaagtttagcaagtgtgaattttggttgtctgaagtgaagttccttggtcacgtcatctcagcaggaggagttgccgtcgatcctagtaatgtggaatccgtaaccaactggaaacaaccaaagacagtttcagagattcgcagtttcctaggccttgcaggatattaccggaggtttatagagaatttttccaagattgctaagcccatgacacgactgcttcagaaagatgtaaagtacaagtggtcagaagaatgtgagcagagttttcaagagttgaaaagtcgcttaatatcagctcctattttgattttgcctgatccaaagaagggtttccaagtgtattgcgatgcatccaaacttgggttaggttgtgttctgatgcaagatgggaaggtggttgcctatgcatctcgtcagttacgtccgcatgagaagaactaccctactcatgatcttgaattagctgcagtagttcatgcgttgaagatttggcgtcattatcttttcggtactcgtacagaggtatacaccgatcacaagagtttaaagtatatctttactcagccggatctgaacatgagacaacggagatggttggaattaattaaggattatgacatgggaattcattatcacccgggaaaggctaatgttgtagcagacgctcttagtaggaaaggctattgcaatgctacggaaggacgacagttgccattgtaattatgcaaggaatttgaaaggttgaatttgggaattgtcagtagaggtttccttgcatccttagaagcgaagcccactctaattgatcaagttagagaagcccaaattaatgatcctgatattcaagaaatcaagaagaatatgagaagaggaaaagctatcggtttcttagaggatgagcaaggaactgtatggttgggtgagagaatctgtgtccctgacaacaaagatttaaaagatgcaattctgaaagaagctcatgatactttatactccattcaccctggtagtaccaaaatgtaccaggatctcaaggaaagattttggtgggcaagtatgaagcgtgaaatcgcagaatacgtagcagtatgtgatgtttgtcagcgagtcaaggcagaacatcagaaacctgccggtttgctgcagcctttgaagattcctgaatggaagtgggaagaaatcggtatggattttatcactggtttacccagaacgtcatcaggccatgactctattttggtaatagtcgacagacttaccaaagtggcacatttcattccggtaaagacaacttattccggaagtcgcttagcggaattgtatatggcaaggattgtgtgtttgcatggcgtccctaagaaaatagtgtctgatcgaggcagtcaatttacttcaaatttttggaagaagcttcaggaagagatgggttctaagctgaactttagtactgcttatcatccgcagacagacggacaaaccgaaagggtgaatcaaattttggaagacatgttgagagcttgtgctttagacttcggtggaagttgggataagaatctaccttatgcagaattttcgtacaataacaattatcaagctagtcttcagatggctccttacgaagcactgtatggtcggaagtgtcgcactctgcttttgtgggatcaaacgggagatcgtcaggttttcgggacggatatcctaagggaatcagaagaaaaggtaaaggtcattcaagaaagattgcgagtggctcagtctcgtcataagagttatgccgacaatcgccgcagagatctaagttttgaagaaggagattatgtgtatcttcgtgtcacgcctcttcgaggagttcatcgtttccacaccaaaggaaaattggcaccgcgttttgtgggaccttataagattgtcagtagaagaggagaggttgcttatcagttggagttacctcaatctttggcaggagtccataatgtgttccatgtgtcgcaactgaaaaagtgtttaagggtacctaccgaagaagctaatcttgaacagatagaagtccaagaggatctgacctatgttgagaaaccaatccgtatcttggaaacagatgagagaagaaccagaaatcgagttatccatttttgtaaagtccaatggagtaatcactcggaagaagagtcaacttgggaacgagaagatgaattgaagtcagctcatccgcatctgttcgccagttcttccgaatctcgaggacgagattccgtttaaggggggtaggtttgtcacaccctgaaaattcaaaatatataaattgttgtttaattggaaattttagaaatgattttaaaaagccttgaaaagaagatctaattttaattaataaattccaatataaaatggggccagataaaatttcattaaatactttgcttaattctataattcctagatttttctgggatttatttgagctaaggaagtatttttaataaatggaattgcatttaagaaataatttaaattgaaaaaggttttaaaagtcttcttttggctttgggccgaaagtcggcccaaaaccctttttctctctccccggcccagtcggcccagtccgccgcagccgcgcgcgccctcgctgtcgctgacaggtgggtcccgcctgtcaggttcgtcttccccgagccgccgtcgcccggccgaaccctagcacgccgccgccgccgttcccttccaaattcggcagctcctttccttctccggccgaatcaaaagaggggaaatgatcctcgagatctcctctaccttttctcctttggaaacttcggctaaatcggtttggaaatcgatggattcgagttcgaatcggatcggcttttctctctccgagctcgagctttccttctcgtcgccggccaccgtgggccttcgtcgccgcctcctagcccctttataagcttccccggtgtctcctctacacgccgccactctcgccttcgcctctcgtcgccggaagagctctagcgccgtgtgccctagcgccgccgtcgccgccgtcgctccagtcgtgcgccgccgccgttccagtcatcgtcgtcgctcgggaagaccgccgtcgtggtcgccaagacgtcgccgtcctcgtccgccgcttcgccaccgtcggagaccgccggagcatcgtcgccgtcgtcaagccgaaaagcgccgccgattcaacctcgtcgccgtcgccgtccgttggtcttccgccgtcgctttggtcgccggtgagttcgccgtgccgtccgctacccgttggtgccctccgttcgtgccgaagcgccgccgttcgccggcgagcgtgcgccgtccgagccgccgagccgccgccgccggtggtgacgtcaccgctgacgtcatcgtcgccctttcccgtgagtcggtcgtggaccgttcgatctcggccgtccgttttggatcaagtcgatctcggccgtccattcgcgtgaaccgccgccgtgcgcccggtccaccgaaaccctagcccgctgacgcaataaatccctttttccttttcaaaaataattcattattgcgtcataattcaattaaaatcaatttaagtgttttaatccgatttaatcttcaaaaattcataactaattcatcttagctccgatttagttggttcaagtctctaaatttttctaaaattgagatctacatgttaaaaatatccacatgtactattcatgcttgtttatgtgctgttttggtgtttttgctcttttctgtttagattccgtcgtttccggagagtccgttttcgccggagaagagtttgaagagttccaaggccagcaaggcaagtcacacagatcccaaacaaccctttgagcatgttgatcctatttaaagctattgtttctattcaaatattgcatttattttcgaatgtcattgggtggaattaacctattgtttgttatagcccttttgttcttgattactttattccttgataccttgggttattataacttgactagttgggctatgtatattgattcaactagatattagatataattgcttagccctgcttagaaacattagctcactattgggataactcatgactcactattacttaatgatggcttaatgatagttcacgatggtcaatcatgattggttaattaattaatgtgccaactaaaacctggtaatggtgggttgtgagcacatggttttgatggtcgtgctcatgacaattaaggaccggttcacgagtttcggttgtgaaacattaaccgtgccaaccacaagccagcgtgggcaacggctttatcttttgtatagcatggttcattgcggggcaccagactgagaagtggcggagataagcccacgggggtcgctggggagtccatgccttgtttataagggggtgattatgatccaggaaggtgcactgcagtggattgtgttatgcaaggggtattgtcacaactcctttccgaggtaccgtggtggtattgaggcacatggtgacatgatgtggggttgtgtcttgtgggtacagtggtacacctctgatcagagtaaaactattcgaatagccgtgcccgcggttatgggcgggtctaacaatgtctttcgtgattagtctcacccttctcaccatagtaaatgatgctataattggtaataatttaattagctcctggtttggaatggtacattcctggtttggagatagaactgtgcagccgggatggttgttcagaatggttgggcctatacaacagggtatgttgtatagcgttggattaatattgtttaattacttaactgttttattaaattctcaaatgtttgctaaatgctgcttttgcaaatgaaaccctactatgccatcctttgttatcctgtgcacttgcatatttgctgcgtggcttgctgagtatgtcatatactcaccttgcaatcattcatcagaggaagagttctacagtgatgctgatggtgtggaggattaggtgtagccttggtcaagctgcctgtggagtggagtcgtctgcgccgtttatcttttctttccgctgcttagatctttattgattgagaggaactatctacctctgtaatgacattttatacgcttattaattagagtaataattgtactctattatcaatttgttattgtgtgcctcggctgattcctggacgagggttcacacacatgtaagcgtttggaattttggatagaaattccgggcgtgacaagttggtatcagagctccttgaccctaggttatgccatatggttacccatagaagccctctaaaaatattggaaaaatagaactgttctcctctccttctcttttaattaaaccaaactaatggcacatgcacttcataatcttttttaagggttctcattcaaaatttattccagtgttattagtactgtacatctattactgtactaatggctcatttaccagcaaaagttttacaatattgttttatttaatcttgctgcaataaaataaattaagcaagttgattttataactttcttttatttcttttgaaacctgatgttcaaaagtacaaaatttgtaaccttgtttccagctgtttcaacttatcttgcaagcttggtttaccgtatttacttacctttttactttgatttctaactttattcaaattaatccaaaaacttgtgctattaattggataaatgtcttaactccctcctttcacttgtctttagatgccgcgctacaagcctgagtacttgtttggtgttgagggttttgtccaggagttgcgtacgatgtcctttgccataggatttgggactgcccctttttatgcccagattcctcatgatcgtcatgaagagaagtgccgagtcaaagtcaccttgaacagtaatagtgaaggtatcccttcagtgatgttcgaagctggaggaagaaactacatccatgcatgtcaggaggtggcaaggatcgccataggagagctccgcgatcgctacagtgatcagttggccgacactgagtatcgctaccatcctcgccaaccccagggaagtgaccgtggcagctaccttgagactgaaggaattgagaatgatgctaccacaaggcatttggttgagatgctgtgggctatggatgaaacccgtgcggagactgtgttagcggctcaagatcgtgaagaccggaatcgtggtaagatttgcaagttagaagacaaggtggatcgtttggagaaggaattagccgcgttgaagggagaagcaccgccgcagaaggccaggattcgtctcaccgcaaggaagagagctctatttgtccctcgctatcaattggcgccaaaagttcgtgtggtggagaaagaagttgccccaaccttggcagatcctccggtcatgatcataagtgatgatgaagaagaagaatccaagcgcaaccattccaagattgagtgggtagcaactcaagatgatgaagacgagccgaatgagccttcaatcgacctccgatgctcggaagaactagagtgacttgttaagtcgttgtcttagatcgttgtgttagtttgcttgctttaagtttggttgtgtgtgtctcgcatgtgatttacatcagtagtgggatgtaagtgcatgtgtttgtttgcttttgagtgttaggaagttggtgagtttagtggtgtgagagtcttcagtttgtaataatgaaactcagttaagatcaataaaagttaaagtaattctctgtcctaagtagttcccccggtctctcttcttgtgccctgtccatgctagatggtgaacactcgcagcaacgggaatggccccaacaaccccaataacaacaacaatgaagggaatcccactcttgctcaagttcttgctcaacagactcagctaatgaacatgatgatgcagcaacttcagaatcagcagaaccaaggaaataaccatgcacctccccagaacaagttagcagaatttcttcgtgtgaggccgcctattttctctagtaccactaatcctgttgaagctggtgattggctgcatgccatagagaagaagttggatttgcttcaatgcactgatcaggaaaaggtctcatttgcatcacaccagttgcatggccctgcctctgaatggtgggatcacttccgccttaacaggactactgttgaacctatcacttggctggaattcaccgctgcttttcggaagacgcatataccatcgggagtggtgtctctcaagaagaaggaattcaggtcgctcacccagggatctcgctctgttacggagtatctgcacgagttcaatcgtctgactcgttatgctccggaagatgtgcgcaatgatgaagagcgctaggagaagttcttggaaggacttaatgatgagctttcttacccactcatgactggagattattctgatttccagaagttggtggataaggctattcgtcaggaggacaagtacaaccgcatggagcagaagaaacgccggattgctcaattcaagacacaacaggggaataatcagaagccgcgtcttactttaggaccccagtccatgccacagggaggttcttcgtctgttgttcgtccgcagcgtcagttcttcaacaacaatgctggcaacaacatccgtaatcaagctccacgtcctgttgcagctccaacacagcaacaacctgccaagagggagcaaggcagcaagcccgtggtgtgtttcaactgtggagacccaagacattatgctgacaactccccgaagccccgacgcgtgaaggttgtccctgcccagagcaactctaccgcacctgcgccaatggcccgtgtcaatcatgttgctgctgcagaagctcaagatgctccagatgtgattttgggtacgttccttgttaactcagttcctgcaacagtgcttttcgattctggtgctacacattcattcttatctatgagttttgcgggaaatcatgggatggaagtagaagatcttagacgtcctttgatggttagtaccccaagtaatcaagcactctctttgcaacgtagcccctctgtcagaatagaaattaaaggagtaccatttctggccaatcttatcttgttagaatccaaagaccttgatgtcatcctagggatggactggttagccagacataaaggggatagactatgctaacagaaaagtaactctcaccagcaatgatggtcgagttgtgactgttcatgcattgtcttctgagtctttaagatcaagactgaaccaaataactttggaagagattcctatagtccgggagtatcccgatatgttcccgatgatttacctggtatgccgcctaaaagggatatagagttcagaatagatttggtaccaggaacaactccgatccataagagtccttatagaatggcagccaatgagttggcagaagtcaagaggcaagtagatgatttgcttcagaaaggatacatcagaccaagttcatctccatggggagctccggttatttttgtgaaaaagaaaggccatacccagaggatgtgtgtggactatcgtgccctaaatgatgtgactatcaagaataagtatccgctacccagaattgatgatttgtttgatcagcttaaaggtgccaccgttttctccaagatagatcttcgatcaggatatcaccagttgagaatcaaagaggaagatatacctaagacagcttttaccactaggtatgggttgttcgaatgtactgttatgtcttttggacttaccaatgcccctgctttcttcatgaacttgatgaataaagtgtttatggaatacctagacaagttcgtggtggtctttattgatgacattcttatctactcccgaaccagagaagagcatgaagaacatcttcgccttgcactagagaagctacgagaacatcaactatatgctaagtttagcaagtgtgaattttggttgtctgaagtgaagttccttggtcacgtcatctcagccggaggagttgccgttgatcctagtaatgtggaatccgtaaccaactggaaacaaccaaagacagtttcagagattcgcagtttcttaggcctcgcaggatattaccggaggtttatagagaatttttccaagattgctaagcccatgacacgactgcttcagaaagatgtgaagtacaagtggtcggaagaatgtgagcagagttttcaagagttgaagaatcgcttgatatcagctcctattttgattttacctgatccaaagaagggtttccaagtgtattgcgatgcatccaaacttgggttaggttgtgttctgatgcaagatgggaaggtggttgcctatgcatctcgtcagttacgtccgcatgagaagaactaccctactcatgatcttgaattagctgcagtagttcatgcgttgaaaatttggcgtcattatcttttcggtactcgtacagaggtgtataccgatcacaagagtttaaagtatatctttactcagccggatctgaacatgagacaaaggagatggttggaattaattaaggattatgacatgggaattcattatcacccaggaaagggtaatgttgtagcagacgctcttagcaggaaaggctattgcaatgctacgaaaggacgacaattgcctttggagttatgcaaggaatttgaaagattaaatttgggaattgtcagtagaggtttcgttgcagccttacaagcgaagcccactctaattgatcaagttagagaagcccaaattaatgatcctgatattcaagaaatcaagaagaatatgagaagaggaaaagctatcggtttcttggaagatgagcaaggaactgtatggttgggtgagagaatctgcgtccccgacaacaaagatttaaaagatgcaattctgaaaaaagctcatgatactttatactccattcaccctggtagtaccaaaatgtatcaggatctcaaggaaagattttggtgggcaagtatgaagcgtgaaatcgcagaatacgtagcagtatgtgatgtttgtcagcgagtcaaggcagaacatcagaaacctgccagtttgctgcagcctttgaagattcctgaatggaagtgggaagaaatcggtatggattttatcactggtttacccagaacgtcatcaggccatgattctatttgggtgatagtcgacagacttaccaaagtggctcattttattccggtaaaaacaacctattccggaagtcggttggcggaattgtatatggcaaggattgtgtgtttgcatggcgtccctaagaaaatagtgtctgatcgaggtagtcagtttacttcaaatttttggaagaaacttcaggaagagatgggttctaagctgaactttagtactgcttatcatccgcagacagacggacaaaccgaaagagtgaatcagattttggaagacatgttgagagcttgtgctttagacttcggtggaagttgggataagaatctaccttatgcataattttcgtacaacaacagttatcaagctagtcttcagatggctccttacgaagcactgtatggtcggaagtgccgcactccgcttttgtgggatcaaacgggagaacgtcaggttttcgggacggatatcctgagggaagcagaagaaaaggtaaaggtcattcaagaaagattgcgagtggctcagtctcgacataagagttatgccgacaatcgccgcagagatttgagttttgaagaaggagattatgtgtatcttcgtgtcacgcctcttcgaggagttcatcgttttcgcaccaaaggaaaattggcaccgcgttttgtgggaccttataagattgtcagtagaagaggagaggttgcttatcagttggagttacctcaatctttggcaggagtccataatgtgttccatgtgtcgcaattgaaaaagtgtttaagggtacctaccgaagaagctaatcttgaacagatagaagtccaagaggatctgacctatgttgagaaaccaatccgtatcttggaaatagatgagagaagaaccagaaatcgagttatccgcttttgcaaagtccaatggagtaatcactcggaagaagaatcaacttgggaacgagaagatgaattgaagtcagctcatccgtatctgttcgccagttcttccgaatctcgaggatgagattctgtttaaggtgggtaggtttgtcacaccctgaaaattcaaaatatataaattgttgtttaaatggaatttttagaatttattttaaaagcctagaagagaagatctaattttttaattaataaattcaaatataaaatggggccagataaaatttcattaaatactttgcttaattctataattcctagatttttctgggatttattggagctaaggaagtatttttaataaatggatttgcatttcatgaataatttaaattgaaaaaggttttaaaaagtctcttttggcttcaaaaccgctctctctctcctcggcccagtccagcccagtccgccgccgcgcgcgcgcgcgtccgcccgcttacaggtggggcccacctgtcagggtcgtcgtcaacctccggccgccgccgctcgaaaccctagtttcgcgccgccgccgttcccttccaaattcgatcgatcctttccgtttcctgccgaattgatagaggggaaacaatctccgggatctcctctaccttttctcttttggaaacatcggctaattcgttttggaaatcgttggaatcgagttcgaatcggattcgtctctctcctccgaaccctaaaccttccttctcgtcgccagccgccgtgggccttcgccgtcgcctccgagcccctttaaaaggttccccggtgtctcctctacccatcgccaccttcgccttcgcctctcgtcgccggaagagcactagcgccgtgcaacctagcgccgccgtcgtagccgtcgctccagccgtgcgccgccgccgtctcggtcgtcgtcatcgctcgggaaggccaccgtcgtgatcgccaagtcgccgccgttctcgtccgctccttcgccgccgtcgacccgaagtttgccgccgcttcttcctcgtcgccgtcgccgtccgttgatcttccgccgctcttttggtcaccggtgagttcgccgcgtcgcgctctacccgttggtgccttccgttcgcgccgccgtgccgtcgttcaccggcgagcgtgcaagcccgagccgccgagccgccaccgccggtggtgacgtcatcgccgacgtcatcggggctgttcgctgtgagccggtcgtggaccgttcgatctcggccgtccgttttggatcaagtcgatctcggccgtccgttcgcgtgagccgtcgcccgtgcgcccggtccaccgaaaccctagcccgctgacacaataatcctccttttccttttcaaaaataattcattattgcgtcataattcaattaaaatcaatttaagtgttttaatccgatttaatcttcaaaaattcataactaattcatcttagctccgatttagttggttcaagtctctaattttttctaaaattgagatctacatgttaaaaatatccacatgtactgttcaagcttgtttatgtgctgttttggtgattttccttctttttgtttagattccgtcgtttccggacagtccgttttcgcaggagaagagtttgaagagttccaaggccagcaaggcaagtcacacagatcccaaacaaccctttgagcatgttgatcctatttaaagctattgtttctattcaaatattgcatttattttcgaatgtcattgggtggaattaacctattgtttgttatagcccttttgttcttgattaccttattccttgataccttgggttattataacttgactagttgagctctacatgttggttcaactagatgtattagatataattgcttagccctgcttagaaacattagcacactattgggataacttatgaatcactataatttaatgatggcttaatgatagttcacgatggtcaatcgtgatttgttaattaattatttgccaactaaaacctgataatggtgggttgtgagcacatggttttgatggtcgtgctcatgacaattaaggaccggttcacgagtttcggttgtgaaacattaaccgtgccaaccacaagccagcgtgggcaacggctttatcttttgtatagcatggttcattgcggggcaccagactgagaagtggcggagataagcccacgggggtcgctggggagtccatgccttgtttttaagggggtgattatgatccaggaaggtgcgctgcagtggattgtgttatgcaaggggtattgtcacaactcctttccgaggtaccgtggtggtattgaggcacatggtgacatgatgtggggttgtgtcttgtgggtacagtggtacacctctgatcagagtaaaactattcgaatagccgtgcccgcggttatgggcgggtctaacaatgtctttcgtgattagtctcacccttctcatcataataaaaggtgctttaattggtaataatttgattagctcctggtttggaatggtatattcctggtttggagatagaactgtgcagccgggatggttgttcagaatggttgggcctatacaacagggtatgttgtatagcgttggattaatattgtttaattacttaactgttttattaaattctcaaatgtttgctaaatgctgcttttgcaaatgaaaccctactatgccatcctttgttatcctgtgcacttgcatatttgctgcgtggcttgctgagtatgtcatatactcaccttgcaatcattcatcagaggaagagttctacagtgaagctgatggtgtggaggattaggtgtagccttggtcaagctgcctgtggagtggagccgtctgcgccgtttatcttattttccgctgcgtagatctttattgattgagaggaactatctacctctgtaatgacattttatacgcttattaattagagtaataattgttctctattatcaatttgttattttgtgcctcggctgattcctggacgagggttcacacacatgtaagcgtttggaattttggatagaaattccgggcgtgacaagcaccaccggctcgcactccattggattcttcgattgaggattggatttgatttggattcctcgtccgctacgctgtctgtagcttattaatttggtaggtagctaacgaaacgagatgagatgagcttgacatcggattcgggattggggaattttggagtagtcgtatgtaagcaattggttggggatgcgaggtctcgaacacgacggcgtcggtcgagtgcgtggtctgcctcagcgccgtcgacgagggggacatgtggctcttgtcccacgcctcgtgccaggtctgccacgggaaggccgcgcgcatatcggtgacgcgcgacgtagttgtgccagcctcctcgccgccgtccgctccgcctgtagcccgacgccgcttcgctgctctgccgccatgctccgccgcggcgctcgcccgccgtcggctccgcccgcagcccgccaccgcttcgttgctctgtcgccacgctccgccgcggcgctcgcccgccgccggcatccgcgcgtgcccatcgtctctcctcctgccgctggcctgaagaagagaagagagaagagagaaaagagaagaaaaaaatgtgcagctgacatgtgggcccatgtaattttttaaatgttttgctgactaggatgccatgtcagcgaaaccactcatatatactgccttgggaccttttatgcacggtttgtgtgtgtttaggggtatacatttctggttttggggttaaaggatcttaaaaaatctcgctgttaagttgagggaccttcggtgaacttattcccatggggaattacaggcaattaggccactcattcttgggccgcctaatgggcttcaccgaagggtctgtccaccctgggtgccaattagttcacatatttcgcgaagatcccttgcttcacccttgatcttgcgcttcgccttcggcttcgcacttcgcccttggcttcgctcgggatattgacgatgtgtttcagcgggctcagtcaaaggccctcgtgtcattcctctaacaatttatgttgtataaaagagtaaaataaatgtgaactataactaacctactaacaaggagtaaatatattgcttctgaattttgaatcatgacaagcatatatgaaaacaaatgcatatatcaaagcatttagcaggcgcacacaacatcatcaaacaacatcaattagcagctaggaacatcatttagtagcagctagcagcagcaccaagcttcagtattagggaatctaaatacatgtgaatccttattctgtcaaagtggttctccaaagaaaaattcgactccaatggtgctgacattgtgaaagattcaaaaggagaggtcatctgctcaaaccaagattccaaatgcatcacatttcaaccgatcgaggcctatgtgggatagagaagacaactgggggctcatccgggacggttgtgggaacggcgctgcatccaatgatcaagtggccaccatgttcatgccacatggggaccattaggaaaagaaaacatggcattcatatatatcaatgacaatgatctgctttgcagtgtcatgcctaaaaagtgtgcattcaaaatttccaatagggaacaatttctgcttttgagactggtacagatttattcccacccttttgatatttaaaatttgttgtcagttttcgtatgtcgaatgtgagtactccagtagagagtgcattgcacattcgtactcgactgtcagggcatgcacagtcgacataccaacccaccagaacgattggaacggagaaatttagtacacatgcaattagaccataggaccctttgtcattattataaacattcaaaaaatgttttcaagtagtgctgacactggtgcgcgaatataaattttgaccagatcacgctgtccattatataataaaatatgagcttatttcccagtgcactgggaaggtgtaatagcctcggaactgggcattttaatcatatcaaagaagaattatttataagcccacatgttagaaaaactaactgccttagttgtgttattagtaactttgtacaggcatacagtatggcacatttcattaggcgaaaatctgtcagggcattctaaatactcaatttatttgtcgttcgagcaaatacacactaaattactaggtatatggctaattacatcgctatatcctcattaatttacatcctagctagaagctgatgtaatatctcaatacggattataaaaatgaagttattacgtagtagcaaaatgaatttgatgctatatgtaattataaagctaattacatatatagtacctttattttttccgtaggacctttgagcaactataacagctagctaaaactcgacaagtatgtgaaagagagagacaaaataaaaaaagagtaaatttcactttggtctagttcttttgatccaagtttcacaaagaatcagggctaacacaaagttttcacttaacaccatatgtttttacatttgattgcactttggaagcaatttgaactggcccatctacacaagcaggcagaactgcagctgctagccatcttcttgcctttgttctgcgctgtcgtcgcctcggccaaagccaagccacagccatcgccaaggctatggaccacaacccagccaccacatcacgtccttgttggaacaatgacctagctaccaccatcaacatctctttgtctggatccaatgtctccacgtccgcgacccattcaagcccgtcgccgatctctttgttctgtgaccggtgacctcaacaatctccaagcacattcttgtcgttcgagatcattgcttctcccacttgccgcaccttctcggatgctctttctccccgcatatgctcagctgttatgcacgtgcagagctcacccacatccttgttgcttggcggtggccagatcagcattgccggtgccgaaaaaaagagggtgttgcctgctaacgtggatgggccacagccaacatcctatcccaaatcaccaacccctagtccaaagtgcaacctagtgcaaaattatatggtgttaagtgaaaacctaatgttaggcctggtctattgtgaaactctggtaaaaagaactggtccaaagcgaaattctcataaaaaaaaacctggtcttcacatgctccaagaaaattgtattacatatatagatgagcaaaatagagaggtaattaaccttataaataaactattgtacatcttatattaggtcaaacataagcttatagctaatagttggttctagtattaaaacttatgctatttatttaagcaatgttgatgttaaaagttttttggaaaaaaatggtactacttttgatgacatgacacaaacaagctggcctgtgtaagctacaacgaacgcgacatgcccggcacacggatctaaataaaatggaattggcgccttattacaatttacagaacccggataaaaattaagtactcccaatgttaactactcttaatggagtgaaaggagagaaaaataaacctaacaaaaggcgggtagttcgatatttaaggtttgccagctccacatgtagatgttatggtcggcgcttgaaggacttgactgcatagattgcctgtataagttcacagacaaatccaaccatggcagccaccagcaccgtcagcacgaacggattgctcaagtagcggtggtagagctgcgctatccacctaatcacgcgggtcttgtacatacgttcgaggcccttcctcgtgtcgagcaggtagttgtggctgcgctcgtcggccgggttgatggtgatgccgacgcagagctcgccgagcatcctggcgacgtcgccgtcgctggccaggaggctcacgatgatccccttcttggcgaggagcgcgacgtcgctcgccgtgccggctagctgcgacaggaagtagcagtaggccgtgacctggctccccaggctcgggttgtgctgctccagcatcatcaggttccggaggaccgtggacgtgttcatgtccaccatgagcggcgggatgctcagccgcagcgtcagcggatggaacttcacgtccagaacggagcgggcgccgccgccgtcgacgaaccagcgccacgcgccgctgctggcgccgtggcggaggtggcgtttcatgaagatcacgccggtggcatggtagaacgtcgctgcgcgccaccggtacaaggtgggggcggctgccgtagctgatctccggccggtgtcgacgacgtcgaccggcagccgaacagcatcgccggtaggaataggatcgtcctgtgggacgaagtgcttgtgcagcatgtgatgcaggtgccagatctcgcggggcacttgggtcctaatggagtatccgaaatgtttgagaagtgcctggacttggacggccaacgtctcatcgagctccctcgccatcacccccggcgtggttctacattcacggagcaccccgtagatggcgcggaggacacagaagggtatctggttatccaggcggtagaacacgtcgcgcaccaattccatgttctgcatcgcgcttccagtaccatgttgctgctgctggctcgtccccgcaccgttggccctgacgggtaagaggtcatggagcacgaacttgccaaggatgtagcatccgtcgaggagcagcatctgcacgaaacccgcagtacgtctcatggcatcgcaaggcacctgctccatgtaataatgctccttcgcaacgctttcgagggcagtgaccgcatccactaatctcctcagcacggcagccttgtgctgctcgtccaccaggatcagaatgccgtagagcatcaccttcttctcctgctccatcaggtggtagaagggattgtggtggttggggccgatgcacaccgcagccggcctctgcggagggcataataacggaatcttacactcgggtcggttgctccctgtcctgcttctctcccagcaggccgtcaagttggtgagcagagtttcaatgcaaatttctgcttggccttctgctgaataatgtttacagtcagtgttgcaagcattcaaaaaactaagggatatctgccgtactagcagacttaggtttgcatgatgacgatgtagcatagctaaaaaaaaaacactgttcatacgcggcaggaagaaattaattagagagtaattaaattgtgtcgccggtatacaaacttatgaagtgactgtattttagtacataaacttttaaattgcttattatgatgtgcaaacttgtctagtatgtagtgcgaaatagttcaaatcgatatatttgtgactaatcatgttgagttagtctgatatataatttcgtgcacaaacgatcaagggcatgacaaatgtcgtgtttgtaaatgggtaacaattatttcttctattattttgtatatattcacctttaatatgtataattaacatgacttttatatatttgattgaacatatgtgtatttaggtaacctcatcttgacatgaaagcctatataacaatcctaatcagtattcaacttagtgaaattagttatgatgtattattttgggtttggattgtacacactagacaggtttatgcatcaaaataagtgatttacttgtttacgtactaaatcgcacccacctcgcaagttcatatgccagcggtgtaattattgaattaattaaaagaccacaaagcaagctgaggaaataaaagtacagatatattgttcacactaaattcagcatcgccaaacaatataacaaaattgtcacttgcaaattgcaatctactgcaaatctgtgacagctatattaggttgttctttctatacgactgaggggggccttgatacatatttaaatgtatataactatataattaaacacgttaatactgtttttaattgaacaactataacttgacattatccgaaaaaatgtactccatccgtcccaaaatataacaaattgtacactttacaatttatcttaaaacgaaacaatttttccatcagcattctcttcctaactaatcacaccttccaacattcaatatccctacctatctccaggtttcaacaaatgtcaaccttcctctattaaatattcctactttcttaataactgtatctaactttaaaaattcttatattctgggattgagatagtagatttcacgttcactatttggttcatattggatcatcaagtgcaatatggaaacaattaaaaaaatcccctgattgattactaaaaattaattggcttttagcgttaataaatgataattgaacccatatcatattaacagaatggttttcctaccgtaccgagtaagaaacaagtctatcctatatatatcctaatccgttggcttagtctgattttttaacttttagctttaccctgaatcaaattttaaaatttaaagtaagtaattaatggctcagaaatgttgcatggacataataaaactttaagcattatgaagaatagaaggaagaaagacccatgaaatacagaaaaaaaatagaggacatttgagaatagattacaacagtgctcttctaaattgaaattatatgcgtcttgtagcatgctatatattggctatatattggacggccggagcgtagatctaggttttggggccggatacgtcagagtttcaggcgactgataatttatacagaacacaacagaatcatgtttatgttcaaaactattctgaaactgttgcacagtaaaatcaatatgaccccagtgaccattaattaattacatagatacaaatgcactgaagaaacaagccgtaataactattctgaaactgttacagtaaaattaaattaattaatatatgcttcccagtcgacatttctcttagcaaattacgttttccggatcccagtgaccattaattacatagatatatatgcactgcagaaacaagccgtaaatgtgacggacgtatacatagattacatcgtacgtacgtgcttaattacttacctgcaagctccatatcggttgtctcctggtggctatccataagctcgtttctctgtatgctatgcgtgtctagcttgcttctgtcttgctcggtagaattctgcaccactcacacacacacacatatatatatatatatatatatatatatatatatatatatatatatatatatatatatatatagtctaagtgacagccaccacgattcaaaaatatcacatcacatgcgaatatgcgatatatcgagcacgctacatatatacaatgtaaagtgtaatcgaaaccagtgaaagtgaagtaattaaagttcgtgcagcaaccactcaataaaggtgtccaaggcacgtactggccggccgtattggggattttcttgacctgcaggcgggcccaatcaaggcagtcgttggatggggtaagtagtcggttacagtttagaacttggagttgtaataggtattaggactagagtatgagtcggactctatcccaggatcgtctctcataaatagaggggcgtgcctattgtaactgcatggcgacttagcatagcgagagggagcggctgccagcggcgaccggccgtgagttgttgtaactctgatacgctgtatatgccggaccggggaggagcgcccgtaatcagtgccccagagatgtaggctacggctgaactccattaccaaatatcgtgtctcggtgtagtcatcgttttggatctcctatggtgttttcttccgcgtttagctaccgatgtcgatttcggggctggttttataacaagtggtatcagagcctgcgggaggtccatggtagaggcgcgatggaggtgccccacactgcgtagcttgcttgtaatgtccaggaaggggcattggcgcaaggtggagcacggcggcgatcaacgaagtcttgatcggtggatcgaacacttctggaggcgaccggaaccgttgatggccgctttcaatagggagatgaccagacgtggtgctcgggttgatggccgcggaagcgattggcgaatcaatcggtggatcggacacttcaggcgggtggctcgaactttccagtgagctactctcgacagggagacgtgcggccgcatgctcgggttgattgaagctagaggcgatcagcgttctcgatcggtggattcgaatactctgggcggggtggtctgggcctttcgatgagctgcgttcgacagggagatggctagacgtagcgctcgggtcgttcgatggctggaatacggcatacgacttgtcggcttcgactcgtgacttgattgatggtgttcaatcggaagtaggagcgggtggtttctacgtgctgttttttgatgtgctgacgatgtggtgcgtgatggattgctattgtggcggcgcacatacgataagcggcggaatcaggaagacgggcagccaatacagaccgtcattgctctatttaatcgtgttagcacagcaatatgcattggatgcaactgaccggcggtgttcatcgccggcgaggttcagcgggatgccgggaggctgcgctagaggtcgtacgggtgcgtgaaggctgaggaggtcacgggaggtggcgatgtgcatgtgttggtgtcaaagtcgttaccatgtaacgtgaccaaagcccagctagtagggaggttcggtttttttaccgagattgcgcaggtcttgatctgggtgtgtcatggatggagtcggcctaggactcgtctctgttttggcacagaagagcagatcgaggggaaaccatgtcgggcacggaacgggaatcggaggaggacaacgattcgttctgcaatcggactctatttttcccaaaataaaagcagcagaggaccacgggattgcatcacaaagcaatcggaacaaatcacctagcagagggcgagattcgtacccaattttcgcagaggtggaggtgctttgggcagcgaggtcccaggtgcggcaggaggcccattacaaggttttcgggctaatgccacaaaattttgggcaacgacgtgattttcgttgcaatacataggggttattgctaccgaagtctaatttagttgcgatgggggggcatattaccactaattatgtagtgttgcgattctaatttttttgttgcaataactaggaagtatcgcaacgaataaatctgcgttgtaattagggtgatgatattgccacgctttatgttattgttgcaatagttatccatgtcgcaacgaatttagagcgttgttataaggttcatgtatatagcaacgcaaaactactttgttgcaaatgagtctataggtattgcaacgcaaacctaaattgttgcgaattagtctataggtattgcaatgcaaacatgaatcgttgcaatcattctttgatattgcaacaaacaccgaaaatcgttgcaactaacaaggttctctcgcaacaatatttcgtcattgctatagtttaacgaatcgttgcaataggtgagattggtggtgccacttgcagattgttcatgggcccttgtattgttaaactttaagttgtcttgcatcattattgtggcccgggccaggggtcatgaattacgtaattaagtcggccggccaactagctgggctgaatcgttgaaaaaaacaggtatgattaaccctacccttagcaatcgatagatagataaccctgatcagactagctagcgccggtgaccctagtatatcttgcacaatcgccggcgacaccgaagcactcgacgctggcgagaccacaccctgtccctgtctcccaactcgatatctcgacgccgtccgaatcgatcaatatatttatatatattcaggtacctcttcgatcacgagtgcaatgaaaactgttgattctttttttctatatatctatgtaattaaaatttggtttatttcattgcatactatcccttaggcaaatttggtaacggattttctcacttggaatatggcatgtgatgatgatcatagttggatgctattgtctcagtcagatgatgcgtggcaagttggattcgagaaattcattgaacatacatttgaaggtacctatccaggagagactgcggcctgtccatgtactaggtgttgttgcatggcgtacggaacgaaaattgaggttcaacaacacttgcttggtagagggtttgataaggatttcataaaacagaaacgttctgttagtaaacctatggttgtggatgatcgggagattagtgaagccgaagttgatgatgtcggctctgtcgataatttgctttcttcgctaattagtggtgctatacacggggatatcagagataataatattaaggtgccaaatgagtcagcaattttttcagtttatggaagaagctcggaaagaattatacccagggtgcaaggaggctacaaaggtatctttcattgttaggctatttcagattaagtgcatgtacggtatcagcaacaatgccatggagcaaatacttcacttattctgtcttttgctccatgagggatattgtgtcccaaatactttggataaagttcgtaaggtagtccgagatcttgggttggactaccaaaagattcatgcttgtgtcaatgattgtgtgttatttcgtggagagtatgataagatgaacacatgtccaacatgtggggagagtaggtggaaaaatatagattctggaaaactcggggaaggaagtggtattggaggaccaaagaaaaaggtccttcgtcctcgtaaaatacttcggtattttccacttattcctcgacttcagagattatatatgaatgagaccacatcgacatatatgcgttggcacaaggaagaattggttgatgatgggaaagtgcggcacccagcaaactcattagcatggaagcacgtaaatgaaaagttcagggatcggtttgcatctgatccacgcaatgttaggcttggacttgcatcagacggattcaatccatttgggatgttgaatgtgacttacactacatggccggtgatcctaattccttataatctgcctccttggttgtgcttgaaacaatcttattggatgatatcgattctgatacctgggcctagatctccagggatgaacattgacgtatatttgcagccgctgatcgatgagcttaaacagctatgcactgaaggagttgaaacatgggatgccaaggtgaaaaagaattttacgctacgtgcaattctgctctggacaataaataattttcctgcgtatgccatgttatcaggttggagcacaaaaggcaagtttgtgtgtccttattgtcacaaggatactgaatacttgtggttaaaatacggcaagaagcactgctatatgggcc

SEQ ID NO: 15414 - DNA, 1321 bp, Oryza sativa
caagatgccagatggttatgcctcaaatatcaggagatgtgttgatgaaaatggttggaaggttagtagacttaaaagccatgactaccatgttttattacaaaaacttttaccgttggtggtacgccatattttgcctgaagatgttgtgatcccattgatcgagctcagcaggttttttaatgaagtatgttcaaaggagcttgaggtgactgaaattgaaaaactatgcaattcaattggagagaccctttgtcggcttgagatgatattccctccatcattttttgatattatgatgcacttaccagttcatattgcttcggaggctagaattggaggccctatttgttatagatagatgtatcctgttgagaggtacctacgtacccttaaaggctatgtgaggaacaaagcgtgcccagaaggatcaatagcagagggatatatatcggaggagtgccttactttctgtgctcggttctttgaagatgttagtacaaaggtgaataggccagaacgtcaagaaaatagccaagtcagtgcaccacctgctggtctaagtatttttgggagcatgctgtacagtaagaacaaatttcatatcgagactgcatcttattcagacttgcatagaatgaggcactacataatatccaactgtgatgaggccatgccatgggtaaagtaagatatatttatgcctgttatgaatgcagagtgacaaaataactcatcattctgctaatcttttcatttttattgcagtgagcatatagaggaattgaaaaaaaccaacaggggaaatgttgataaaaggcacaaggaacaatttgtatcatggtttgagcgtaaagtgagtgttttttttgtatcaatttcatcaaactaattgaaaatgtgactgatcatacgttcgaagtttttctgagtgcagatgaacattcttcatgcagatggaaaaatagatcaagatatatattgtctatctcgtggtccagatcatcgagttcgtgtagctaacaggtgctccatcaatggatttctgttccgcacaaccaatgtggagaaaaacctaaccacacaaaacagtggtgttgttgttcagggcgaaggcatggactggtatggagtgattaaaaagatcatcaccctcaattttcccaatgacaaagaagtcttgttgtttgagtgcgactggtttgatgttccgggagcaaccacgaactaatccagagggtacaataaagatcaatatggaattattgatattgacaccactcgatttcgctttaaagacgagccttatatactggcgtca

SEQ ID NO: 15415 - DNA, 1299 bp, Oryza sativa
gctcaagcaccatgtagccttgagccgccgtcgctccagcagtgcgccaccgccgttccagtcgtcgccgtcgctcgggaaggtcgccttcgtggtcgccaagtcacagccgtcctcgtccgccacttcgccaccgccggagaccgccggagcatcgtcgccgtcatcaagccgaagaccgccgccgtttcttcctcgtcgccgtcgccgtccgttgctcctccgccgcttctttggtcgccggtgagtttgccgcgtcgccctctacccgttggtgccctccgttcgtgccgaagcgccgccgttcgccggcaagcgtgcgccgtccgagccgtccgagccgccgagccgccgccgccggtggtgacgtcatcgctggcgtcatcgtccccgtctcccgtgagctggtcgtggaccgatcgatctcggccgtccgttttggatggatcgatctcggccctccgttcccgtgaaccgtcgctgtgcgcccggtccaccgcaaaccctagccgctgacgcaataattccctttttccttttcaaaaataattcattattgcgtcataattcaattaaaatccatataagtgtttcaatccgattaaatcttcaaaaattcataactaattcatcttagctcggatttagttggttcaagtctctaaatttttctaaaattgaggtctacatgttaaaaatatccacatatactgttcatgcttgtttatgtgctgttttggtgattttgcttctttctgcttagattccatcgtttccggagagtccgttttcgcagcagaagagtttgaagagttccaaggccagcaaggcaggtcacacagatcccaaacaaccctttaagcatgttgatcctatttaaagctattgtttctattcaactattgcatctattttcgaatgtcattgggtggaattaacctattgtttgccatagcccttttgttcttgattactttattccttgataccttgggttattaaaacttgactagttgagctctatataatggttcagctagatgttagatatgattgcttagccatgcttagaaacattagcacactattgggataacttatgaatcactattatttaatgatggcttaatgatagctcacgatggtcaatcgtgattggttaattaattaatttgccaactaaaacttgataatggtgggttgtgagcacatggttttgatggtcgtgctcatgacaattaaggaccggttcacgagtttcggttgtgaaacattaaccgtgccaaccacaagccagcg

SEQ ID NO: 15416 - DNA, 1541 bp, Oryza sativa
ttttttaaaaaaggggaaaagtttttttttggatttttgagcatgatgtgtacatttgtacgaagtgtgctttttaccacttttgtttttttttccaaacaccaaaacaattttgatgagtttgccaatgtgttcatgaagggggagattgtaaaatcaaaggtgtttttgttattattctgtgatgaacaattgggcattggagattatttgttttgttatttggaattttttcacgaagtggttttggagatgatcggatttacaggtgaatcgcaggattgtcattttatgtgaccggtcagaccgggctgtgtatgccggtcagatcagcggtgatcgagcggtcggaccggccagcccacggtctgaccggccagcccacggtctgaccggccgacactatgtcggtttcggtttcgggttgtttatttgaatatccgagtttatttcatgattatgacttctagatggatactatacgtatgtaatactattgtttgctgctaatgagtcaagttgaagatagcttggtctcggaatagggtttctttgtttgttccatgtgtaggtgactcgatgtctcgggagagtatttgcggtgatggaccgggagtcggcttggggataagacgacgtccgtggtggtcagagatcatgcgggatattaaggctagagttgatgcacgtggttgatggagattccatatgacatacgatggagttattgtgtgcgtatgggatgcggagttgaatttggaaggagtccaaatttggtacgattggttatgtaaagtttctttcttgtactagtgggtttcctaaggtgtttaggactcctagtatgagtttggttcgtggctttaggctgcctacctcatgtataaatagaggggaagcgtgaggcttcccggtatcgttttatagagcaattgaattgagttttgagttagggtttcgagtttagtcgaaatttttgtaaggagtgttgttggtgcactttgtaaacacagagagaagtaataaagtcgtcatccactttagagttctttgatttgtgtttcaccgggtttcgtcggtctaaccggcggtgcaccggcggtcagaccggtggcatatgggtggtcaaaccggcggcggcgacaggcgaggcaggcaactttggcggtcagaccggaggttcaacaccggttagattggcggcatctactcggttagaccggcagatcaatctcggtcagaccgactgtcacaccctgaaaattcaaaatatataaattgttgtttaattggaaattttagaaatgattttaaaaagccttgaaaagaagatctaattttaattaataaattccaatataaaatggggccagataaaatttcattaaatactttgcttaattctataattcctagatttttctgggatttatttgagctaaggaagtatttttaataaatggaattgcatttaagaaataatttaaattgaaaaaggttttaaaagttcttcttttggctttgggccgaaagtcggccca

SEQ ID NO: 15417 - DNA, 641 bp, Oryza sativa
acgcaataatgaattatttttgaaaaggaaaaggagggttattgcgtcagcgggctagggtttcggtggaccgggcgcacgggcgacggctcacgcgaacggacggccgagatcgacttgatccaaaacggacggccgagatcgatcggtccacgaccggctcacagcgaacggccccgatgacgtcggcgatgacgtcaccaccggcggcggcggctcgggcttgcatgctcgccggcgaacgacggcacggcggcgcgaacggaaggcaccaacgggtagagcgcgacgcggcgaactcaccggtgaccaaaagagtggcggaagatcaacggacggcgacggcgacgaggaggaagcggcggcaaacttcgggtcgacggcggcgacggtgctccggcggtcttcggcggcggcgaaggagcggacgagaacggcggcgacttggcgatcacgacggtggccttcccgagcgatgacgacgaccgagacggcggcggcgcacggctggagcgacggctacgacggcggcgctaggttgcacggcgctagagctcttccggcgacgagaggcgaaggcgaaggtggcgacgggtagaggagacaccggggaaccttttaaaggggctcggaggcgacgg

SEQ ID NO: 15418 - DNA, 1037 bp, Oryza sativa
accctgcaggtcgaacggcttcagcaccggaaacaagtccgagacgttgggcgttccgaggagctcggtgacctctgcgacgagacccctgaactcgctccccaccgccgacctctcgctctcgcttccgatcgttcccccccacatggtgcccgtgatcacattcatggtgttcaggaacatctgcgcgccgacgtccaccggctcgccgggcttggagtggaggtaccggagggtggacctgaactcgcgccgacggaggccgtgcacgctggcgagccccgcggggctcatcatctcctggacgcagacgcggcggagcaggcgccacataggcccgagcgggttgcccacgatattctgtgcgccgccgaaggagacggcgtcgccggcatccagcatgacccggttggcgaagacggagtcctggtcgcggagcacctcgcgggccagctgggcggaattgacgacgatgtccaccttggaaccgaggcggatggagaggatgggcccgtgcttcgcggcgaggctagcgaagtaggtgtgcaagtttgggtcgatgaatgggaggctgccaacgagaggaagccccaccggtcctggtggcaaacggcggctgcgccgccgggtgacggcgaggtacagcaccgttggcacaagcaatgcagcgtagagaagatttgctgttgccatgggctgcatgactatggagatgcatcactgtgagaagtagtagcagtatcttatcaaataccacgctctacccaagcgatctatggatgccactgtcagctagcttcaggccggatttgaaaggtatcagtcgatgagagcaattgagattgttgttttgtcgacaacgtaaaaaaaaatcattctcacccttccattcctcaatctattatagatgtggatttttatccctacagggaacctcccctcattgtttacatgtcatctgaatagttattaaaaaaattaaaaaaaattaacaatatagattaataagaaatatatcactccataaatatgtatga

SEQ ID NO: 15419 - DNA, 521 bp, Oryza sativa
caatctatcttgaactaagcaaggctgcttgccatcagattttggatttccaagctggccattgctggaactacccatggtaaacacacgaccagatgtatctagggcaacagtcatattatgtccacaagccagctgatgaaaattgtactctaaaagcgcttgaacacatttaggaactaattttttttctttgtccccatggccaaggcggttcttatctccatcaccccaggtatataacttcttagacatcacatttgcacctgtctgattagtaacctccacaattgctgcagaatgccaaattccacatgcaactttgatcgttttgaatccactcaaggcttctacctcttttgggtatgctaaagtttcacggtcaccatgtccaagaacaccaaatgttccatcaccaaatgtgtaaagttttccacttgatgtggtcaaagcagaatgccatgagccacatgcaacagatagaacttgaagaccttctaagggccctgagactttctttg

SEQ ID NO: 15420 - DNA, 1658 bp, Oryza sativa
cggctcaggctctggctccacctccctcgccttcgcctcgggctgctcctgcggctgcgacggcggcgacgagctgggctgcgacgattcagaggcctctggtctctggatcttgatgttaagcatgaggccgagcacctgcatcatccggggatcggagaggtacatgttgaggctgctggggttcctctgcacatcccgcagcatctgcatgaagtcgggctgctcgaggtatgcgcgcgtggtcgggtcggaggcgatcttggtccagagctcgggcccctggaacatctggcctatgccgtcaacgccgctgggcggcgggcggcgcggcggggcggcggccgccttcttggcatcggcgaggccggccttaaggccctcgttggtggggtcgagggcgaggcccttctcgtaggcggcgacggcgctcgcggcgtcgccgaggccgaggtgggcggctccgaggcgggagtaccccttagcccagtcgggcttcagctcgacggtcttctcggcgtcggcgagcgcctcggagtagcggtggaccgaggcgagcgcggcggagcggttggagtagaggacgtggttccccggggcgagcgcgatggcgtcagtgaagtgccgcgccgcctcctcgtagcggccggccgagaaggccgcattacccttcgccttcgcctcgtcggccatggcacgcggcggcgatcagatcggcggcgcgggctccggaagcttctggaagggctctggcggcggggccggaggagagggaggaggggaggaaaagtctggggttagatgggggattaaggtctcggagaagatgaagttttataaaatcggcgaccactatgattgttgcggcgtggcgtgggccgtcggatctctctcaagggttctcgaagcttccgcttagtactattaacgcttattacgctttctcctcatggaagcgaactctttagcgtgatgtaactctccgctttgtccgccgtacagtctccaatgtgggctgggctggtttctcatcagttggtccggcccgtgttaacttcgcggcttgacttgttttagttgggctgggccacgcacgccgaggcggcgggcggcggttgccgtggctgcagaagacgacgaagcggcggcggcgccacctgtccacctcacgccccacgcgtccgcgccgcaggctaccctccttgcatggcggcatggcgcggcgcctacttcggtgcttcccttcaaccacctcggtgtcccgtagagtcgtaggcgtggtattgtcgcgcgcggagaagaggggagggatatggcggcgcggtggtgcttcgcgttgctcttggcgctgtcggcggccgcggcgggggccggagccaagcggacgtgggagccggtgattcggatgccgggggaggtggtggaggaggaggtggccaccgtgccgcgcggcagcgagggcaccgaggaggaggagaaggacggcgtcgggacgaggtgggcggtgctcgtcgcgggctcctccggctacggtaactacaggcaccaggtaagcgcacgggtccagtactccagtgtcgtcggcttcgccgtcgcttagttcgtgcgcgtctggagctcgatttggggggcttggatgatgatgcagcgtggaactg

SEQ ID NO: 15421 - DNA, 993 bp, Oryza sativa
ctttcgaggtacttagagacagtgtcatactctgggattgagcccaatatggttggctcaatcgtgttctttaccgcagccaaacaattcttgttggctgaagaccatttcgcatgttcaatgtcatacgacatgatgagggaagcattgtccctctctctcttttgccattcagcatctgactctttttcacctctgaaaatttcagcaggttctataggacatggggtagtcaacacccagtccacctctcccaagataaaagcaaggtcgagttctcttttccattcttcgtagttatctcctttcagggtcggaatatctttaatgtaacccatcaaggagtagccacctaagataatcatgtattgtgagaacaaaattaacattaaaattattatgtattaagtctacatcaccgttgggcagaaaatagacataacacataaagccataactataacattgcaattatcaacgttggtcagaaaaattacaacatcatagcacataattaatgttcctaaaattaaaatctcccgttggttcgaaatttaattttagaaacactaattttcattaatttcatctatttgcagcggaagatctatatacaattcatataaattgtaacaaaactctgttgtttacgctctgtaaaattctcccgttggttcaaatttaaacagagataaaacatgtaaaacaattcaaaattctattgtaatttgcatgaaaaatacaaaatacatgttcagaagcatttctcacatttatctattctctaaacaattttcacgttggttcaaattgcttagaaataaacacaatcattgaacatattgaaaatgcttccttcggccgagggacttttattaaacttcctttcttttgattcggccccgagggacctaaaatgaactttttcggcctttgccagtcggcccacggccgccttgcgcgcgggcgggcgccccctcccctttccccagg

SEQ ID NO: 15422 - DNA, 4112 bp, Oryza sativa
tataccagcttccactgttttgcacatcccaatccaatttcccgacctctgtatccaattccaatatgtagttaagcattgtttactatcctgcatatgtcatatacaatgtttttgatcagtaacctttttcactttattaattagagatagtcaattagcaaaaagatatgtttatttcaaacttccactgtatttattttacaggagcagtggtggaaaggatgtgggggatcaagcgagctcatcatcccataaatcacaggatgctgctgtgggttatcttgtccacatgctgaagtctgcgcggccgctgcgagactctagcaattcacctcttacatcaagggttgaatctgttgaaggaggtaatgtcagttctttcatgtcccgtaggacatctgatgcgctcgaggagcttgaatcttttaaagaaataaaggagaacctgcttgcccgtagtagatcaaggatgcaagagtcattggataaatccttgcgccattcttaacatagctggtgaagtatcccaaccatttaaggaggttgtgtggtaagagatgttcttaccgcgggcatctccatgtgtataactgtcaaccggcgcttgttatgaaatgaggatatacaagtcgttcattcttaaactcaagcaggatcatgatccacctttgttcatagtgttttgtatgcaagcaaaaccaaccggatacatgcatcctgctggaagtatatgatgatcaccgtgtgcgtacgtgtgggattatgtaatcatactaaacctgtttatttattctattttagctcttaccttactgctcttaatataccaaactgtttgtttattgttacaaattttttaagtcttgagctcttttttttttctgcacttgtaaataccgtcctattttctttgttcttctgatgcgtgaagtgtgcttgaatggatatgtgacatgaactttctcgaatttttttgtaaggttgaattttctgctctcagcttgttctatgttcgtatcccgtgccatcctattgttctggaatttgtcatcccggcgagctttttagcacttcctacttgggcagtggatccgatttattcttcccgtttccctctcgtgacgccgacctttcttaagggagacgtctctgtgaacaaacagcatgcatctttgagtgagacacaactcgctccattctgctggatacgctacttgttgtatccaatcagttggtggttacggaaaagtaagatgttactcacaatatgtcgcatcagtttcagtttttgtaagaattattttgaacatgtaccattttccttcagctaaagcatcattcctgaaaagattgcgcgatgagaagcatctcacattttcactttcagtgagagcactgcactggagcacatctagggatgaaaacggtatgaaaatttcccgaccgtaccgataccgtttccgcaaaactaatataataataatatttttttaccgatgttaccgttttcaaaatttagtttttttaatttctgtcagcgtgacattgaagttggctctaaatagatgaatttgtaaatataaaaattttccgaccgtttccgtttgttttcgaagaaaataataaaataatataccgtttccgactatttccgaccgtttggcacatcccttgaatcagcgagtccaaatcactcaaaggggcaaactgcaacaactcccacggttagagttaataccgatacagacttgggacaaaacgccaacaagcaaatcggagcaccgaagtcattgatgcaagccacggatggcgcgcaacctgatggacgcactccagaacgagtcatttccttgtttatcagtcgattagcagtctaaatcgagggaacatcaggtgagacggtgcataagttggaaatgcgtgccagtattgtatacgccttcatttgcatggatcactaatgacatcgctccgggttggcctccaaagttggtagtacactagactttatactccatgcattagatggtgcagccgaaagccttaacgcacaaactgatgagaaaataatatttacggttaattattttttatgataaaatactgtaccataaacaacaagcggccgtactgagtttgtcaatatcaaaagatacatcaatctaattgatgcaagtgtgactgcgtgtatgcgagcacatttgtttataccgtacctctttaaaagtgagatatcagatacagtagtacaacgttttccttcgggccacacagacacgggagccaaatattgcagtattaatatctggaaagtcaccggccggaagaaagagctcggcacgtcgactgcaccggtgaaaaacacaggatcggtggccgcccactgcaccggcgagcgcaggacgatccaacacatgtgttcccgagcgaagccgtgctcggacaccggagtagctagctttattctcgccctcatggaaggcacaaagccacgccctcgcccacaactaaactaaaaaaaaaatgctcgcattacaaacgtcgcgccaatgcgccatgcctctggaccatgcaagacgtcgctgattggaatagaaactctctgtgcaaaatgtgcgcattcttaatcctcgcccgatcgatccaaggagtgtcgtttacaccacaaatctcgatcaacaccaaacgtttcaacgctcacgatcacatccatgtatacgttcatttactccgtattataggtacattttgttactgcgttctgaaatgtgccaactttttcccatggtacaacaaaaagatcgcgatttcgctataaatacctctccatgactccatgcaagctccaatattcccagttcaatctccatttgtaataagctagcttagctcagcttgtcgttgatcttgcactactctttgcaaccatggctatcgaccttggttgtcacgtcggctgtgcatcgccagagacgaaacaggaggagacggcggatcccacggcggcccccgtcgtcgtcgacgacgtcgaggcggcggctggtgggcgccggccgggcgacggcggcggcgtgaactacgtggcccgcgcccagtggctccgcgccgcggtgctcggcgccaacgacggcctcgtctccgtggcgtccctcatggtcggcgtcggcgccgccaacggcaccaggagggcgatgctcgtgtcgggcctcgccggcctcgtggccggcgcgtgcagcatggccatcggcgagttcgtgtccgtgtacgcgcagtgcgacatccaggcggcccagatcgagcgcgcgcgcggcggcaaggacgccgacggcggcgaggaggaggaggagctgccgagcccaacgatggcggcggtcgcctcggcgctgtcgttcgcggcgggcgccgcgctgccgctgctggccggcgggttcgttcggccgtgggcggccagggtcgcggccgtgtgcgcggcgagcagcctcggcctcgccggcttcggcgtggcgagcgcgtacctcggcggcgcgggcgtcgcgcgctccggcgtccggatgctcgtgggagggtggctcgccatggcggtcacgtacggggtgcttaagctgttcgggatgcatggtgtttaacgggcaagtctttatattttcaccacgtaaataattaaaccaaagggattattaccaagatactccctctgtattcaattacttgtcattggataatactctctctgttttttaatgacgtcggtttagttcaatgtatttaacgatggatgtagtattcattttcaaattgactcttattcgaagaaaatgtataaatacctaagagtatcctatatcgataaagtgttgcaccctaaatataattgtcaagctttcatacattatgatctgatcattcaaaatttttattgatggtcaagctaaaattacaataatagcagttatttgaaatcggatggagtaattgattaaacacatggtgttaactactctttagactttagggaggagtacgttgctaatctaggtgaggctgccggctgagccattctattttcgtttcaagataaataaatttaatatgggatacgatatatccta

SEQ ID NO: 15423 - DNA, 2721 bp, Oryza sativa
cagtgccagcagtacatagtgccaaatgatgtaggtttagtatttttgttcaacacaatttgtttcacatcagatcgaaatgagctgatatattgctgcccaaagtattccccgccctcctcccccccaacccaaaaaaaaatatttgactaaaggagtggaggatctgatcgtttggaaatggataactaatggaaaatatatagtgcaaagttcaccaattcaacggaatgaaatctcaccataaacaaaactgtcttgggaggcatggcccctagccaaatgcaagatcttcagtcggctcgcactacaaaatagggtatggacacccgtttgcaactcaaggggtggcataataactacttcagctaactatgcttccgaaaccttaaaaccattgaccacttactgttcgaatgctcagtatcagcgtaaattcggttcggtgggctcatgtggctactgcaagcacacatcatcttgaggtggaatacgagtaaagacttgttgattggtggatacaaagaacaaataacccagaaacaagaaaacacaaagctctcaaatcagttttcttgcttatcgcttgggaaatttggaaagaaataaatgcaaacattttcagagaacaacaagcaacagtccaccaaaatagttaactgcattcaggagctgggctgttggagtttgcccaccgcacaacatattgagttgttgccatgggaagcgaggaggattgacatgcaaggatgtttgcaatcaagcgagtacaattctttcttcttttctttaacttttggttatgtataaaccctcttctattaatatagggttaattggatccatgccaatgcaaatttcccatattagaaaaatatcgctactattcacgatattggttacgtgccacaggaatttagaaaaatcagacccatgccactgccgtcaagtttactgtcaacctccatcaactctctccctcaacttttcttcttttctcttctcttctcttctcttcggcaagtgattagtcgagcaaggatgagcggtgagcggcgggcgggagggctcgggagccaccaccgttgttgtaacgctccgcttctcgtgagacgttaaaaactaattcggcaaatcctaattgtgaaaaattttgtcctttgagtgcgagtctaagtcgtgccatggatctcggtttcaaatcccattgttccctctcatcgaaatcaaaatcctccgcctcaaatttcctcttccaattcaagtctccgaaatctaattccgaaagtcaatcccttcctttgaatcctcgccaaatacatttccgaatcccaaaatatccaaactcccgttttgtttccttccttgactccttgaacccttgtgtacaaagtatcaaatttagattcaaaacccaaactccaaatctctccaaatcaaaatctttcagcaaaagtctattttgcctcccttgtcgatgggctgattcctctatctcccggcccatcccctcctctcggcccagctctctcgcgtgtgcgtcgcacgtgttcgggagcgagagacagcgccgtctcctttctctctctctctctctcggcgtcgcttcccgccgacgccgccccaaaattccggccgcatcaccatttcccgcgcgctcgcgcatggccgaccagcaaggacgccgctaccaccgccttcgcccttcccgcgcgggttcgcgcgtggccaacgccccggtcgccgctgcgtcaaaccctggcgccgcctgcgtcgtgccctgccgcgctgccgctccgccgctccacgccgctagcttccaaggccgagagaggcagcccctgtctcactcccctctccctcctccttttcccgtttcggcaagggtcaagccctcatttccctcttcctttcccctttttcccgaccaccgccgatgtcatccatggtcccagcagctcgcggccaaagcgcggacgctggtcgtgcgactgcaccagctcaccgcagctcctcctccttgaccgccaatgtcggttcttcctccctaaaccgacattgccatctattaaaccgagccgccccatctccctctcgttcattccctcgccaccaccgtgcccttgccgctttgctaccgccgtcctcgcctccctcctccatcgcgcgtgctggtgaagccggcgtgcgcgcgaggagctgacgcgggactccaggcactgtctccttccccttccctggcccgaggccggagagctcgctcccgcgtcgtcggccgctcgacacagcgcccgtctcggctcggtagtgcatctcccgttctccctcctcgctccctctcctctccttagctctgggcagtagtgcgagtagccttccagtagcaagctggcgccgccccaaccgccgcagctgctcgccgtaggctcgccaccgtcgccgcccaaactcggtagtagctgctcgtcgccggccttcctcggtgtagctccacccaatccgactctagaaatgaactctggaggtctcgtagatgctcaagtccctaggaatcgagctctcgtcgcatcgtcgtcgtttccctctttagccgccgccggcaagcgccgccgcgattcgtcgtcgccggcctccttccggtgaatccgagccagtggatcaacccccttccttctgtatcgtcgtcccggtgtactccctccctctcgaatcgtcgggttg

SEQ ID NO: 15424 - DNA, 1766 bp, Oryza sativa
cggcccattggctcggccgcgccgtgcttatcccttggcccgtacccgagccgcccaaggaagtctaaatcccatccctccttccttttcttatccaaaggattaataaatccttttccctttttcataaatcaattccttattcccaaaattccataaatcatttcctttggtcccgcgcgtctgtgactgtcaataatattcttgagaatattatttctataaattccataaaccattcctcttattccagaaattccaaataaacttcaaattcatatctctcgatccgtaactccgattgactccgttacacttccagtaattctctaaaattgagatctatctaatggcactactaattagtctaaataggatctttcttttggtcttttgtttaggttttcgattgtttgcgtatagttgcggttatcagatttttgtcgatcgcgggttttctcgaagattcgtgaagctccgtgaagaccttgagcgaggcaagtcaccctttgaccaattgatcctataattggaaaatcattattattttgtttgcaacttgcattagtagaatcacacacttaacttgcttggcctcggtttgcgtgccaaaccgacggacctacccagtagtcgcactaattcctgtaggttgttctaccctgattccttgtcgttccacctttgtggtacttcggtatccatgttctctgagcgcgtatactaactattccacatacaccgttgtttgtcgataatttgggaaatgggtttgagaagtcttgaaaacccgacatgtggcgtcggtgtgtttgaaaacaaaatagattgtgaaaactcacgatgcgggggttgtgcctatgtggtactgtcctgtattcgcatataaggaccgattcctgtgggaaattcatccgagcatataataagtgcgaccacacgggtgcaatgggacgcccctggctgagtaattagctaatcgggggagccatgatgccaagagacttgtggattcaacggggtggtgtcggggagaaccctcgggcttcctggcacagtatggtctgggacctaatctggtgttggtctgggacccctctcgttggcatatggtgaacctgtgtcggctttcgaaatgccttgtcatgaaagccttaaggtctcccgacgtggctgatctcacgggctgggtgatccgggttagtaatgtcgtgtgggtaaagtgtaccccctctgcagaggttaactaactgttcgaacagccgtgcccgcggtcatgggcggatgtgaggtgtttcctgtagcgtagatttgtttgcctgtgttttgtgaaaagttgttgtggtgtgggaatcgttaccagaatcagcctatgtggtagatggatgacctgagtggtcaagaaacgaatctgtgtgattcgggatgtctaccggcatcatagactaggcttctcgagtagaagcggattgttgtgctactaggcagctggactctgggagtccgagaaaatgaaaaaggctctgggagccgattaatcaagtggaatggctctgggagccgagaagtaatgatctgacccgggaggtcggtacattactaaatgagctgttaaaaaacatctcttaaggtcgaaacgagacgcaagtctcttttcggcccaaacttagaaagaaataaatcacttagtgatttcaaaatgatttcaaaacaaaagatttgcaaaaataaccttgcctctcttccaagcttgcattaaacaccta

SEQ ID NO: 15425 - DNA, 11704 bp, Oryza sativa
gagataaaagagacggggcgcgcgcgtgtcgagctagccagcttgccagctgctcttgcgcggagcagcggataaactcatcggaggctacctaattaaccaagcttgcttcctctctgcctacctttgcctacaagtaggtgatcatacgatcgagccgggatgcgtatgctggctggctcctctcttatccgtcttgtcgatcttttattcttttgtacttgtgcccggccggcggccggcggcgccgttgctgtatgtaaattctgccggtcgtctttggcacaggttgtgagcgtgaagggtggtggtggccgccatagctatagctcgtgggattaagggcagccgcgcacaatcgacctgcaaagtgttgccgggagaacagacgcaaagaagggagaagagggcgagcttgacaactgcagctgatagggttgttggttgatctcattgtgaatttgtgatcattggaacaaacaagatttggtgctcgggagtggtgtggattgcgcttcggttcttcctgcagagtaataatatcagtgatctccctccctagctctctcatcatgcataattttttttcctatacaaatttaaatatgttcttgatatagtctctagctactgaatgttttcaccaggaaaattttcctatatacacagaagacataacacatcgacaacttctttattaattgttttcggtctggtgttttttttttcacctaaaaaatctatggcagtttgtgtgggtgtttgtcatcataggggaggcatccagttacattatatcagggtccagtttggctgagatgatcatttcaaagctatatcatccaaacaagctgcacatgatttccatgatttttgtatagaacattgaatatatcaaaataaagagttataatttcagatacatgcatataaacttttccaaatatgaatttctctaagaaatgtcaatcaataataggtcagaggtaagccattactagtctatactttctgttgcttatgatcgtttgttttgtgaatattttaagaagtcatgatgattatttcatgtcataccctaattaattttaccaaaaaatatgttctaaccgtgcatggaggaaacaaggggaagtatgtcagaccttagggtgcatgccctctcagttcatttcatgaattcgatctagacagttatgattttttttttgaaataactgaataacacggattatagtgtcatatcttagggcacaaacagttaaggtctaagttatacttccatttccgaggaagctagggttatgacattaggatatgcttctcttttgtttttttagaaacatagtataaacgcagacgtttaaaacacgtgcacactcatctctttaatttgattgatgacaaataaaaatcttctaagtttacttttacttattttccacatcagttctctccctctcatgagatagaaaataaatgcattgttgtatttgaagttagacgtactatactccagagattctctacagtcaaatgcacagtgcctttgttactgacatgtgagcctagggatcatcggaaccacgtattagtaacaaattaagtcatatgacttcgactgtagaggatcctgatccatacactccctcttgtcgatagtatttaacgttgcgcaccggccggcagctaatacagatatagttgattttttgtcaaggctgtgtatttatcaaaagggatgtgtacatagatagcttctttgacacaaaaggaaacctaaaacattgaattaaccaggtaatcgtgtatatgatgaaagtatggcactttttatctagtgtcatgattgctagcttttcctgaaaatatcatcgatccaattcaaaatgaaacaaaagctaccgatccagttgtagaagaaatattacaaacgatcatgccatctaactaccagacttggttatgaagttagcaatgttacagcagacgaaaaggagataaaaggaatttttcgtgctgtttaattgcatatataatatgttttttttcttttgtgttttctcattggtttgatgatgcttatttttgtgtgatgtttttggatcattctttatgcatctagatgctttgttgtgtatttatatgttagtactattctttatcctgttgctaattactacacgtactggacttaattaatatgtcaacgccagcatttcaaaaacttatactaaaagttatgcatgtccttgcagtcttgctactagtccattagtgaataagatggacactttctcccatgtgccacctggtttccgctttcaccctactgacgaggagctcgtcgattactacctgaggaagaaggtggcatcgaagaaaatcgacctcgacgttataaaagacgtcgacctgtacaaaatcgagccctgggatctccaaggtaattagcatgcatgcaagttgatcgaagaatcaaaaaaatcaaagttaggtttgcgattgaattgagcatccaacatgtacaaatattgcagagaagtgcaagattggcatggaagaacagaatgactggtacttcttcagccacaaagacaaaaagtacccgacgggcacccgcaccaaccgggccacgggcgccggcttctggaaggcgacggggagggacaagcccatctacgcccgcagctgcctcgtcgggatgaggaagacactcgtcttctacaagggccgtgcccccaatggccagaagtcggactggatcatgcacgagtaccgcctcgagaccaacgaaaacggcaccacacctgtatgcatatatttgatgtttggaatttgctccggtccaataaaaaggtaccgtaccttatggtaccaaattgttttttatcatttgatctaacaatgcccaccctgctcagctagatcaaacgatcaaaaatgatttggtgtcatgaggtaacttgagatattttttattggatcggaataaatctcttgatgtttagaatgagattcggtcaaaatccgcctcatgcacctaagtctgactaagtggttgactgatcattggtgcgtgtaggaggaaggatgggtggtctgccgggtgttcaagaagcgggtggcgacggtgcggagaatggccgacggatcaccgtgctggttcgatgaccacggcgccgtcggtgcgttcatgccggacctcagctcgccgaggcagctactgccgcaccaccaccaccaccacccgggctcgtcggcggcgctgtaccacggccaccaccaccagcagctgcagcagatgtacggtcactgcaagccggagctggagtaccaccacctcctgccgcaggaggccttcctgcagcatcttcctcagctggagagccccaagccgccgccgccgcctcctgcggcggcggcctacattggcggccacctcggatcgtcgtcgtccaccgcccttactactcacgacgacgaagcctccggctccgccgcgcagcagcagccgccgtcgttggaggctgtttacatggccggcgccggcgtcggcatcggcgtcgacgcgtcggtgacggactggaggctactggacaagttcgtcgcgtctcagctgctcagcaaggagtccatgtccagctacggatcccatccggctcaggtgtttcaggctgcagacggtggcaagcatgaagaggctttggactacgcttcgacgtcggccggctccggcggcggcgaggctgatctgtggaaatagcttcactttccacataaatataaatccactggacaacatatatacacacacaatttataccatccaaatctgatctagccaagtgtacaaatatatatagctggctatatatatatatcaagagaaacgcacgcatacgtaaataataagtatgtaaccaaagtggttcatattgtttgacatcagatcgcgggatctggtgttaataagttagctgtaaggtgaagccaaggggcttcagtaactaacttgacacaatttgtaaaaaaaaacagtcgagctgtagatggacgtctatttgtgcagtccatcattcgatacggcagctatggtcgctgccgatgcgtcagaaatgtttgtgaacttaacagatgtatcccaattcattgaaaagaatgataagtttatttactgacagaagcactccattggttattagctagtgcaagcagtaaccagtagatatgcaaggaatgaattcggcaacactttgatatacatatatatacggcatcagtcgttcagtacacataacttgtctacagtcctagtttacctgatctctctgcaatgctacaacattcgcaaaacgagaacaatttctctgaatcctgaaccgatctgctttgtcttttgttcagtctccaatgtatatacagcattcagtgctcaatttctgcagtatgctggataattcttcttttattttgcgtcacacataccagttgcttcatcgcagaaaccatcacggtccagaagtttgggtggtggagcactcaaaagaggggaggaagggctcccatatgcatttcggcgactgttgccgcatccaaggcttttccgtgtgctgacccctgttaaagggtttgttccatttgcatatttgcacaaagcctacataccagtttgcctaatattagttatcaggattatcttttgttttctgtataaaagagaatcagagaactcatgcaaaacattgaagatagaccccaacatggcatcatatggtgattcttttatgtatcatccaaaattagttttgaccactgctgaaacagtatggcaccggttctcaacttcaaattcatatgtcacagatgcgggacattaggattatgcaatgtttgttcaagctaaagattgtgttgttagcagttgagcacatggaacttccttcccgaagacatgagacataacagccaggagataatagtcaagttcatgtcaagattctcttgtctgaatattcggttttctcttccatgacacttacttctgcatccatacacagttcgttggccagtgtttaaaaattagtaataccaaaatcagacagcaagcatccataataaaaggaacatttttagaatctgacatgctcaactgcttatcaaacacgtcaaagaagaaaaacccgtggaagaaaaataaaaggaacatttttagaatctgacatgctcaactgcttatcaaacagacccgtggaacatgcaaaaataaaccttagtttgataattactacacgtgatagtagtgtcattcaagtttcatgtacctgtttctgtgtcaggtcaataacagcatcactgaagtctgcaccttcaatgattgctccaccaagatcgctacgcgtaaggactgaccgtacaagcacagcatttgtaaggttagcttcattgagcacctgtcaataacatacaaactttcaatacatgcttaaaggttactttgccttgaaattattattcctgaagaactaaacgatgttgtaaattaagaacaggagactccagtagttgccttaaaaactggtacattgaacctggcttcatattgaaagtaacaatgcattcataagcatttagcaccaaaactaatatatgaatcatttactacactgatcaagaattctgatgcattatctcttttaacacactgatgtcaaattccgcatttgcacaactaagtgcatcacccatatgcccttgagcatcacaagtccataactatatacatgtatttgcagaagatactttgcacaagaaaaacatgacataaagaagttgtaggtttaccatgcgatccatcaaggtatcactcaaatctgcacctgcaaaagaccaaacaatagtacagtgaaattgtgtcataaataactgcatgggaaggttgaagtattctgtaaccattcagatgcagtcaaaagttacaaggattttgaaaaatcagatgcaggactctacttctgcaattgctttcactaacaataacaaagacctaagtaccatgttggttccaattggaacaaaagaaaatgaagtttattgtttgcctcctgatcagagtttaaactgggaaggccttagtggagttcaaacaagggctctctatgatatctctagtgcagtgtctccctgttaaggcatatcactagagtacaggactactaaccacaaaggcacaaaacaggggtaattatttgcatcaagcatgagtgtataataacttcttggagggagtttgacacatccacatactgaaaagatgttgtttcacttaccagtaaaatttgctctataagcaacagccttttcaagataggcaccattgaatgtggaaccactgaaatttgactccctcatatcagcagcagtgaagtttgcccgcctatattgataaatgttgtattaaaaaggaaaaaaaatgatctctttcttgagccatagggaaaattcataacagaaattgagggcacccaacctattaattaagcatatcaatatatctttcatatgcagagaattgtaatatatgctaaaggtggacaaccatgccaagctgaagcagtgatggtaaagattcaaaattggctgctcatctacagattgttttttatgtggctgattactattttgcgatattactattttaatcttccaccctccacataaatgccaatatgttaagcaataaatgccaatatgatagtactatagtaaaactgcttaactaagcaaactttaaactgcaagagcttttatgtcttatctatagcctgcaatggaatcaatgcttgaaaaaaaatgcataacccactggactccagagattgtgtctatctatccagaatactaagatgatgatataacagcataagcatgagctagagaaaagtttgtatcaacacttgcagagaaccaaaattactttataacccaaacaggcatagaccaaatggaatttctgtttatagctgaaattggaaacacaggattcatttggttcaattattacataaaacctatggtaagcagcaaacatttagcaccgcagcacgaaagaatactaatttgggatttgtgaaattaggcatccaacctgaagttctcattaacatggacggccttcctgcaatgatacaagcacggggcgaagaatatcagcgacacgaggcaaaacgaaaggatccgaaaggggaaaggagcccgcgtaacgtacttgaggtcggccgacccaaactgcgcagcggagccaatgccgaactccccacgctgctccgcctcgaacttgttaagatccgcgtaggccggcgccgcggacacaatcgccgccgcgagcgccgcggacaccgcggcacgccacctcggcggcggcgacgccgccgccgccgccgccgccgaggtgctcaacgaattgccgtcccgagaaccccctcggttcgcctggcaggagacgtgcgggaggcggcgaagagggggcgagcgacatctccacggcgtcgggaacgcgcagggcctcgctgcggccgcggcgaggggggaggtggtggggagagccatggcgggggcgtgtgcgcgcgcgctctcgcggcgtgggaggaagcagaagaagagagtgggtgtgggtgaggtgagacgtgttgtggctcgcgcgcgaacacgtagccggccgcgcagccgtcgcgccaccgccggcacgacgcgggggatgcggggaaaagatccagagagcgcgccttgtgggccgagagcctgtagtgggcttccgttatcctccttatgggcctttgccatattgggctccatggctagcaaagcccatgcaggtatctggcccgatgtaacataacaagatggctaaacttggcccatgaatgccagtgtagtagtagactgtagacgttgacaaaaactggtgatgagtacatgctatactggccttggccgtggctagttagctgtcatttctgtcttcacgctggccagtcacttcgttagtatagctacagtagctagtagccgtaattgagtgagctagtagacgcgcacatgcatgtattatacgctcgtatcgtatatatgtacagtacagactacagagagtacacttgctgcaacctgtagcaggctatacggctatacatatacgtataccgggcgcgcatcatgtacatatgtacgcggtactgccttgtcgtaaggttactttgatttgccgcgagatgccggcaatgacgacggtctgggttggaatctgtaacgacctgacccaatctgctcaaccggcatccctatcatttctgggctctgatgatcagatgatccttcagaacagctagctctggcctgtctgccggaccacagcgaagctatagcttagcttgagcaaattttcttttctgaaactgttactacttactgctattgcttgtgtattaggagtacagcattttctttcctcttctcttacgcttgtttaattagcgcaccctgcctgatgcctatagtatatagctactgttgtataggagtgtattagggggtgtttgagagagagggactaaaaacaccctcttttcatgcagatgcagctagccctaagctagctacaagcaggagccatggcatctaagttgacttggggattcaagactgtctactagctgctgctgcatgatgggcgtcttcgttgctggagtatcctactactacactgctgctgcacgcgtgtcatgcataagttttcatatttactccattattagctagtacccctgcattgcctctgcatctcagcatgcagaattgcagatgcagggtaagctgcttgcaggtttcagcctagtacgacgctttcctcagccccggaccattctatatatccgtattttatttgattaattatgcaagcgtaggctgcaatgcagtataagtatatagtagtataatacgattagtatatatgcttctgtattaatgcatcatttagcaagtatttcaaccgatagcatgtaccagactcgcaaccattcaggccattcccaacccaatgactaggatggtgtccatagcattaaataagctgacacttaaaataaaaaatgatgtgtcaagtgaataaatgaggaaagagaaggaaaccatgtcttgcatgagacatagtttctacacaacatccaagacattatgtgagataagtagcattaaatttaagtatggaatagtattgtttgcattgaaagagtagtgtctagcactagtttcttggtaatgtgaagtttatggaaaccatatctagtgtcttgggttgagaatgccctcatgcagtgctcatttaacgcgtgcatggaagcatgcatgatgcatctaccggtcgatcagtgcatgcctagtacgtgtgcatacggcgcatggtcagttaacacaacacatactccctccatacttgtaaaggaagtcatttagtataataacacggtctccaaaacataactttaacttcttatttctataaaaatatttattgaaaaatgatatatgtatacttttaggaaagtattttttaagacaaatctatacatataatttttacattttcaaactcaacaacgtgagaattattcatgatttatattttcaaggcttgacttaaatattgttctaaacgaatttctttattagtaaggagtagtatactatactcgtactacgttatctgagcaagtcgatcgttgcattggtccccggctctgccatgcatgcatggctagctttgcctctccttttttttttcttcttctctcgaagagctaaatacttcaattcaattgaggaagaggcgtgtcacactcacaccggtatacgacgaattatgtctcaggaccggccggatggccggctgaccaaaagactgagctagctgaggcagctgagtagctgaccgagaagggtacgtacgtctggaatctctagctagctccggccatggcatcagctcactctcgattgcagtttaattactactctctccatccataaatataagggattataccaatttcaatactccctccgtctcaaaatataataaatttagagttagacacgattattaagaaaataggtagaaatgaatggtggaggtttatgattgcatgagtagtagagagacggaaaatgtgaatgctggagggttgtgattggtttgaaaaagaatgttggtggagaagttattatattttagacaaatcttgagtgctaaagttgttatattttgggacggaaggagtaagaattaattaaggaagtggtaaaaggacatgtgatggaacagaaggtgatgggtgaaagaataaagtagtataaaagttactaggtgagagaataaattaggataaaagtagatggtagaggaataaaatattataaaaattagtaggtggagaatatagtactatgttaggattctaaaacttatattttaagacaagttggatagagaaagtcccttatattcacggatagagggagtacttccgtactgatcgagggccggagaggaagctcgagagagagaaacaacaccaaacatgtatattacgtatgtgttagctagctagctagcctgcaaaatctgttctgccattttctgtggtgttgcaagagattagtaactaacttctgaagcactactatatatatgattattctgaacgagcagctagcctaatagatctcagacgggatataagtggtcccttgggaccaggtcatagactatacacgaatatcgattatcacgtgtggttgcttaagaggacgtaccttacgcaatacggccacatcgcatgcagtcctctaatgtgagaccacacgcgataatcgatctttgcgtacagttgcttaataggaatgatgcgatgatggtgatcttcgcggacctctaagagcagaagttatccaaccgcacgcgaaatcgtgtttcggtcatttggaaaaatcttttctaactcctattcctaactgtgcagctgatcacgcgcggcttcgctagcttcttgtggtcgtggtaaatcaccaaaatggcgcgtagactaatttaataggagtgggaattaatggttgatcttcggacactatattaataagccattttgcgttgatacgaaaatgtgacttaccaattttctgacaatttaaataataaattaatgtgctagttcggattaaattcaacaaattggtagtgccatgtttcatttggctaaattttaaaagtttcttcactataatattaaattctggcttcatactgttctcaatctaaacataagctagctaattctaccttaccaattcattggtaatactaaagtttatttagattttagtactaccaataaatcagtaggatagataatcaaacaagccctatctagtttgctgtagcttattagcgatcgtcgatctcacccttctgaaaaggtttctttgtattccctggccatgaaacgacagggttaggcacaagcagcgaagggaataaagcttgacggtgagagcatatctcttggtgtgcgtgaatgccctgcaggctttatgtaaacaatgaaagaaagaaaagcaatctaaactatgattatgtttacttcacttc

SEQ ID NO: 15426 - DNA, 865 bp, Oryza sativa
aattttatttctttgtttggtttcagtatgagctgttacatgacaagtccgaagagaagctgaaagctctgagggagatcagtgacactgttatgcataggaagcttcttgacagcagtgttgatcttgtcggaaaacttctctttggatttggaaatgggccttctgtgcttcaagctgttagaccttctggtcagccactcgttgatgattgggattgtttgaagagaatggtaaagttggaaacttctttatactcggcttactgagaactgacatctgctattactccactgcgctccaatagttccatattgtcctgaaatctcctagtttccattgtttctgtttgtctgactttaatatgagtttcttcaggtacggatctttgagtcgcattgcggaccgctcactcagtacggtatgaagcacatgagggcgtttgctaatatttgcaacaacggtatctctggcgcttcaatgaaggaagcaagcatcgctacttgcagcagtcacaactcgggtagatggagctcgctggtgcaggggtacagtgcttgatctgccgcaacacgtgatatagcctcaaaacttatgccttgtactcgtacttcctcaaaacaataccttcaggactgcaaataaccgtccaaggatgtaccgctgtatgctactgtacctctatgtgtgcaatatagatgccctgtatatacgagtatatgaatgaatcgtgtgcttttacatgcccgggaattgatcgtgtatttgatagctgagaatgctgagatcgagatagcaaggtagaacttgtgtttcgaactgaatgaagttcgcctgagcacaactttgctgcggcgtcgcaact

SEQ ID NO: 15427 - DNA, 1156 bp, Oryza sativa
tcaattttgcagctgctgagcttatcctgccattaaactgtgctatgtaggctgactttgcgttgtactttccatttgccatccatcgccaagttatagtgtcctcaacaccttctgtgagtgcaatgtcgctattccacacgtggtagaaaacctcaaagaattccttgactagctcgactgtgaggttgtgcctgatgtctagtatccattggtcatttgctaatccttcgtagaccgtcctacctttccttttggcatgattgtataaggctggggctaactccttccgtggttgttcgccaatccaatttgattcccagaaactcgcttttcgaccatcacctatcgtcacccttgtagcagaggcaaacaaccttctgtccatttcatcacaagggggaggtgtccctgcccaaggcttatttgggctctcccagctgaactatagccatcgcactctcaaggctcgagcaaatttctctggccaatttactttgcatttgcccccactaatctctttgtcgccagcccaaaggaatctctttctaattttatccatatcatgcaggaaattttttgggggtttcagcgctgtgaggaaatatgttggtattgaggttagtaccgaagagacaagggtcttccttcccgcctgttgcaacagctttcctttccatcctgcaagacgagagtggagcttgtccatgactggttggagatgcactctcttgattctccccgttaacagaggtagtcctagatatgtgatggggaaattagtccgctttccattgaaattgttcagcacttcctgaagctctatgttctcacatctcataggcaccaccgagctcttacttaagttcacctgtagatctgtggcatgtccaaacttttctagcagggtgatcaggttgtccacatcagctcgacttgggttaagaaagattgccgcatcatccgcatatagcgatgttcggaacttagccaccctgtttgttattggtgacaagatcccttggtctgtggccacattcagtatcttttgcaaagggtcgattgctaatatgaagaggtagggtgaaagcgggtccccttgccgcaatcctctcttatgtgtgattgcctctcctgttgtttcattcaacattat

SEQ ID NO: 15428 - DNA, 848 bp, Oryza sativa
tttatcaatgctgttgacattataaaattggggggcacatatatacaaaaaatgaaaaataatgaaaaattagaagttatgttaatcggcataaaggatagtgaaaacagcagggtattaaggtatcttagccgattacaagaatttctaagtcctattacacaaaagttattgagacaagtactgctggatagccgaaatatctctttgcctaatttgttcgacttcttcaatggcttgggcatcttgagcatcagtcccgagaatgatcttcagggacttggttacgtcaacaacattcttgatagccgatttgagccttgctttttgctctttgacagattttgggagatcggctagctttttgtgctccatatccaattcaacattgcattgttcaagctgtgccaagagatcgatcttgcgggcttcaagccggttgatattggatttgatcggaccttcggataactgatcgagtttgactttttcttcatacacaagctgccgattgacttggattgtggcttcaatctccttacgctcacggcgttcggctaatcttagcttggctttttctagtttaaattgatgttgctcaagataagcggctggagttaggacatcggccagttcttcaggaattagaacttgaactttgtgcaatcgtgtcctaatcgatccacagtcgaccactaagctatccatagaagaggcttctagccgacgcgagatatcttcaagtgttttctttgcatcgtcagataagggagctagagctttgcttgaagtatcttcttctgcctcatcaagataatctttgatatcaaaagaaaagagatcggcta

SEQ ID NO: 15429 - DNA, 3013 bp, Oryza sativa
ccatggcgactccattaaccttgtcaaagataacaaggaaaagagccacaggtcaccctcctcaaaagaaaaacagcctcagcatctgcctcagaagcaacagtttacagttgagacaagatcagtgtctacattgcaagaaaagacattccaagaaagatcatcctgacttcctgacagtgatcatggcaaagaaaggtgagaacattattacatttgtaaagaatctcattatgattggttattctagatccacatggtggattgattctggagcaactattcatgtgtgtaattgtttaaagggattccgttcaatgaggactatgcaaagaagtgaaagatccattagagttgccaatggagttgaagcaaaagttgaggctggagatcttcgcctagaactcgcgaatggcttcacacttttacttccagacgtttttatgttccttctttgcaaagaaacttgataataagtgtatccaaattggattttgatagatatgattgccattttggaaatggcaaatgtgaatgttgtgtcctcgttgacaaaagaaaagaaagcgaacttctgatgtctcatcgaaattatggcagtgttgtttatgccatatttcgagggggagaattgagagactggttaagaatgtagttcttcctccattggagttctcagttttagaacaatgcatacaatgcatagaatgcatcggtgcccaaaacaccgtatgagctatggatcctccgtgtgtgggggagtcctgcaaaggataaagtatttaacccaaaacagtaagctgccattttattggctattctaaaagatcaaagggtcatcgtttctactgtccaaacagttatacaaagtttgtagaaacgggacacgtcgtcttcttggaagacgaaatgattagggggagctcggtaattcgagaaattgatcttgaggagaggcgggtgtctgtacccgctccgtcgactcaggaacctttcttctctctacctgctaatgttgtgccagcaatgcatgccgttgcggtaccaacacctgttgttatctctcctgtggcaacaatgaatgaaagtgaggaacctgttctacaggattcaacagaaattattgccacatcagaggaggagatgaaacagcctcaaacagataatgtgccagaataggaggcccctagaaggcctgaaagagtcgcatatggaggatgatcccatctcatatgaagaggccatgagaagccatgaaagatgaaatgaaatcaatgaaattaaatgatgtctgggatttagaagaaattcctaaaggagccaaaacagtaggctataaatgggtctacaaaatcaaatatgactccagagggaatatagaaaagtttaaagtgcgacttgtggcaacagttttcacgcaaagaaaagagattacaatgagacattttctccagtctcttgtaaagattccttcatgattataatggcactagtggcacattatgatttggaattacatcagatggatgtaaaaacggaatttctaaatggtgatttgaagaaaaaaaagtatacatggcacaaccgaaaggtttcgtcatgaaatgaaacgaaaatatgggatgccgtataaagagatccatttatgggttaaagcaaagcttcgagacaatgctacttgaagtttgatggaacaataaagcaatttgggttttcaagagaatgtagaggacaactgtattgattcaaagttaagaatgggagactcattttcctaattctgtatgtagatgacgttctactggctagtagtgatgtcaatctactgcaggaaataaagaaattcttgtcctcaaactttgacatgaaagacctcggtgaggcttcatatgttttgggcatagagattcaccgaaatagaacaaagtatgcattgggattttctcaaaaggcatatatatagaaaaggtgttgaagaaattcaatatgtacagatgcagtgctacacctgctcctatagtcaaaggcgaaaagtatggggcatcgcaatgtcccagaaatcagtatgagctcaataaaatgaaaacaaagccatatgcgtcagctgtaggaagcctacagtacgcgcaagtgtgcacacgacctgacttggcatttgttaccgggttatttggcagatttcaatgtaatccaggcccagtgcactggaaattggtaaagaaagtcttgcgtgtttgcaaggaacaaaaggcctcatgatgtcttacagaaaagcagaatcgctccagatagtggggtattcggattctgactttgcaaaagataatacaaagttaacatcgggatacatgtttaccctggcagcaggagctatttcatggaaaagctcaaaacagactaccactgcagggtctaccatgtatgccgagtttatagcatgccatgaggctacggggcaggtgaactggctaatgaagttcatacccggttttaaaggtggttgatagtattgagaaaccactaaagttatactgcgataaagaatccacagtaatgtactctcacaacaattagtcaagtggtgctgccaaacacattgacataaagtactatgttgtgaaagacaaagtccgggatcaaacaatcagtctcgagcacataagaacagaaaggatgctcgcggatccgctcatgaaaggcctacctcccaacatgttcaaggaacatgtagcatgcatgggttttaagggaagccttatgaatcctggactatagggcccaaaagttaaagtatctgtttctgaatagagatgtgtatagtggctgtcgaatccatcggtaattaaccgtgacgatgaaacatgctctatatgtaaatctgtgatggaatagaaaaagctaaaggaaatagtgagatcaagggggagaatgttagatggatctccctccccttgagcccaacggctcaagggggccttgacccgcgcctgatcggggggcgcccagcccaatg

SEQ ID NO: 15430 - DNA, 2109 bp, Oryza sativa
agagggagaggtggcgcccggagctcctcgtcacgcgcccacgcacgcaccggcctccccggtgcttggcgacgaatggcgacggcgcgagcagggcaggggcaataaggcggcgacggtggttcggcggcaatggcgcggtgggtgtgaagcgagtgaaaacgagagaagaaggggtttggggcgcggcttgggttttatagtggaggcaatgtcggtttgggaggcgggggcgagctgctgcttggctagcggccgcgagagcggcgttttcgtgcgcggcgcgaaacatggcgacggcgtggatgcgttgggcggcgaaggcggtggatcggacggcgaaaatcgaatacgggtgaacccccgcaaaaccgaggactagtatgtgcccatggaaccttctgctagcgtgtggggagctttgctctctgcatgtgctatgcataataacgtcgatgttggagagattgcagcatttaggctatttgagttagaagaaggcagtgctagcaattatgttaccctctgtggaatttatgacgcagttggtcaatctgatggtgttgcagggttgagatcaaggatgagagaactcggcatggtgaagacgcctgggtgcagtcggatcgatgtgaagggaagagctcatgctttctaccaggggagcatcccacgttatttgaggggatgaatgctttgggtattagatcagttactagacgatatggcaaattcagattctgaagatgagcttgctgacttgtactttgagttaactctgcactgaagttctgatggtgaaagtcatgtattgctgcaatcaattttgttcaaggaaaagcatggatcttccttgatggctgccatgccactcatgaacaaatttgaatgaagaccaacaaataatcctaagaaattggtcaatctagatgccttggaagctgaaacttttcaggaccagtatctggagcaacatcctgcatcatggtatggtgccaggatgagagcaatagggtggctcttctggtccaaacgactggtatctagtctgaggtgactgcaatgacagtaatacatgtgtaatgttgtcagtctggtttatcggcatatggctcaaatatagtgcttctgaaaatatgcgacaatattggatgcaggagaaattgtgaatgattggcatataaaagattatctcttggattaaataaaagagcgagaatgaatggctagtatttaaaaatgggtggaaaattatttccctttcccatttgacaaacattgccttatagcaaaactgaacgatttgctcagcacctccgaccgagagcaggacaccgcgccgacaagagagcgcgcgagccgcagccgcgcgagaggagcgaagcaggccaagctattaggcccattgggcttgtcttttttgtgtaaatggggcttttgactaggaaaccctaaacccaaatttcccctttctccagttctcccatccccaatctgtgcccgtgcgcgaggaggggcgcggcagggcgtatagcggcgggcgcgcgcgcgggtcggcggcgcggcagccggcactggcagcgcggcgcagcgcagggagcaaggcagaggcagccaccaaccaacagggactgaagtcaggcagaggcaggcaacaagctaaagaggaggagaggaagaggagagattaggaatgttgaggtattgttgcgtttctcgtctatttaacctttgcaactgggatgatggattgtgaactcatatgactagtgcttgttgctatgcttaatgtagacgtgatggataatgctgcgtcgtataatatcgtgaattgatattgcttttttttttcccttcttattctgttctaattctcgcgcgctagttcatgtgccacacctaattttttttctgtcctccgccactgaccttatatgcgctagttcatatacgattttttttttgtcctccgccactgacttatatgttctttagtttgctaaaatcctctcataacatacattttagctccttcaagaagtggctcctggttttcttgctctcctcttgcgatattgctgggtactccctctgtttcataatgtaaga

SEQ ID NO: 15431 - DNA, 671 bp, Oryza sativa
gctcttccacaaataagtaaccaagaaaaatcttaccattttagcgtaagtattggaggcatgtttttcttgtaacaccttcatgaagtcagcagcataaagatatggcagattgggcatacctgagaattggacatgtcaacatgcatgatggacaaaatttaactcaaagagcaaagcagcatatgcaactatcacataccaagaactccaggacccccatgatcagagtagaagataaatatgtggtcatttggtttgctatctatgaccttcctactacccccagtaactgcagttttattgcccaagagaaccgcgtaaaagttttttgcagtgacttcgtctccagtgtaatcctggaattatagagtgtgttatcttcatcaaacttagagaaaaaggtcaatatatatgttatgcacttgtgccatgtacacgcaaatctgaagccacctgaagctaataaagaagtgcaaaagggtaaataattggacataagaccctaacagtcctctctccagcccgaggaacgaataacagtgaggcagtacggcatcgtgtaataccttcggaactcctgcataaacatcttcaccctgtggatgattgacaataacccctggtctcgggttaagtatattattggcaatgtcgtcatacataaacac

SEQ ID NO: 15432 - DNA, 659 bp, Oryza sativa
ttggttaccatgtctccggtgatatccttcggtgtgagctcttgtgtcactatggcactctgcacaaggaatttgtccttgcattgcatgtccggtggcgcctcccgctgagcttgcattgttactagatttgataatcaattgataactaaattcttagcataaaaggcagtcattcagaataagataatactgacgcaattcatcaaattaccaagaacattggatgtggactggggagccacaatgccgttatttggacggacgcagtacttctttggactagttgtcttaacctggagaaacgatgttgaattaatttagttacttattactgcaatgcatatttcctcggaattagaggccaaaaagattttattaataccttaaacgtgacatattcatctgtcttgtttgttaggtgcagagaacacgagatttgcttctttaattcgactgcatgattaaaaaaaggatgcgaaaggatgaatattctgaacaagacaatattatcatcacatattaaagaattaccaaaatttgcacaaaagaatatgcttaaaacaaaggcaaatcggactatcggtgaagtgaacaatcaatattagctcaaaaaagaaggaaaaattccccctgagaacaaccctgaaatttcttca

SEQ ID NO: 15433 - DNA, 11515 bp, Oryza sativa
aatttttccgttaggggccagggccgggggagaattttcacctgcggatgagcgagggtggggatcggaattaacccacgggtaacccgaaggggcatcggatgtgagttacttcctccgtttcataatgaaagtcattctagtatttttcacatttatattgatgttaatgaatttatatatatatatgtgtgtgtgtgtatgtatgtatgcatgtctgtctgtctgtttagatttattaacatcaatatgaatgtgagaaatgctaaaatgacttacattgtgaaacggaaggagtacctctctgaaagtagcccattgcaataatataggcccattaaactcattccaaattgacatataaaagctcaagacgctagtttccctcgacccttatctctttccttacttcaaccaacccccttcttaccgtctactatttcgttgcatcaattcatctccacatcgcctcgtcgtcgattcatctccacatcgactcgtcgtcgccgagtcaccaagcagccagccgctgtccaatttgcctcgtgctaatcattgtctattatgcatcatttcaattagaagatagaccatatgatgtatcaagtatgtatatgtgcttgatcatttcaattagaagatagaccatattatgcatcatttcaattagaagatagaccatatgatgtatgcatatgaccttgatcatgtgctttatgtatttgtgtactgaccgatgagtatacattgctattgaaattttgaaattttatcatattattattaggtgcattgtcctatttttatggagtattatctttatccgggtgatgcggggcccaagtcacccatgcgggtcacctacggggacgggtgatgttttccacctgattgccttcgcgtgaccggggctgaggatacctacaggaggatgggggcgggggcattccagcccaacccgaccctgccccgccctgttgccacccctaagtgtaatgcagcggcaagtagcacaactaaacaaccccatattctcaagccaaactaataatggattaaaaatgaccaaaagaaaaaggaatagtgaagattctttattgctggaatgtaaaaagtatagcaaaattcatgtcaaattttcttacattacatcaatacgtagttctatatgttcgaaatgcctccaacatactccctcaattccaaattgatctacatattttataggtacaccaagaccaagaaaagctaataactctctcatattatatttactctagcaacaaactcaatgcatgcaccatccctactattttctagccaatagcaaatcaagatattgcatgtgggttataaatgcttgtgtgcatggatgcatgcatcaatgtccatttactccaatgcacaaataacaaatagacctaatgaatgaacacaaatatgtatatcatttagaaataacctaaaaaaactatatgtagatcaatttgaaatggagggagtattcttgtagttatcctaaatttcctcttgattttctactgcgttttcccttttttttccccttccaaacagttcacaataaccgcagcttaccatgtggttaccgtctgaaatcgcgagtaactatctcaaaactatggaaccactgtcagatcaaaataatttgtttaaaattttgacgaattttatacggtttttcacagctaccgagcaacacccataatatcgtgaaggtcgataacccccgctgaaatagtatggaaaaacgatggattagacatccggctgaggtactattgcctcaaaacctcaaaatgtggatgccgtaaagattaattctccgggtttcataattcttgatattttgaacaatgaaacggcctttaaaacatatttttaactatatttttctatttataatatatacaataaataaacatttttttatttttattatagtactttgtgaaataaatctatatatgttattctagtgattataaacaaaataaattttaaagccattgatagttataaaagtttgttctcatgttcatcaagaattatcaaaccaaagagagtaaaacctactccagcttgtaaaaatacactccagtcacatgcggcattctcttcggcatttctagtaagcacagttatatcaagcggatctacaagcaaaatacgagaaactagcacacgttatacaacacaacaccgattggctctgcggcgatataatgtcagcagcaatcaaagaccggcggcggctgggcagaaacatgcacgaggccggcaacacaaagggcgcaaacggacgccaccatcaattttgtgcttcctaaaatcctatggacaatcagaacatgcagatacaccaagatcgaaaaggggaaaaaataaaaggagaaaaaacaaaagatcctttggtcagtcgcatcgtcgtgtcagccttgtttcgtgtgtggtcgatccaaatcaggcgaacgaagggatcccgtatctccagccgttggaggatcgccgccgggtcggctgctgctgcggcgcgaagctgagcccgaacatctccttgagaacttggcctggctcctggagcccgatcagcttggcgaccagggacgcgctctccctgacatgctccaggtctttcgtctcggtccagaggcggcgagcgacctgcagtttcctcctcttggagtccagcgagacaccccattttgtgtacgtgtgctccctctcctccgtggacagccgcttctgcatctgcctggcaagcatctccctctcccgctgcagcttctttgcgctgcattacagcagagcacggggcttatgagttgctcgtgatggtttggcgctaattttaaggttatggcacaaaagaagtgaatgaatggaaacgagtaatttacgcacctcgcaacaggggaagtactcaggctgcctactatcgcattgctaggggtgctcccccttgagtatgtatctctcaggaatgatagccttcgaagctccacttccatgtagatcgagtcagctgcttctcccttgaatagcaagaaaaagtaagtcctgtggaccaaggaaatgctgcaagcttgccaaagctcgatgatctcttgctgcttcttctcgaattccaaaggccatcgagaaggtgactgagaaacaccctcgatcgggtccaatccgatgctctttccatttgcattctaaaacatggatgaaatgccaataatttaattacttgctgaagcatagaaaaagaagtattcagcagaaaacactatttattttagattattagttggaatgctaatggtatgtggcttttgaggggtgggagaaattgttgaaattctatgatagagtcccaagagccaggatgttaaaccgaagcaatactatatataagcatgtattttccaaaccagcatcacataatcacatttttcttgaataaaacaataattaaatgaactgcagagctaagtgccctcaaagctaattagataatttcatacctggtcacctaactgcttctgataatgaacctgggccatctctttgagttcagcaacaaattcaccaataccagtgaattctgtatcgcatgcaacagacccatttgtctttgcatccttaaaagtgctgatctcagaactcatggatcctgcccttgaaagtgtgtcggtctctgcatcatagtgcagtgcagatcctcttctatgagattccacaggtcttcctgggaactccaccaaacttctatttagtggagtgcaatcatccatctccatatcgtcaaacatagtagaacctgtcagtgatctacagctcctgcttctaccaattactcttaagtttgatgagttacgtgttgaagatcctagatctttggctagactgacaaaaggccttctaatattctccaagtgttcctccaaagtaataggagcttcgccagagggccttgaatgcctagaattcactgatgcatttgaatcatttccatgcaaaccagaattcatatttgaatcttgtgggctactactttcaccagctgataagtccaactggtcatttcctcctgtccgattgctttcaatacatcgcacttccttgtaaagatctgaatcatcatgagagacctgagaactatcatctctgctgacgcttgggggcattccaacagatggagggcttctgactgaatgctttccttgaacctaaaatataaacaaaacaaacatgaccctgccggaacaacgagatgaaacaaaactaaatttcagaagtcatggcagagaatatacttgacggttcaggtcatgatcaccgacagattgcagcaaatcctgcaacctggattgagccaaatcacgttgtgacttcagttcttttatttctttctccatctgcaatggacatgacatgaaattttatggatgtgtgcaacagaaacaacaaactttttttgtcaagtagaatagtgtggaaatactcgtaatggacaaggcaaaagtggcagcaagtaagatagaccagatgcacacaaaaacaatagttttctgcaaattccagtatgagccgtggaggagaaaacagggaggtaagaaaagtgacaagtaactttacctttctgatttggttgtccttttccttcaataatgtttcgagactggaactctgaactggatgccgcaactcgctctccaatctagcaagttccttttgcaagtgcttaaccagtgctttatcagacatgaccacattaacctgagcatttgtaactacttcctttgcacaactcccaaatagcagagtatttcttgattgctcaatgtggctagtggcagggctcagtgtacaaataattgcagttcttgcattacctcccaaagatggctgtagtatgcgtgtaagctttgaatctctatacggtatgtgtgcattacttcccatgctgcattaatgaaaagatataactgatatcacttgggcgaaattccaagcaaacattactgtaaacatcccactttattgtacactatataaaatcccaaaagaaaatacatatgcataaagcatgcttaaatatgtcagcacacaaaaaattgtgcaaaacatgacatgtactacacaaaataaaatgatatatattatctgttatcaaacaaatgcaaccctattgcctttttatgttttacatatctaacaatatttttgcacaaattctgtgcacataatacatgctccaaatatatatctttcctagaattctctaaagcgacaagtgtgaaatcaaaacatatatggagctacatgactacagccatccttaaaaaatcatactctgtcaagcaacaaactattctctaaataagacaaccaaattttcctataatgtggattgaactaaataaaattgcacagtttcaagttgagattcggacctcagttttctaatgacagtgccaagggcaagcaaactcctattaatgtgacaaccttctttcagtcttgtgccagctgacaatgcctgagatgcacgctcacttccagccagatcaacaaagttctgcatggggagaaatggagaatgaataatgcatgcacctaatttttccaataaaaagaactccatgatagacttgtaagatgttattcttactgcactagccacaagtgtagttgacttgtcctttcctaagaactcgcgagcagagctttcaactgtctgaattgcttgacaaatacatcagccaaaatgaagcatagactcaaagataacaatttataccaaagtactacctccgtcccaaaataagcgcagccatgagtttctgcgcccaattttgatcgtccgtcttatttgaaatttttttataattagcatttttattgttatgagatgataaaacataaatagtactttactcgtgacttctgtttttaattttttttaaaaaagttttcaaataagaggcacagaaaaccatggctgcacttattttgggacggagggagtaattcatagatttgagtaaagaacaaaccaatcgaagtatctgatgggatctagaacttttttcgtttaagaaggtctccccaaaatttgcttgaggaggtatagaatattctcgtctgcgccagcagcttataatcgaagtatgacacaaactttttttttgtattgctctcatgtaattcaggatttttgatcacttgatatatatatatctaaatttattcccctgttaccaatttttctctccatggcaacgagatctgattggaataattcaatttttcttcacgaggtcttttacctttgcactgtttactagcctgccagaccactcctgtttggtttggtggtgaagtggtgaacaccttttctcaaaaagccaaaaaagttcttttaagcttgacactttattagttgctgaactaggtaggttgttactgtactgtagtagccattattttttcctgttcatatgctaacattttgttgatgttagtatttctgatggaaactggcatttgtgttataacaggagctgggagtactgcagttctcgtcttatactaggctactagcactcctctgatctgatggccaacattaacatggcagatactgctccttcctgtgatacttacctgttgaattattgttaatatcttggtaatcctcttagagacttagaccagaggagaaaagaggaatctggaggtcaccgccaggaaaacgctacggacaacatgggcggcagatggggtgggagctacccagatctgcgccgacggtggcggccgaagaagaagaggagaagacgacggttggggagagagccatcctccattcgcgcgatggcggtggccaggtaggatcatggattcagatttttatgccatcgatttcctggtttgctcttcgtttactaatcatatgaattaatatgcatgtaaaatgactctgcctgctccaccatgattatgatgaataagagcaataccggcttcggccaataggagttttctctacatcagtccctaggaagatgcgattgtaggcgtttagttctcggtagccacaatactagacaggacacgctgatatgaatcatatctgaaagatctcaaaaataaaggatcctttgaggacgcgtcccggaggctccgggtgctccacaccgtggagaccgccggggtgttcgacatggtggcgcggtggcgcctcttctcatgcaggccgatgcccacggccgcctcgtgctctggtgcctggagcaggaggacgggtcggacaaaggtgttgtttttcttcttgcatttgccttagcgtaggaacaaaaaggttgtttattgtgccaaaatcgaatcactacctacttgctaagcttccatgaaatacgcagcaatgttcataaatttttgactgaacgtagtgatgtagaaggcaaatgttaagttcttatgcttctgaaagtgttctatcatccatgtgaatgttgcacgatatggtaccgtctcaatcctttttcgagtagtacactgctatgtacttgccgtaaaaattatttccataatctcttatcgattttcttatcgtatatggagctttattgtacatatgaaggtatagcgtattcgtatattccatgactcgtacaccaccttacaatggaagctattgtaaagtggttttagaaacgataatactaatttctcaggcgtggagaccgctggagtgtttattttttcaaaataactttttttagataataatcacacaaaataactaaatgtatttaacttatttcctgtaagtactggtaattttgccacctactgtgcttaaaccaagcctggatacacctttttttttttttgctttggatacacttaaatgacgttcaccaaagatcgtcaccacctgcggacgggatctagacatgagaagttccggctatagctctatgttaaggattgtgggaaggagctttttactctaaaagttctgcttcaatcttttgctcaaggtactagattaaaggctaactatcaaaaatcatgtttaatccctaaaaacttgagtgatggaaaagatgagatgcttgctagggtttttgtctcggaaagaaacctagagggaaccacttaaccgatggaacactgatgctaatttcccgacatttttcaaattaaggagtatagtttttcaaatctgggcataattcacgatatgctgatgtattgtgaatcaggcgagtatagtttttcaaatcttaaacgccgtggtctcttgggaattagacagtctccatatcagaaaccaagcagagttctcaatctattcaggtcctatcaaagctatattaaacgaagatcaatttttataggactagagaaatttgctatgcaaatgccggtcactggccttatccatactaagtgctctagtaactaataactatggcgtggtgtctaggttagagattatctttgtttgttgtgtatcccacggatttgtcagaggtaggcggcaggtggtgaaacttgagaatatgttgggaggagtaaaacgtacgtacatactatatacgcacgtacggctggaggggtgggaggatagttgatttcttttgatagatttaattagttttgtgttatctataacagatctaatggcataaataatgggcccactgatttaagtgaaaatcaatggtgggttatttttagaaatttttaatattttttaatttactaaaataccacatgccacatggcggcttgagagcgtttataggatgtctatgtggtggcttgagagtgtttgtaagaagtttcacggacttgatgctgcaaccttcaatatacctttctagattttaatataatactagtccatctcttaacactagtccacactattaatattatttaaacttttaaatatttttataaattataatatatttcatataaaataaactaattatatatgatgttatttgtataccttctgatatgattcatatcagcagggagattgctctaaaatattctagcataattctcaagccatatcatagtcgagtggagctaagataacaagatagggaatactagacaccgtggagaccgccggggtaaactagacttcttaaacgaaaagggacatgaactagcgcgcgagaagagcaatacaggacatagtcgagtggcttataatgaagttaacggtcaactgacagtggactgatggcaatggcataaaagggaggagaaacttgaaccggtggcataaaaaggagaagccaatttgaagtggtatataagggagccgattaatttagagtggcatataagggattctctcttaatccaagcccttcatttattttccaatcccaatctcaaccctcatttctcattatccaaacacaccctaattgtgtcgtcatatttctagttagtactagatttcagtcagatttttgtgcattggatttgtgttaagacccgtgcttgaggttgaaaggccgttggatctgtgttgatgtaggccggtcggggctgatgttacgggacattatgaagttcaattggcaaaatttactacatgacactcaaaaaaacgtgtaattggctgtgagacaccgcaaaaaacgtgacacagctgatggacactagaaaaaatatgtatgagctataggaaactttcgtggtgctgagctgcatcctctgtccgggagaagctcgctgctgatttcaaccacatcctccaaaacttcgcctcagcaaacttcgtcgtgggaggaaattcaccaggtgacacctccagccagatttggcatgaccttggcagcatcaaccacctctgttgggataggagacggtgacgactgctaggaggatgtggggtggggggtgggaagcatggtgaaggcagaggtggtgcagcgggagaggatcttctgatgtcactgttcaccgtgcctgacatgtggacccaagacagccaccaaattagtggaagttacttatattgggattagcttttgattttaccctggttttcctatatatatgagttatattttggtatagtatagtatagtaagtatgattgtatgaaatggtttaatttcaggatagagaaggcttaagtttggagtttttttgagcgtgtgaaatgtgctttggtaaaggtagagtgctcatatgtcctttttgtcctctattcaatttttttttgtattttctttctctctgtatttaatttttgtggttaccattatatgtactagtatattagcctttttgctgctactctaataatttggtgatgagaaaatatgtggccaccaaattagtggaagttacgctaaaggagcttaatccggtgcagtagcggcgactggcatgcggtggtaaaagtggccacacgggcacatgggggcgtgctgatgcatgagctgctaatgttggaggctaggattaggatggaatagggtggggagtatatagctgatgggcttagttctgtttcctggacctgtgataggttactgggtcaaattttccaaactcagtgttcggtcagatcggataccgacaaagaagaccgaagcaccggaaaaagaagagggaatagaaaaggaaggagaagggttaatgcaaaatataagtacattgtgactatgtgatagataattatttatgtggatggatgagtagtcttgatggttccctagtttcttggtcctccagtacttttaccttctcattttaatttattactgcacaaaacatatcttcttcaattcgtcctcttaatccaaattggttgcgcatctctctcacacacacacacaatcggggtacatatacattgcttttttcttggatggaggagggccatctgttagatggatctccctccccttgagcccaacggctcaagggggccttgacccgcgccctgatcgggggcgcccagcccaatggctggtgggcccccgtcacactgtgccatataaagaggggtggaggacgggacggaaagaaggacacaaggaacgaggttcgtcgccgccgccgccactccaccccataaaccctaaccgatcgagggggcgcagccagtgacgggaagtccaccgccgcgccacgcctcgtcgttgacaccgtcgctgctgcaaccgcatcaccgtcgccgtcacgaccgccatcgccgccgccgcccacgtcaagcagagcgacgacaacgacgatggctgggacttcctcttcatccaacgcgtcaaccggtcacatccctaaaccctttcccttattctctatttttgttcaatcatccatcgcaaatagaaccacccgactagatctaaacctaggtgatccaatagacaacctaacaatggtatcagagccaccctagagtttagattggttggggaaagaaatgcaaaagaaaggcaaagaaaagcaa

SEQ ID NO: 15434 - DNA, 675 bp, Oryza sativa
gcgcataggatatctaaacatggtgccactaaagtcactccttttgagttggtttatggtcaagaagccgttttaccggtggaggtaaatcttggttctcttcgttatatcaagcaagatgatttgtcaagtgaagattacaagacattgatgggagacaaccttgatgaagtcatcgacaaacgcttgaaggcattggaggagatagaaaaggagaagaagagggtggccaaggcgtacaacaagagggtgaaagcaaaattgtttcaagttggagacttggtttggaagacaattttgcctttgggtactcgatccaaggagttcggtaagtggtctcctagttgggaaggtccttatcgagtgtgcggcattgttcgagtgaacgcatactttttggagacacttcaaggggagcgttttcagcgagcaatcaacgggaaatacttgaagaaatacttcccgagtgtttgtcaagacgcttaggaggtactatggccggtaattggattatcgtcctaagaccaaaaacatgctctatgcttttagattcacgttgttcataaaaaaggcaggggggcatgtgtttacacccaaatttggcacctaggattaaaataggaaagattgccaaaatttggaaatctaccggtttcctccgagtgtgccggtctg

SEQ ID NO: 15435 - DNA, 8015 bp, Oryza sativa
acttgtcaaaaaaaagttgccaacacattgctcgtttgaccccttccacatacaaaccgaagatatgatcgatctgactattttgttaaagccatataacggtgttaactgaatcccaaaataccacttttgtccatatttcttcaaagcttttagactttgttcgtttccccaggttcccaactccgcctctcgtttttcacacgcacgctgtttaaactgctaaaaggagcgttttttatttcagaaaacctacaccacggcatcccgtggagatgggatcccctcctcctacctcactcctctccccaaaatcatccgaatcctctcctcctacctcactcctctcccaaatcacacggcactgcagccctccccgtcgcctcctcttacctcactctcctcccccaaattagacggcgctgcagccctccctgttgtcgtcgcccactgctcaccggagccggcggccgccgccgcgagggaggccgctacggtgaggagctcggcggcgagcgtggtgagcgagagggagagcgggagcagggtgcggttgcggcgacatcctccatggccggcagcaagcagatctgctacagcgtcggtgatgaagacctccatggccggcggcaggggtgcgctgagcacgtcgtcgtccacagccggctgaggaggctggggaggcatggtacaaggtaggcaccatatctgtcgcctcctcttcctccgccgccgcgccgccccgctgctcgacctccttgaccccgcgactcctcctcctctctcttagggtatcacgctgatacccaggtaccaaggtctgatacccaggtaccagctcgatacccagggtaccaggtatcagtcgataccaaggtaccaggacctcccaaccccgcgactcctcctcctcctcctcctctctcttggggtatcacgctgatacctaggtaccaaggtctgatacctaggtaccagctcgatacccagggtaccaggtaccagccgataccaaggtaccagccgataccagtgtaccaggtacctcctcagtaccttacccaaggtaccaggaggatttggcggtgaggtagctgctactctgggtgctcaggggtgacgacgccggcgaggtatcacacgtgaggtagctgctactctgggtgctcaggggcgacgatgccggcgaggtatcacccgagcacgtgataccgaggagaatttttggcggtgaggtagctgctacttcggcgatgacgccagcgaggtaaggtagacactgctccggcgacgaaaccaagcaggtagtggctaggtattgagacaaatcacgtgttttgtggggtgctcctttatgctgtcgttgcttttttagttatcccgtgagtgcactatttccacggtatcccgtggggtagcagccctctttttattttgcaaaaaaaaaagtttctatacaagagttcttaaagaatcatattaatccatttttgaaaaaaaagctaatagttaattaattacgcactaatggatcgctctatttttcgtgcgcgggacatgggttcccaacccaggctaccgaacacagccttagttagtttggcctaattattgaatggtggaaatactaggaacgatttttcacaaatcatgcactgagtgtagattttatagatttgtcacaaatttgatttagatttgttatattcttcattggagttatcgtcgtcaatccgtgccaagcaacagctaaaaagaaatccacgtataaactcatacgtatggatgaacagtagggcttaaatataaggaagttatttttttaataatagatctaatttaatggtgtaaaataatgggaccaccaatgtaagtaaaaatcaacattgagattagaagtgacacgtgaagaacgtttgtgcgtgtatagaaagtttaatggacttttaaaatataactagaaaggtagcctgcacattcacgcgggcatatattgtacgcaggattaaactttccgatttagccgatttgatcaggcatcactaaaatttccaaaattttggtctgaaattttgaacaaaatttagttgaatttgaacaaatattaccaaaattcatgaaaaaataaaaaaattttggccaaaataatatcgtatcggtggggtctaaaatgagcgaaatttccaacctgattgtacattgcgtttgaaatatagaatatcaatcggctgacatctcccatgtttaaaagtactttttttatttgaataaaacccatcaggtgaagcctccactgttcttcggcattttgctttgataatttttccaagatatttgttaggtttaaaatatatcatattttatacatctgtataaataattatctatgatctctttattatatgaaaggaagtttgatttagtttgtttggaaaacatgtctaacaaatcaagtgtaaattagtagtaaggcgtttagacctttttttaatagaatgtttacttgcttttttttttacaaattctaaagaactatattgttaataaatatgttttatttgtaccatcaagtagttctccttctggtaggtttaagttgatgcaagttgttacatacctacataagggtatttatatatacaccaatttaaataaaaatcaactacagatatagatctaatctaatagtctaaaataacgggtccactaattaaataaaaatagacggtgaaatcgtttataggaagtttaatgaatgatatttacgtaaatttatagaatagtatgttttatctttaaatagaattaaagatcattaattttttttcaatgcgtaggtttactttttttttcttcagataaacagctggtacgtctgtacttcattgttttttttagtcgtatgtagtatggagtacttgcagttatagttctcccgtatacatataaagattaaggaataagtttcttaaaataaaatatatctaatctaatggtttaaaatattgggtccattgatttaagtgaaaatcaacggtcgggtttgacagtcccacgtggcggcttagaagcgtttgtagaagtgccacgtggcagtttgagagtgtttataggaagtttaatggacagacagatagataaatagatagattgatgtggacattactagaaaattttacattatgaaacagaggacgtataaaacagcgggaatattaaataacacgtgacaaattaatatctaaaactctagttctcgaaggcccattcgttctccttgcggatctcctcctcctcctctggtgtgaagtcgttgacgatcccgaacatgtccctgatctcctgtaccgtcttgcccttgatcaagtcagccgtgtgttggcacgcaagatcaagtagagacggcacgttcaagtagttggcggccaagatcaagttgaacagcatcgtgttgtcgacatcgatgaagctggcatcgaagctcttcagctcctgatccttcacggcgacgtcctcggcagcggcggcggcggcgtgtttcttgcagtactcgagcaccttggcgaggacgttggaggcgacgttggggagagggacgccgttctccgtgcagccgtcctcgatcatgttgctcactagcttcgacatgctcgcctccgcctccgtcacctggaagtgctgcccgtccgagctgatcagaaggatcttgctgtcgccggcgtcggctccctcctttactgccgccattgatcgatgtcggttagtttctcgtcgaacacgcttgaggttgaacacggacggacgggacgaactcgctagctgatcgattggttgcgcgcggtgagctgaacggttgaaacaacgttaatcggtgcttggcgatcgagctgtttggtgctttgtgtatttattgcgagaaccaggccgagcaactccgattcgtactccaaatccaatctgattctaattagtttttgattgtttatttctgcgttactttgcaataacgccaacacagcttaattagctacttctactcagtttaatcggactccgcttcaaaaccgaagtaccccttgtaggtgttatttctggagagattaaaattagtttgttttctttcggtatattacactacatgcatgcatatacctaatatgagaattaataaagactccgagtaggtgcgtgtgtctcctgctagatcacgagagctactacaagattaattagagatcaccaagaatttctaagacctcatcaaccaaaacagatgggagtaactaaaaagttgttacaaattctttgaggtaaaaaacatttatctattatctactaatagtccattaaacttttcacaaacgctctcaagccgtcacgtggcgctcctacaaatgctctcagtcgccacatggcactatctgatctcacagtttatttttatttagattggtggacccgctattttacaccattagattagatctattattaaaaaagtaaaatgcaccaacgacccttaaacttgtcaggaggtttcacttagatccacgaacttacagagcgcacatcgagttccctaaacatgttttattgtatcatcccggtccaaagccgcgtttgaccgtggtcttgcctacgtggcacgccatgtggacgatgacatggaattttttatatttttttctcccttcttccttcttttttcttcggtggtgagaggcggcacgaggggaggggctgtcgcagtggtgcttggcgaggtgccggctgaccggcgcggcggagggagggcggcagaggcggggaagcctgcgtgaggaggctgtagccaaggtcggaggcgagcacgcggcggcggcgagcacctgggggcggcgtttatggggggaggacagcggcggcgatgccgaaccaccgcacggcatgggcgctgccactgctgcagtttcgctgagccgccgtgctggaggcgagcgagcgacgggagggaggacagcaatgctaacaggagggaggggacgggggcgactctgggaggaggacggcggcgctgacgggagggagggagaccgcggcgactgggggaggaggacggccgcgccgacacaccgtctcgcctcggccgcatcgtcgcgtgcctacgccgccgccgccgctgccgcactgagctcccccgtgccggcctctcccttccattgccgccacctgtgtccgcccgagccgagacgacgccacggccgatctttcttctcctctccacaaccgccatctcctctctcaccgccgccccgagctccctcgtgccggcttctcccttccatcagcgctgcccgtttccgcccacgccgagacgacgccaacagctcctctctcaccgccacctctcttaaaaaagtatatttcctcatgtttataacatacaagcgctacaatcgttgtgccgtaattacgagttgataagatacaaactctaatattgttcttccgtatatacatgattgtaaacaaaacaacaaatatttactaatgttcgtcggaagaaaaaaaaacatacgcatgtacataataaaagaccaaaaaataacacacatctataaaaatcgatggtctttaaaatacgattttctacgatatgaagtcaaaatatattacttcacaaatataaatatataaatataattaaattaagatccgtaataaatgtccgaccaatgttgcttaaacaatcttctatatctatctattgtaaactccataagtatattaaactttctgcaagcactcttacgctgctatgtggctctcagagagaaaccctagaaatctattatacagtaaaagtctgttaaagttcctacaaaccctcttacgctgtcacgtggcgctctaataaattatataaatcctagaaattcaaaggaaaaaaagaaaagcatcggaccgtcaaatttcacttaaattggttgacctaccccgttattttaaaccttggattagatctattaaaaatctcatgctgctaatctctatcccggaaaaaacataacgtgcgtatatgatcgaaaatatataaagcaaaaaataaaagaaatatgcacagtacatagtagaattggaaaaatcattagcgccgacactgatgtgtcggcactaatgattaaactatgattttaataaaaataatattacacaaatatacacagctaaacttaatctctgatagataaaatatcaaagcttcattaacttaaatatgccattgatgacttatgatggttatattgtagtgctaaataaatcatgacaaatgacgcaaacatgtaatagttaatgtgataataatgtttcaaataatttcatatcatattttatggtttcaaatatcacttgacaaatgtacaatgttaatttgaatcacatagtaaaaattaaaataacaaaacatagcattgttttttaagtacatctatttaggtttatttaattttgggagagattgagattctcaaagtatttggaatttttcaaaactttttgttcttatttgaggagtgagaagaacaaataatagatagatgagaaaaaataaattaaattatagcaagtggttttgctatgataaaacaacagaatttagctttggtttttatgtgaatctttgtagatttattttgggtgagattgggattctaaaagtatctgaaaattttcaaaacttttttattgctatttgaggagttagaggcatacatgattcatgatgtaaaaaaatatatataaataagactttaaatagatttttttgctacgatacaaccccttagttcatcacgagaattatgtattttctttgccaagtattattggcaaaacatgaacaatccagtaaaatacgaataaaattacttatattatattttttatagttgatagaaaatcaaatggagtgggtataattgatggacgaatgttatacaccactgaacccaactgtaaatgcactctagcgaattagttagtgtaaataagtttgtgaaaataagtacattcttagaattagtaaatgtgtctccattagctataaacaacatatggtggaaacaaatctggcgctaaagtataaatctttatcaaaatataaataatgatatggtcttttgcattttttttaaaagtagtgtcgaatgattaaccccactcatttgaaaaacataatactgtatatactccattaatatttgagaagtacttattactaacttcatatacaaatattgtctattctctaccacaaatcgaccaggacaaagggatttttcgggacattcctatcacattagtaatatattaaaacatactgtctatattacagaaaatatatttatttttttattattgtagataatttacattcctttaccgtgtatatagtgatgtatgatttcttttagcatttcgtttacttaataaaacataagatgctgtgtatctgtgcgggcttcctttccgatttatattccggaaatgttctcctatttatattttatcattataacgtttcaaacacagcctatcatacatgcccatgcgaatgcgcgggctaccttcttttttgaaatgtaaatatatcatacgtaaactgcaactagataattacaaacttacgatgtaactttacatatatgtacaaatagtgtatgtttcaaaacttataatctgaaatgttagcctaaacacgcatgatcatctaattttgtgaagccaatagccctgtagtagatgaatcctccccgtagggtagagttgtcggtgtagttgtggactggccgtcactaggtttgatgtctaaagcgtcgccggtgatcgatccataggttgatgtagcggtaacataccaccttgtgaaatcacctggttaatcatgaatgggtcccaatgataaacatggaacatggcttaccgtgcgacagagctcgtcattctcgcatggtgccccttcccttcttatatat

SEQ ID NO: 15436 - DNA, 702 bp, Oryza sativa
gttacaaggtaagcaacgcacagcgcacacgagctagctatccagctgcatgaatcacctaaaccatgaataaacctactaatgcacaaaatgcctaatttggcaacctacatctcataggcccaggcgttctcgttacggacctcggcctcctcctccggcgtgaagtcgttctcgatcccaaatacctccctgacctgctccggcatcatgtctttgatcaagtccgccgcgcgctggcatgtcagctccagcaggcacggcatgttcaggaagttggcggcattgatcaggccgaacaacttcttcctgtcgacgctgacgaactcggcgtcgaacttactgagctcctcctctccgctagctttcgcggcggcggtggctgtggcggtggcggcggcgtgcttgttgcagtactcgaccaccttggcgaggatatcggaggcgacgttggcgagagggatggcgccgttggtggcgcagtcatcctcgatcatgttacccaacgtcttggacaggctcgccgccgcctccgacagctcgaatttcgcgccgtccgagctgatcagcaggatcatcttctcgccatcggcggcgccgtctgctgctgctgccgatgctgccatctcggtggcgcgcttggtgggcacctgatcgatctgacgagtgcgcgcttgctagtttatcacgaatctatttgcg

SEQ ID NO: 15437 - DNA, 8787 bp, Oryza sativa
ctttaaattattcgtaaaaaatacatcgtttaataatttataaaatcattaaatcattaatcatctctgtatataatatacggcccaaattccacaaatacatcgtttaataatttataaaatcatcaaatgattaatcatcctagtatataatataccgcctaaagtccacagccgtgcctaacccgtttaacctcaagctaagaaattaagttaaaaactaccatgtataagacaaacggcaaggagaggagaggtccaacagaggtagtaaacaggtatgtgtgcgtacgtacggtactatgaatgggagaagattttgttttttaatatatctatttggtccaccaatttaagttatctataattattagttgatctaatgtactcaaataatgaatcacgaagcatttatagaatatccatgtgtcagattaagaatgtgtttataagatgtttaattaacttaatatataatagaaataaaaggacggagggagagctggccagacctagtagatcaaagtctatttgtgagttttttccataaaaagggttccaatttttgttatttggggataaaaaaagcaagcgaaaaggagtacagaaaacgtacgttgtatgtcgtacgtgcatattccacacagagacagagacagggatggagggatgctttttttaacggagatctaaccatctaaaataataggtccaccgatttaaataaaaatttatggtcagatttttctattttattacgatgccacatggtggtatgagagcgtttatagggtgctacgtgacgatacgggagtgtttataggaaataaacttttataatataagagaagatagatagatagatagatagatttatgagtgcaactgttgttaaaattctacacatataagaatagtacatgatatatatgccaaattcccaatatatgatctgcatatgcactgagtatgtggctaacacatattatagaatctatcttataattgtggtaaactcttgtttaacggagacttgactggatttgcgcaccttgggagttatctattgacttgatctaaatcgtgctggcccggtacctactgtatacctcacatgccgagccgttgacattgacatgatactctacagctgaagcttttttgagttatgttgggaagaatcactaacaaaaacaacttaatttttgtgatataaggtgaaatcctgaaatatatgttccacaagaactgtgcgactgattaagaaactttcgtatacattgatggccaaattataaaaaggaaattatatattgaagagattaatggcctcaaagattggaagtgttcactgcatgcatggaataattaatgatttttacccacaaatgatgaagggtggttgcctacttgcgaagtggacatgcaagttgattaactaggactgatattaacaaattagaccttgtctcatgtgttgctagttagtcaatataaataaaatggcctttccttggctgtcctttgccagttaatttgatagttgccccttaacaactaaatagcgaacctctgagcagatggccttaatatctatctactgaagcttggcttcgacgaccttatcatcgaattagcgtggcagtttagctcggaagacaggcagagcaagaggtagcacatcctctccgaagggaagatatgagcgaccagagctcgtaccctaaccctgctcaaggtattagatctgtctgctcatcccttgattatattctaattattagtacatcagttcaattgcttttgaatacacaagaacttttttcgattcatataaggagtgaaacgtttcctgtgcaattaacagggtttaaaatttcagatcaatcggattcatccgatgcgtaattatattgatccagtttgttgtgcattcggaaaattttgttcaaaacttcagttatggcggatcgaaattaccgaaattttggtagaaatagccaaaacaaaattttgaacccgagaaaataatactgcaaaattactctgttttaagagacctttttgtatgtctgttcggaaagaaaggaagacgacgcaattttggagtaaattagtgttgccatgattacgcagggtactaccagggtcccccagcctcggcggcggccggccaagataacacggcggccggcggtggcaagtccaacgcagccaagaaagaccaaccgagcttcatggataacctgtccgtaatccgtctctgctctactaattaatctctctcgctttctgtatatttgtaacgccatttatgtactaattgcttcttaatccattttgcagccttgcttgcctcccctgtgcccgcccagccgaagccaagaacgacgcgagctaactaaccttgctccatcaggcagcctagcacgggaaggaaggctgcaaagctactgcatgattatgcccagtgtttgtttgattattcagcatctaagtaagcacgtcgttaattagttcaatccggattgctcatttgcgttttgtgtactagtgaacgatttatgtatttgtcgggggcgcatgtaatttaatttattcccctttggattcattattcagtttatcttgtcatgattttgtgaggaaagaatctgttttacgcatggttaaattgtactactactacttcacacaattctttaaaaaattctcgaggttaaaagttaacttttcaaaaagtaatttttttgttctttggggaagtcaagaaagaagaggataaatatcttttgtcactactacttcaaaacctataacatgtggcattctcacgggggccccaaatttggccgacttcccaagtcccgtgcacgctgcgcccctctacgctaattacgtgtaatcgcaattagcataaataatatttttttctaatagattagtaaatttgcccatgcgttgctaccggaaaaggtaaaattacgattagaaattatggtttattttttgtgatctgattcccttaaaaattactacaattgattatgattgacttataatcatttagttgatggatctatcataagtatgaatcatgtgtagcttccagactgtttcctctcaaaatgaaaagaaaaggatgaaattaagaaccgagcaccaataaccaaaagcgatgtgccaaacaatcagtaaaaaaaaaaaaagaaaaggcaaacaatcagcccaaagaacttgaatcgactactagttaataactagaaacgttattttctgcccccaggacgtaatgtgactgtgagaccttaatcttttccacacccaggacgtaatgtgactgtgagacctgaatcttttgtacatccaagttgtagggatcagatgtttacagggctttagtcagagacgggatgcctaaccatctgccaaaaaaaatgtgtttgaccatcggaaaaatgatttttatagcagtgacgcagccatacaggacgcacaggagacagacagatgattcgtccgttagagcactacttccatgactcctaggctcctagccaagcacacggcgggtgatgggtgataataagctatctatttatttcagcttactactaataatttaaattataataattctaaggtcttatttgattcagcttagagttattaggagtaaattgaaacaaatagatatcttattatgatatattattacaatgtataaacacatagcttatttaatcaactgtaaatgtgctttttagattaattggttggctaaacaactaataatccagagaaacaaacaactaacaacttatattctatatcggcttattataatctagcttatagtaatctgacttaataatttagattataataatcttaacctgcaacaaatgtcacgaccgcgagggcctgtgccatgtcgcggagaagctggcgggccggaggaaggaggccaggtgcgttccgccgcctatcccagactgcaggtggatatctcctattcgagcgtatcaagggccattgcacctcgatcgtccttgttccactatgttggcaccgtcccgaagccttgcactcatgctctggccccagcaccgtagtgtgcggtgtgccctccatgtccgtggccatagttcatcttcctcttcatctcatcatctgccggatttatccttgttagacggttgtggaaaatgacagagtgcactgtcaggacagggacgactctgcgtgtagatcgaggaggacggagaagatcagaagaggaacaaggacgccaaggaaggaatcggccgaggccgggagcaaaccattgtggcctttctgttgttgcgcgtgggcttgcatgtggtgattagtcgctaaatcgctgggctcgttgttggggccttggggatgggcaatgtggagtcaagggagatatatctgactcacccagtttttagcttggtgccagcgctgtagatggccatagagtcagaggcccgatggcctggtgatttggtccggcctaggcacggcctggcccgacagccgtgccgtgcctggctgctacctcggtacgctgggtcagcacaaagttcagggatgcgaaacaaagaatagagaggaaaaataaacgtattatatggcacaacccaaagaataggaacgtaaaatagacttatttcaaaaaaggcacgatgggccgcccgtgccttcgggccggcacggcacggcccgactgctagtgggctgtgccttgacccgaggtgcagcccgtggacaggtatggcacgaagcgccgaccgtgttgtgctcgggcgggccttatggccatatatagcggcagccacttcttccgcttccctggcagcagccatctcttccgctccatggccaccagatccggctggcgggagctcagccatgaggcgaccggcgccctagtgttagagttgtctgttggatcacttaggtttagatctagtcgggtggttctatttgcgatcgatgattgaacaacaatagaaattaagggaaagggtttagtgatgtgaccggttgacgcgttggatgaggaggaagtcccggccatcgtcgttgatgtcgctttgcttatcgaggacggcagcgacgatgtgcttgacggcgctggtggtcgtagcagtgggagtcgtggtcgacgatgaggcgtggcgcggcggtggcacgttcccgtcactggctgcgccccctcgatcggttagggtttgtggggtggagtggcggcagcgatgaacctcgtgtcttgtgccgtcccgtcctccacccctctttatatggcacagtgtgacgggggcccaccagccattgggctgggcacccccgatcagggcgcaggtcaaggccctcttgagccattgggctcaagggaagggagatctatctaacgttctcccccttgatctcactatttcttttaactttttctattccatcacagatttacatatcgagcatgtttcatcgtcacggttaattaccgatggattcgatagccactatacacatctctattcagaaaaagatactttaacttttgggtcctatagtccaggattcataaggcttcccttaaacccatgcatgctacatgttccttgaacatgttgggaggtaggcctttcatgagcggatccgcgagcattctttctgttctaatgtgctcgagactgattgtttgatcccggactttgtctttcataacatagtactttatgtcaatgtgtttggcagcaccacttgactgattgttgtgagagtacattactgcaggttcgctatcacagtataactttagtggtttctcaatattgtcaaccacctttaaaaccgggtatgaacttctttagccagttcacctgccccgttgcctcatagcctgctataaactcggcatacatagtagaccctgcagtgatgatctgttttgagcttttccatgaaatagctcctactgctagggtgaacacgtatcccgatgttgactttgtattatcttttgcaatgtcagaatcagaataccccactatctggagcgattctgattttctgtaagacagcatgaggccttttgttccttgcaaataacgcaagactttctttactaattccagtgctctagacctggattactttgaaatctgccaagtaacccggtaacaaatgccaaatcaggtcgtgtgcacacttgcgcgtactgtaggcttcctacagctgacgcatatggctttgttttcatttcattgagctcatactgatttctaggatattgagatgcccgatacttttcgcctttgactataggagcaggtgtagcactacatctgtgcatattaaatttcttcaacaccttttctatatatgccttttgagaaagtcccaatgcatactttattctatctcggtgaaactctatgcccaaaacatatgaagcctcactgaggtctttcatgtcaaagtttgaggacaagaatttctttgtttcctgcagtagactaacatcactactagccagtagtatgtcatctacatacagaattaggaaaatgaatctcccattcttaactttgaatcaatacagttgtcctcgatattctcttgaaaacctaaatttctttattgttccatcaaacttcaagtagcactgtctcaaagctttgctttaatccataaatggatctctttatacgacatcccatattttcgtttcctttcatgacgaaacctttcggttgtgccacgtatacttttttcttcaaatcaccatttagaaattccgtttttacatccatctgatgtaattccaaatcataatgtgccactagtgccattataatcatgaaggaatctttacaagagactggagaaaatgtctcattgtaatcccttctctttgcgtgaagccttttgccacaagtcgtgctttaaacttttctatattccctctagagtcataatggttttgtagacccatttatagcctattgttttggctcctttaggaatttcttctaaatcccagacatcatttaatttcattgatttcatttcatctttcatggcatccaaccattcagatgagcgagcgcttctcgtggcgtcttcatatgaggtgggatcaacctccatatgcaactcttctatattataaacttcatagtcatcacggatagccgatcttctgactctttcagaccttctaggggcctcctcatttggcacattatctgtttgaggctgttgcagctcctcctctggtgtggaaataatttatgttgaatcctgtaaaacaggttcttcactttcattcattgttgccacaggagagataacaacaggtgttggtaccgcaacgtcatgcattgctggcacaacatcagcaggtagagagaagaaatgttcctgagtagacggagcaggtacagacacccgcctctcctcaagatcaatttctcgaactaccgagctccccctaatcatttcgttttccaagaagacggcgtgtctcgtttctacaaactttgtttaactgtttggacagtagaaacgataaccctttgatcttttagaatagccaatacaatggcagcttactgttttgggatccaatttcccaagatttgggttaaatactttagcctttgcaagactcgcccacacacggaggatccatagctcatacggtgttttgggcaccgatgcattctatgcattgtatgcattgttctaaaactgagaactccaatggaggaataattacattcttagccagcctctcaattctccccctcgaaatatggccaaaacgacagtgccataatttcgatgagacatcaggagttcactttcttttcttttgtcaacgaggacacaacattcacattctcagaaagagataacaaataaagctgattttgcaacagagcaagaccaacacatgcattattataccatagttcacatttgccatttccaaaatggcaatcatatctatcaaaatccaatttggatacacttatttcttttctttgcaaagaagggacataaaaacatctggaagtaaaagtgtgaagccattcgcgagctccaacagcttcaacttttgcttcaactccattggcaactctaatgggtcttttacttctttgcgtagtcctcattgaacggaatccctttaaacaattacacatatgaatagttgctctagaataaatccaccatgtggatctagaataaccaatcataatgagattcatttacaaatgtaataatgttctcacctttctttgccatgatcactgtcaggaagtcaggacgatctttcttggaatgtcttgtcttcttgcagtggagacactgatcctgtctcaactgtgaactgttattgctgaggcagatgctgaggctgtttagcttttgaggaggatgacctctagctcttttccttgttatctttaacaaggttaatggagccaccattggtctctttgagtctttcctcctcttgcacacaattagagatgagctcttcaagattccatttttctggacttattttgtagttgacaacaaagttgtcaaagctctttggcaatgaggacaaaaccagatggaccagaaagtcatccgagatgcccaaatctttttgcttcaacttggaagccatgttgctcatcctaagaatgtggtcttttacaccacctccatggtacctctctattacaagctgctttatcagctgtgtcgcat

SEQ ID NO: 15438 - DNA, 8776 bp, Oryza sativa
cttgcagaaagagtatgaaaaatccagtaaaccaaaaagtaatatctaatttataaactaagtattatttaaaggctgcaccggaaaaatgattctccatatatatgtattatattttaattaggtattcatgattaaaactggtccatatcactattcctgcaattagtcttacatgaattatctgtatgaggaaccattggctacattatatcgcttcattcaacagttctagaaagatgaataaatgataattttgaaataacttgtatatcattgtaagaagccaaaattggtcattttttttaaaaaaaattaggaagttccttagtaccttcaactatgtccagtctagtaataagaaatcatgacctccgaatgataaaagaaataaattatgtccattttcactagaaagtctccagctaaatgtgatgttttgacttttcaatcagcccaattagtaaacaacaactgtagtcatttttttagcaataataacatgagtttaccactatctttccacgttaccctttttcaagaatatttaattatgacgctccaaacatgtattgctggtagacaactagctatccactgcttcttttttgttcctgtgtgattcagtcctcagacgcagcaatccaaagtactgacgactaaatctgactaaatggtctgtctagtgccagcaatactaacattggcaccaactaacacaagcctactagtagattgtaggctacgccattctattttattattccaaaatgttaccagttgaacattatgataaaagcaaattagcaggtaccttgatatcccttctgacgtattttccgctgccagcttctccaacagttccctcgatgtggtgacatactgcgattgaaggttgcacatgctaagaggaaaacggaattgaactttataatctaaaacgtgaaatgcagttgtcccacagagagcaccaaatcatgtctcgaatgttacacatgaactaaataggatccaacaaaagctggcagatcaccgattcaattagcaaatggtaaaacagcaaaagattagtttatattctttttcctctaaaactggttgcacgttattcagaatacaccattctcatcaaactgaaatctgagtgcagaccaaaattagggggcgaaatccactaggacaataaaactgctaggattccgagatacagctatacttacatgaatgagtttagcctggttctgctgccgcggagccgagtcaagcaaccgcagcagattcacttcagtcttactgatgcccattgtgggatatctgatcaaacacggtaccaacaatagaagcataaccacaattgcattaacttcatttccagaaatatgaacgcgaaatcgcaattcatgaatctcctgattccagataaacagaagaaactatgaacggcctttctccgaatggagagggggaaaattgtactacaaactaccttagcgcacgcgtccaatccgatggacaattcgtatgaaaatgaaacaagatccaatcgacgggtcgagatacaagaatccgaggcggggacaattgaacggagaatcgtattgcaaggggaaaagaaaaagattgcaagattcaagtggtagaaaggttcaaggggacacctcctccgcttgttggcgtcgggcacggactaccaaaggaagcggttctggccggtcgcggatgtcgctcacgggtggccgttgccggctggccgaccggacggacggacggacggcggcggcggcggcggcggcggagaagacgcgtacgcctcgtcggcgtcgccgccacgaagggagcacagcggtttgggtgctgggcctgatgggccgagaaggcaactaagaaccgtccgatgagattggacggtggatagggcagaaactgtagaaattgccatgtagggactattcgtgtgattgttagccaaagtatgtgagaaaaattcacatatatataattattgaaaaatgtgaatcatagcttctctaaagaaaaccatagcaaatagtccattcaactccaattcatgatgtgcgactataaattacaaaacattgtctaaataagagttacttttttataatggaattgattctggcctttactaaactacaaccaattattacagaattgctggatgaataagtaaaaaaaatacaaaattataacttggttagaaacaataaaaccgctaagaaaaccacccttaaaaatatagatctccatgcatggttggctagagtgtgtataaccgagctggttcttgtcttcctcaaagcagaaaagcataatcttttaaatgaatagtcgatacttgtattataattaaattttgtacctatcaccattatcatatggcgtcaaaccaaagcggaagaaataatggagattagctgaactgtatatcagtcattagtccagattttaccaccaccaaacgaatccgatccgatgaagacaccacaaggatatcacaataatagggaacctccaatacaacgccttcaagaaggctgcgacatcttgaatatcactatctctaggttttcaatgagagagtccatcctatggcacggatgcaaaggatattgtgacatcacctccaggaagatgtctgttgtccacagaagtaactgatatctatcttcggaggcaaccgacaacagactcggtgggtagcgacaacagatgccggaggctgagcaaggggacatgcccgaggaagctgcggccaaggacggatccggcaacctacatcgccaaccgtgatgctaaggcaccacctcccgtcaccgtgcagccaaccattgacgagggagcctgcaccagtgatcgtcacatgtcgcgccttgttagatccatgttggctccttaccttgcctcgttgccacgctttcctggctttcgcttgctcacggggcaacgtcctcaccagatccacgccacctccgccttcctccatgctacagcctctctgttgcaccattgagagaggagccgcatcgccttgccaacctgccttgtcattgctgaccaagaattgtcacgacgccccaattttatttctggattaaaaaccattaaataatgcagtctagaatttatattaaaagtcaaagtactttagggtcgggaatatcagtgtaattgtaatagtacaaagttcttttaatcaattaagtaaatgaaaaaaccaattaaaatcatccccttctccttgggccatttcgggcccaagtctgctcttcgttcctcgatcttcgcgggtccagcgagcttctcctcttcatggatcagctctccttcctctccttggtctgcccatctactctctgctgaggcctattcgcctcctctctctcgcgaagtccacttcacctcccttctcccttcagccgccaataggtagggcccacctatcagggtcatcccctgcctcaggccagtcagctgcaaccgcttccaccccacatcgccgcctctactgtgtgcctcccagatcccgcatgtgtgtggacctgagtccctacacgctcccgcgcccacaccccctctcttcccatgaaatccggtgggatcaaaccctacttctccccaccttgtcgacccactccttcaccaccagttctcgcctcgtcccggctcccattcaccctctcgaggctataaagctcattccttgagcttcctctcccattttccctagtatcccgagcccaccatgccccgaaaccaccgcctcactgcaccaccctagcgccatcgctcgccgccgtgctctgacctagcgttgccacggctagtgccgtcgccgcaccatgccaccattgccataagcttcgctgctttgcgtagcgcctcggccactgctcctcttccactgctatacttgggtgataatttgactagattgtgtatattcttagccatgcttaattaccactagttcatctaatgggataatcacactacttacatttagtatcttgacgagctgcaagctcgagacatctagccatgctttattggtcataactatccacctaaaatatatggtttaatgttgggttgggtgcatgattttgtttgtcacgaacacacgcgcccatggcaataaaggacgttcacgtgaaaccctataagacttaccatgcttaccacaagaaagcatgggcaattgctgaacttctagtatagcttttccctttccgatgtacccaagtaagggtgggtgtgatgaagtttggatggactgggcagcggtctatgcggcttccggattcattgtagcacaagaggggattgcccaccttggttttaaaggtacgggtgaaacctgcaatgtggtgcacttggttaggggagttatgcgaagggacttgttgcaatcactcgcatggtgacatgcctgcggaagcacggtgacatgccggtggattgcgtcttgtgggtatagttgtacacttctagccagagtaaaactattcgaatggacatgcttgcggttatgggcgatcgaccagcttcaccatgtttagtctcactctattatttaacttgacttaatgaattggtatagttcaggtggttggctggacctgtttatcgtggtgtagcattgttaagtggacattaatcttgtcttaattaattaactgttttattgttttcaactacaaatgtttacaactgcattcaagcaaatagccacaaaccctcctttgtctcctcttgcatgcctacatcattagcgtggcttgctgagtaagttggttgtactcagtcttgctattattcttcctttttagaattggtagaaaaaccaagacttataccccagtcgagttttacctatgaagtggagttgaagcctgctaggatcgtatttttctgttgttgctttcttttcagcgtgggaactaagtgtctcttccgtaagtatttacgttttatttatgttctgatctgtatattaatatttctgaacataaatttatacacaaaatagtctgaaaatttggttaaattttggattcacaacattataattcaatgctattcacctatatgtagccatgccattataatgttacacgtattcaatatttgccattacttgctatttcgatgcaattctaaattttttaccaaatttcttaatctctttaaattaaaaatacaaaaagataactactagtttctcgtcttcataacaaaatgaaatttccagttttgaaaaacaaattttctaattgctgcaaacgcattttctgttttatagttctaataaaaaagaaaatccaatcatttagaaacccatcattaattgatgcacattgctgacttcctgctgcctactaaattggacctagtgctactccaccaaaccaaagcatagagccaaacatggcttggctggctatggacatatcactatctagcactaccatgccatgtcctcacagagtcaaactctactcctttcatcattgtctcttgtgtcacatggatatacactttcgatggaaattccaacattgcggtcgcatgatcttgtcgtccatcttatcgtccactcccttttccaaattttgcatgtgatacactggattggaatctgttgctccatataaataagtgactctgagagtagcaaagccaaagcaacttcacacacacagtgtactgatcaacacttctggaagtggagcaaggttgagttacctgtgagacagtaatgaagaggaacaccatccttgctctcttcatctgggccatggctatggtgatcttcgccacggcaatgccggccaaggcaaggatggaggggatccatcctcaaggttagtttggtcattttacccttgttccatagcatattgtagtatatttttaagctaaatcaaacttttcttcatacctgtgacactagtatagcatatcccatgggtgtcggttgggaatctcgtataggtgccaaatttttaagaggttgtgctagtttttaattttagatccacaagagtggacgagagagcatgaaaagtctcacatgtattggtttttaggccgtccctgttatgggttttggagtagtggactagtggcaatacatgcaaaattttcctttatacatacacagatgagaagatttcactcttcttgtttatttggaagtaatcattgatttttcttgtgcaatgaaatgatcgcaggatgcagatgctgctatttcagacttaggccgatgatccagtgtgccaaggcttgctgtggctctgacgatgagaactgctgccttgtgaacaactagttcatctcgggaataaataaaccgagtcggtcttggacctttgcttaatttccttgtgtttcaacgatctcgctgaagaatgcagttatatatatgaaataaaatccagctcttgctgttcatacctaaatgtgtgtgtcctcatttccaaatctattgtgtgcggtcagcaccttgaataatactgcatcttattaactgcgtaccactgccaccagtaggttatttgtaaaagatgtagacataaatatccatgctacatatattctacagttctattcatgttggcctagttgaagcaaccttgacatttggcacttttaaaaacacataatacgaaaacttcaactaaatatatgtatatactccctccataaaaaaaaaacgaatataacgcattacagtacaataaatctatacagatatatgtccagatttataatagtaggatatgtcacatctagtattagattggtattttttaatgtaacagagggagtagaccccgtcctcatcattagtcctgaagaccttgacagtactacacaaggagcccttggactagcagtcaaaacccgcgggggctgaccgcgcgtccgacatgaggcttgtgggaagaatatgtgagagaaaataggatacccgataatatctgagttcgaacccgaattcgtaaaagaatgtgggctagaatacgggaagagttgtatccgcctatatgtctcatgctataaaacatatgtgaaaatctattataaattcacctatatacataataaaatgttagttgattattatttttataataagctctcatgtattattatataatttgttctttgatgtatctcttttagcacttcaattgtcttcttacattaaatatctatgaattaaatatacaaataaatatcgttccgaatctgattcaaagaaaataatatgggataaggtacggatgagtgatatgttatctgacattatcagtgcctagttctgaatttaaagaaaagatatgatttaggatatgggaatggtgtgatccaaccgttttcatctttacctgccactgaccactttactcatgtgacaccggggctgaactggctagccaatgcgtcaggtgatcatcaattcagcgccttcttctttctctagtcactcgaacgctggccacatcggttgacctaatataccaaagcgaaagtcaaaatttacaattttaaacttaattttgatgttgaatttaagatattttcaacatatattcttttccagtattggcttttaagtcgctaagaataaatatatacaaattgtaactatatattaaccagcatcaatacaaaattatcaatttttttacatataatattatttaaaatttgctaaatatctatcttattgtcttaggactttgaaagaccaaacattaattatcatcccctgttttctaaaagtcacaccaatcactacctcttacttttttattacccatttatttgcttcctcgatctaccacattttctattcgtcctccttataacctttaaaaaatgggaccttttattgtttcgttgggttttatttttataatttttagaagtcctgtcaaacatcatcattgtactcttctacggcccttccactgcctccctctttattgtaattgggattctacaaatcgaatataattcgttggagttaattttttactttgtaaaagtcccgccaaccattggtggctcaagcactatactctaggagtataacccatccactgcctctcttttttattatcattgtgattttaaaaataaaaaatgattgtcattgtggttttttttactttgatgaagtcccgccaaccaccgtgataggttacttaacggccttccatcatccccctcttaatcatcattgtgattctatttaggattttttttatagttttcctatgtcccatcaactgccactaccctactcctgctcgtttttaccttaccgccggtaaccgtgcggttaccgcggttaccgggcttaccgcgggggtacggtaatataaatacctcggtaacctccttaaatttagataaatttaaaaaataatttgaatttttgataaattttgcacggttttgtacggtttttcacggataccgcggttaccgtgcagtaaccgtgcttaccgccggggcgcggtaacccgggccccggcggtttgggaaaccctgttacgagcatgttgtttcaactctttattgcaatttatcatcgttgtattctagatggactattatttattttttttcatatctttattccaatattttgatatttatgaattgtgttcctacttgaactcttataattattttctatttttggaatttatttatttttttattccaacttttcatt

SEQ ID NO: 15439 - DNA, 3404 bp, Oryza sativa
tttagtttttatttctaattttcgttaatctcgtatgtgttctatatgagtaaacctttcaatatttctaattttttatttccattttttgttgtttgtaaattgtaatcttacttgaattcttactattgttatttgataatttattctatatttcgaattttaattaatctctaattgtgttctacatggactcttctttcaatatcttttattccgaatttcaataatttctaaatgcatttctactcaagctcctctcttctttttctctgattaatgtgagattttgtagcctccatagggaactaaatataatacacacgatggatttaaatatgttatcttttacccactctcgaagctttttttatttttagtcttgcgttggagtactttcatcgttgaaaatagatgttttttcacaggtggccagcgtactggggccacctatgataaatcttttacataggcgacccgtgcctcccaccatagatcaaacttattgcaagcgggcattctcatggatcgcttatgatcctgtacttgggtgatcggggttttctgtgaaaattattcttttatgcactatgactaaaaaaccatataccgttctaatggaatatatagctaggtcaacatgattttcagatttgatacctccagtaacatatttccagaccgtcagtatgatacttgtggtatcagatctggtacgttcagtatcagacatgatgccccgtaggtatcagatctgatacctaagtatcatgctaacatcattgtgatacctacggtatcagacatgataccctgcatgtcaatgtcatcatgatatcagctttttggttggaatggtataccgttgtatagtatttctgttaaaaattaacatatgtggagcataaaattcattctcatccaacctgtggatcttctccttctctgacatgattgttgattccggacgtctgcctcatcttcttcagccttttggccttgagcatgtcggccacacgttgacaggctagatctatcaggcccttgacgcccatgacattggctgcgctgatcaagcgccgcagcgtgtcgttgtcgaccttgatgaacaccctgtcgaacttcttgagctcgtcctcgtgcattgctttcatgtcgccggtgccagagctcaaggtggcgtgcttcatgcagtaccgcttggcgatgacgttgtcggcgacgttagggatgggaatcccgttgtcaccagcgtggtggtcactgttgttcgtattgttcaccactgtctatgacagtcttgccaccgcctcctccacttcaaagtgttcttcgtcggagctgatcaactcaaccatcttgccaccatccgtcgccatgcatcgccattgatttggctctcaagttttcttcaaatctaacccaacaggctgatggatatagatggcgatgctttgactcttggaagtgttatatatattgtttggcgatatcgatcgataacacactgatgaattttgtgttatcttttgcgatttctactagtatactaggaaaaaatgcttgtgcgttgcaattggaggtaaagatcaatggagaatgagtttattctttcacagatatctgatatatgtcaatacttattatccagtagaagccggttaatttaaaaccgtacctatggaccttttccccatcttcacgggatgaaaaaaatatagaactggaatctttcgtaactttaggtcctggttaaaaaccagcaatgtagatatcggttttctaaaaagaccgataccacaattaatttagttgtaggtatcataggtgctggttccagttaacaaaccgacacgatcttatctaattgagctgagcgaacctttttttttctccgcccatacgtctcctcttcttttttccctcccctcctttactccacccacacacctctttcttttttcctcctctttttctacgcctcctctctcttctcctcaaacctaaaaggtggcagcggctgctgctcccccttcttggcatggcggcggctgctcctcccctccccggcacggtggtagcggctgcgtctcccctccccgactgccccctccgctttccgacatggagcagatggcggctgctgctccctctcaccacctgccaacatcaaaatttggtaagccctgaagtcatcatcggcctagagtcagtatcggctttagagtcctagattcgcccaataggaattatcaagtcgccaatagtcagatctttgtagattcggctaaggaaattgatcaattaaaggaagtttatctagaggagaccgagttcaaggaggatgcggcataacagtttatctattaattaggaagaatatgttagtttccttttatctttaggaaagtgtgtttagtgttcgataaggactttatgttttccttttatctttaggaaagtttttttttccaagaaggactagtatctacccatgggaataaatatgtacacccggggtcattgtaaactatctctcgatcaataaaactactctcggcgcatcgctaccctcttttccgaggttttttatttatcatccagcggaacttggcacccgatgcgggctgcatcagcttttcgatctcctgcgaaggggtaagtcctacattccgctggccctagcaattgtatcggctacattggtgttgttcaaggctacatcgcttcgatctcttggatcgctctggttaggttgatatatttgcctacctatttatcatatgtcttggttaatctagtctggtagctcaatttacttgtatcggctggggtctgctttagggcttttgccggtatcggctaaattgcttttccagattagattagctaaggtatccaccaccttgaaaattagtcaaagacttgattgtttagactttatacttcttagcatactttgtgacgcatcatctctagtcatgcttagaatcataaagattaacctgtctttgattataataggaaaaaatacgaattcccccccccgaagtataatggtcgtccgaattacacccctgaaccacaaaaccggacttcacccccaactatgcaaaccggacgaattatccccctcaacccaatccgcggtggttttggtctacgtggcagtccagtcaacaatttttttattaaaaataggtgggccccacctgtcagtttctctctctcttctatcttttctctatctcactctctctctctcctcctttagacggtggcagcggaggcagcgagcgcggcgaggcgagacggcggcggcggcggaggaggaggtgagcgcggcagcgaggcgagcggcggggccggagtaggcgaggcggcggcggaaaggcgagcgcggc

SEQ ID NO: 15440 - DNA, 4549 bp, Oryza sativa
gtggggcccccctattttttaataaataaattgctgactggactgccacgtagatcaaaaccaccgcggattgggttgggggggtaattcgtccagtttgcatagttgggggtgaagaatatccggttttatggttcaggggtgtaattcggacaatcgctatacttcgtggggggggggggtaattcgtactttttccattataataagggtttcatcggggtttcagccgatgagttatctaaacgttgcattagcttacaaggattgtatacaagttggttttaggtgattgcaacaaaggtttcattgtttatctaatcatttggatttaataacatcgaaacaccagacgatgtatgctttaaccatcggatcacttattctatcatatcattattagccgattgatttatattggattatattattgtcatattacattatcattagctgattgtctttatatcgttatctacattggacatatagccgattgttcaaaaccctatcgacatcggctggaactactccatcggtttgtcaaccgatcggctatttaatatgttgtgtacatatcttgtcatttataggatcaaactgactggcacgtctgcgtctcattaatttttgaagctgcactggagctgagcagatctcccaagctgttgttgttatagatttagtttgcgccaacacagatccgacaccatcagtcgagcgcaaatttttcatcaataccaccatggcggctgcttccctccccggcatggtggcagctactgccccctcacctccccaacgtggagccgacaacggctgctcccctccccggcgtggtagcagcagctgcgcccctcccccctccccggttgctgtaaaatcaaaggtgtttttgattattactctgtgatgaacaattaggcattggagattattggttttattatttgaaatttattcacgaagtggttttggagatgattggatttcacaggtgaatctgcaggatttaatgtggaccggtcagaccgggctttggtagccggtcagaccggcgtgtaatgcgcggtcagaccggcgcagcccacggtctgaccggccgacgctgtgtcggtttcggtttcgggttgtttatttggatatccgagtttattccatgattatgacttctagatggatactatacgtgtgtaatactattgtttgctgctaatgagtcaagttggagatagcttggtctcggaatatggtttctttgtttgttccatgtgtaggtgactcgatgtctcgggagagtatttgcggtgatggaccgggagtcggcttggggataagacgacgtccatggtggtcagagatcatgcgggatacttaggctagagttgatgcacgtggttgatggagattccaaatggcatacgatggagttattgtgtgcgtttgggatgcggagtcgaatttggaaggagtccaaatttggtacgtttggttatgtaaagtttctttcttgtactagtgggtttcctaaggtgtttaggactcctagtatgagtttggttcgtggctttaggctgcctacctcatgtataaatagagggggagcgtgaggcttcccggtatcgctttagagagcaattgagttgagttttgagttagggtttcgagtttagtcgaaattttgtaaggagtgctgttggtgcactttgtaaacacagagagaagtaataaagtcgtcatccactttaagagttcttcgatttgtgtttcaccgggtttcggcggtctaaccggcggcgcaccggcggtcagaccggcggcatcgcggcggtccgaccggcgggcacacggcggtcagaccggcggcttccactcggtcagaccggcagatcaatctcggtcagactgacttccgtcgatttcgagggtaacttttatttccgctaaaagtttttggtttttgggtaaaccaaccattcaccccccctctggttggcttagttcttgtgattcgatcctacaagtggtatcagagcctcgttttcttctttggatttttatcgatctaaagtttttgccatggctactccagctaggttttcaactaagcctgatgttttcgatggaactgattttcctcattggtgttgtaagatgcaatcttacattatggctgaaaattatgatatttggaggaaagtttctcttccttatgtgattcctgaagccattaatactgatgctttaaaaactgagtttgaaaataattgcaaagctcgtaatattcttttgagtgggatttctcgttctgattatgatcgtgttgcacatcttgaaactgctcatgagatttggaatgctttgaaaaactttcatcaaggaacaaataatattaaagagcttcgtcgagatctttttaaaaaggagtacattaaatttgaggtgaaatctggagaggctttggatgactatctttctagatttaataaaattttgagtgatcttagatctgttgattcttcttatgatgttaattatccacaatctgatatttctcgtcactttttgaatggtcttgacatgtctatttgggagatgaaagttacatctattcaggagtctgttaacatgtctactttgactttggattcactttatactaaattgaaaacacatgggatgaatattctttctcgcaaagttgattctaaatcgagtgctttggtttcctcttcttcctctttggttattgatgcttcttcatctatgccttcttttcttgctgcttttaatgccacatccgatgatcaactcgaacaaatcaaggaggaggatttggctttggttgctaaccgaattgctcgagctatgaataatgccaggaacaggaaaagaggtggtccaaatcgttgctttgaatgtggttcaattgatcatcttcgttcgcattgtcctaagcttgggagaggcaaaagagaagacaaagacggtgagaagaccaacaacaacaagcccaacaactacaagtcgaagggttctaaccaagggaggaagatggagaatcttaggaaggcctttcaacaagtttgcgccgctttcgagccactaagtgatgtagatggtgaaagtggagatgatgataagggaaagaacgtctccgatgtgtgcttcatggtgcgtggtgaatctgacacagagtatgaagataatgaggtgtgtgcttttgaagaagctattaatattttgagtgcaaaaaataaaaagtgtgagaagatatataaaaaacaggagtttatcattaatctcttaaatctgaaattaacaggttaaaatctcttattcctaatgatgatgattgtgaaaattgtgaggttttaatgaatgagatttcaaaaattagagatgttaatgctgcacatgatttgaaaaatagatcttctcttgcttgttgttttgctttgcacacacgcactttggatgagttgtttttaactaaaaagttgttacaaaaatatcaaattgcttttcatgctagtttgatgtttaacatgatttctgctaaaaagttaaaacaacctcatgatgttttggattgctcaacatgtaatttgaataagatgaaactaaaagatgctttaggtcgtgttgagtacatggaagatgttgtgaaaaacaatgaagtgctttcttgccccaaatgtcgtaaaagcaaaggtgtcatggtagattgtgaaaattgtgctaatttgaaaaaagaggtttcttatttgaaaaattctttgctaagattttctgatggtaaaaataacctcaatatgattttggatcaatcaaaggttagcacaaataaccgtggtttaggttttgatccttatgctcataattctagacatcctcctgttgtgttaggtgttggtgctaaaagtggtgagattttgattaaacatgatactaataaaactgtgtttaaatctgctggtatcatgttaaccatgaatgtatcttcttcaaaatccaatgttgtgcatgcaaaacctcctgtttctgcttgtgttgctaaatcttcttgttctaacaatgtgtctaaacaacgtgaaaaatatacttgttctttttgtggaaaagatggacatattgttggtttttgtttcagattagctcataaacagaaaaaggagagagagattgcttttgcaaaatcaaagtggcaaaaatcgggttttccctcgaggaaaccggtcagaccgcagtggatctcgcggtcagaccggcgaccggtcagaccggctgcagagcctcggtcagaccagacaccggtcagaccggcggtacagaggtggtcagaccggcccccggtcagaccggccactgtacctcggtcagaccggcctcggaggaatttttctgaaaattccaaaattgatatgcctattgaatcttctggtcgtgtgtctcagtactggattcctaaatttttattatcatctaaccctagtactgaggcttcgacttctgcttgtgtgtaggctttggtggcaaggaaggagaa

SEQ ID NO: 15441 - DNA, 5461 bp, Oryza sativa
ggcggcttccactcggtcagaccggcagatcaatctcagtcagaccgacttccgtcgatttcgagggtaacttttattttcgctaaaagttttcggtttttggatataccaaccattcacccccctctggttggcttagttcttgtggattcgatcctacagttgccccctcacctccctgacgtggagccaacagcggctgctattcccccctcctcggcgtggcagtggcagcggctgctcccctcctcggcgtgggggcagcagctgccctcccctccctggctgcccactcacctccccgacgtggagccgacggtggttctctccagcgtggcggcaattttgatttgtgactattttgaggattttgtgaattgggatgttgatttgtaatcatcatacgatggggattaggtttcttggcgatgaaattcatgagctctagattaaatttgcctttttgtgttgtttttgttgtcttgttaatttattgatttggagatctaacttggggtttttttaaggactcgaactcaaacgacggatgaatcgaagccttaagatttttaattttttcattaacgatcacgagttgtgtgcactttggaaaaagttcgcatgacgtctcttatgttgtcaccaagttataaaatcgtccgtgaacccaaaaactagatatatgagatcccttaatgtacaaaactaagacactatgggtccttggatagtattgacagcggttaggtccttaggcagtattgtctgcgattaggtccttaggcagtattgattgcggttttatccaatgtgacagcttgagaattgcaatggaaaaggggcgagcgatcccgttggagacgtgagtacgtgacaccgtccctcgcattgcagtatagaaaaatatagtaacaacttatagcactaattagttcctttacatctaacgttgaacatattatgaacgaacctgcatagactgtaattaactaatactactacctaaccggtaattaactaagacatggtgcataactgcatatacttaaagttgctcatcgatctaatacatgtaagaataggatcagagccattgttcctcgtcctcccggcgaaactcctcttcttcctccggcgtgaagtcgttggtgatccccaacgtctgcctcatctgctccgacgtcttgcccttgatcatgtccgccaatcgctggcatgccaggtccatcagcccctggatgcgcatggcgtccgccgccgtgagcaagctgtacagcatgtggttgtccaccaggatgaactcgtcgtcgaagctcttcatcatcagctcctcctcctccttgctcgtcttcgccgtgtcggcgttgatggcggcggcggcggcggaggcgtgcttggtgcagtactcgaccaccttggcgaggacgtcgccggcgacgttggggagagggatgccgttgatggcgttgtagtcgtccttcttcatctcgtcgagcaccgtctgcgacagcctcaccgccgcctccggcacctcgaagcgagctccgtccgagctgatcagcgtgaccatctcaccggccgcggcgttggtctcctgcggtgctgcgggtgccgccattgatcggtcgaacacggacgacgctgagattgatggagaagaaaggttaattcctctcctcctggaaggctgtaattaaaggtgattgcgcgcggcaatcaggttagttagtggtctctatttatttcacgaattcggctaggtatctaagcggaatacgttgcgtatctccttgtgtatgaagaaaccacatcaatcaggattcgtagtagaattggttgcatatgcaacataatctcgattggactctgcactttatctgtaagccggttggtttcatggaattaacgtattttgatcggaattggcatggaactgaacctggtttttagaaagaggtagttatagaagattgacatacgacaacagcagcaactaaaacacatcccaagtattgaatcgttcaagtctcatcgtcacttaaaaattgcatagcatatacggcgtgtaatatctacagctagaacaaggtatatctggaattattgtaggtgggttcttcctgacacgtaaccgtaatctatctattattatatgctaaagtctattaaatttcctacaaatgcttaagctgccatgtgtcatcatataaacactctcaagtcaccacaggtcactctaataaaataaaaaaatctaaccgtcgatttttatttaaattggtggacccattagttcattagttttgaatggttagatttttatctttacgaggaaacaaaatctccctccgtccaacttacgtatagtacgatccctccgtagcagtgtacttcctccgtactcgtaaagaaagccgtttaggacagcgacacggtctccaaaacacaactttgacttcatgtttctataaaattatttattgaaaagtgatatatgtatacttttatgaaactatttttcaagataaatctattcatataatttttacatttccaaactcaataacttgagagttattcatgatttatattcctaaggtttgacttaattataaacattgtcctaaacgacttcctctacgagtacggagggagtacgtactatattttttcctcctcctttttataccatatatataataattaaaattgaaaataacgggcctaataagcccatcaacctactaatccccactccccacccatcgagccatttgtgtacgtacgcttttcttccacctctcctgcagcggataaaaaaaaaagctgcaagaaaaaaggaaaaaaatgcatatatccgtatgtacccaagaaaaaggcaaaaaaaaacacatacactaattgacagaaaaaatacgtacgtacataggtacatacgaataagatatagaaaaacaaactatttattcttatcgttatatcgttatagttatagatgactatttaaaacgtggcacatccatcttatctctaatattaacatattaattatattttaatttaaaaattatcacatagaaccatattatactcttttaggcctttcggatcgatctttatagatgactatataaaacatggaacatctattttatttattaaaaaaatattgtgtcacatattaattatattttagtttaaaaattatcacagcaaccatattatgaccctctttgtttaggcttataagcaaacttataagaaaaaaatccgggcctaaacaaacaatcagtgttttcgtttgtttttttaagccataaaccactctaacactattaatataataccccgtatattaaaagatatttaggtttttttagtttgggttgacttgttaaaataaagatgttaacagaaataaataaaagaaaaatatttttagaagtgggccaacatgagaaggcccataaacccagcccattagttctccccctaaaacctagagagaggaaccgaatccacctcccctcatagtgccgccacccctcaccctggcccgcgcctccttcctcccttccttccatctacagcaaattgctctccctagatctccaccttcatagcttggatcaagaagcgaagtagaaaaacggaacgaggaggaggagaggagtagaaggaggggttagaccggagtctcccgtattgtctcctcacaagttctctaaagaaactataggtgagacttatctccttgttgtatcagttgttctagcatggctttagtgcattaatttgtagttagggaaggctagagaaggagtttgggtagttgtggttcggtttgttgcagttctgcatgtgggcagatttgcagtgtttcagtatttcgatgtttcggggctctaaatgttattttctgtgaaagtgtataactaggaagttgtagataatgtttggatatatcttctagccaaagggcgtgattttatctcaagtggtttaggagatataatttttttagtatgactgttgttttttgtcataatctggatactagtagattgaactgtttttggaggggttaaacagtggaatcagccaggccgcctttagacaaagttgtagaggtttttcttagctttccatattggtaaagtacaccctgattgggcaagtagaactccagttatggttgttttagtgtggacagtctgaaattctagacagattctgaagcctgctttcaagcgcatattagtcgatttaaatggtagaataaaaatatgctttctacatgaaagttgtaggtattgttctgtagattttcaaaatgtatacattttcagtcatagccttttcatatttcaagatataaaggtttgaagcagcagttttgtgtatagtccaagcggcgttcctagttattgagttttgataggatggggcagtaggttcacctttttcattattttacacgcatgtttgaatatgtgtttgctaaggttttgtttgtgattaggtggtggtgcatcagatcgtgcatgataccaatcctttgttggaggcaactgcatgacgaactaattgtgtgattcatggattgtttactctatctatttatttctgatatatttcaacgtgataagtaactgcttatgttcatattattgttcacgccatttagatttcaagttgatcttatgcgtacgatgttattcttgttttaataatattgattctggttctgtttaaataattcaagttccctggttgccatggatgtgtttcaatttggttctttgattctggtttcaattattcaagtaccatgcgtagtcatgggaatgcaatttggttctttattcaagttcctgtgggtaagcgctgatcacgcttactcggctttgccggcaaatgctaggatgtattcactattgtccgggatggaaactactatttcaattcatgccagcccgggatgggaactactatcttctttgacttggtgtttgaaaatgtgtttcctatcaaagaaagaaagccttatgttcatgctttattgtcaatgatgtgtatatgtgttttctagttccatactgtacttgctgagtattttatgctcactcttgtgttttatttggttttaggtacgcattgagaccgacatgtatgggcgggaagtagcacccctatatacacatctacttgacactatcaaactatattgcttaggtccataatgacacttaaattatatcctggtttggtcttgtaataatcttttagatttctaatagtttcttccccatggattataaggatggatcgtattatgggaatgatattgctattagttcaacttataattgcctgttgtggatgtctgtatttataggggagactctgccaaaatttctaataattttggaagttagtggtttgagtgttctttggtggg

SEQ ID NO: 15442 - DNA, 11935 bp, Oryza sativa
ctcccatagccactttagatttatcttcatctaagcacttcaacaagacaccatctatgttttggcgatacaaatctccatcaagcaatgtatatttgaatgcttgccgccgaattttccgatcaaccttaagtgtgggatcttttagatattgaatcaaaggaattccccaatcctcttctgtatcttgggcacaaatgtccgaattctcaattaattcggcctccaaatccattgaagcgtgccccccagctttctgcccaacaccggtcagaccggccacgcagggccggtcggaccactcagggatgccggtcagactggcggcatgcggccggtcagaccgcccctggtcaccggtcagaccggccgtgcaatgccggtcagaccgcccttggtccccaattctgccaatttcgcacaaagatctaaaatcaagcaccggctcttctaatatcagaaataaccccttcttcacattataaccagatgcttgttgtgccaagtcatttgctctagaattatcacgcctagcaatatgtctaatagcaaaattatcaaaattggcaataatatccaaacatgaatcgaggtacctatttagtgacccgtccaagcatttatagattccggcgacttgttgtaccaccaattccgaatcaccaaaggcctccacatatttagctccaaccatctccataacttgtaagccgaacaataaagcattatattcagcttgattatttgtgcaataacattccaaacgaaccgatgcctcataacacataccattagctgaaaacaaaactactcctatgccttgaccttctttgcaagaagaaccatcaaaataaatcttccaaggtataacttcaactaagcaaacctctccctcataagcaacatctatatgatggtctactataaaatcacatacaatttggccttttatagtttttaatggttcataagccaaattatattctatcaaagcatatgcccacttgccaattctcccacttagaattggcctttgcaacatgtgtttaataacatcggcttgacaagtaactatgcatgtactagataacaaataatgcctcaatttggtataagcatagtataagcataaacaaagcctttctataaagacatacctcgtttcggcatctaaaagatggcggctcaaatatgtaatgatatattctttgccatcttcctcttgcgtcaaaacggtaccaatgactttgtcttcggaggcaatatataaccgaaaaggctttccggctttaggcgctctcacaacgggtggagtggacaaatacctcttcaactcttcaaacgcctcttgttgttttgccccccaagtaaaatcggcttcttttttcaagcgaagtataggaacaaaagcatcgattttacccgctaggttagaaataaacctcctcaaataattcaccttacctagcaacttttgaacctccgttttgcatgtcggcgctttgaaatcacgaatcttttctatcttcttaggatcaatctcaactcctctctcatgcaccatgaatcctaagaacttccccgccgacacaccaaaagcacatttaagtgggttcatctttaaaccataccggcgcatcctctcaaaagctaatctcaaatcggctgtatgtccttccataccatccgatttgacaacaatatcatcaatatagatctctaagataatacctagcaaatcatgaaagattaaattcattgccctttgatacgttgcaccggcattcttcaacccaaaggtcatgacaacccactcaaataaaccaacaaaacccaggcacctaaaagccgtcttgtacatatcctcttccgccataaagatttgattgtagccggcattaccatctaaaaagctaatcaccttatgacccgaggcatcattaatcatcatatcggctataggcataggatattcatctttgggagtggctttatttaaatctctaaaatctatgcaaactctaatcttaccactccctttcttctccaccgggactatgctagaaacccactccgcataacgacatggcctaataaaccccgccttcaacaaccgatcaatctcttctttgactcggtcatatagtaaaggattaaaacgacaaggtggctgtttataaggcctaaaacccggtttaattggaagccgatgctcaacaagctcacggctaagaccaggcatctcatggtactcccatgcaaagcaatcaacatactctttaagtagctcgattatcctaaccttataatcggctctcatgtttttgtttacaaaactcggccttggtttagttccatcacctatgtctacttcctccaatggataggccgatgtaaacccttgtccaagcttctccacttcatcaaaatcctcaacggtttctccaatatcgacctttgtagaccgatattcttgcaccctcttttgtaaccactctaaactagcctctttactcattatacaaatttatatggcttagccgtgctacactagccggctttacagagataggtacaaatttgccatcggagatactaataaaatcatagctagaaaaatccctccccggtaagcattggatattcccatgacgccactcaaaaatagcatcggccattgcaacctcggccgatgtatccgcttgaacaatttcaacatcatcgccgtcccattgtattaaacattgatgcaaggaagaagccacacaacaattggcataaatccaacaacgacccaaaataacattgtagttaccttgcacatcgacgatgaagaaagcggttggtaacgtcttgtttcccacggtgagctccgccgaaaagatacccctcgcctccgttggttcaccgttgaagccattgagaatcacgttagtcttcttcaactcatcatcctcgcgccccaacttcttgaacaacgagtatgacatcaagttcacagcggcacctccatccactagcatcctagagaccggttttccatcaacatggcctttgaggtagagaggcttcatgtgacggtttgattcatcgggcttctcaaaaaccgcgtctttaggacctaatgagagttgggcaacctcggcttcatccatagcacaaaactccataggcaacatacataccatgttgatatccatgtcttcttttggagacgattcactttcatcaaccgattgttcttccttcttctctacatcaatcggttttgccttctctatggacttaggcctccataccggtggtggtcgcaactcattgaaccttttatctctttgctcttcggcctttttctcccttaattcatgggcccgaagacgttgcaaccttctcttttgcgtagccgtcaaatccttaggcatccacataggattcggctctgttccagaaggtaaataatatcctctattaaccttgcttgaagacgatgaagccctcacatcgccctttgcagccctcccatcaaaccggcgctggagcccggtcagaccggtcgcagaccaccggtcagaccggccaaatgtgccggtcagaccaacacttggcgcacggtcagaccggcctgaggcgtcggtcggaccgctatcaagtcggcggtcagactggcctgatatcccggtcagaccggctacatggccgcggtcagaccggccagagggcctggtcagaccggtcgactgcgaggagctggtaccggcttcggattttttgcttggggactttccaactccatctccagaaggtataagcacatcatgggaccctactttgatagtaatcacctccgaagtcctttcttccaccatggtgcgctttccttctctcttctcttcattaacacgatttttaccataaaatcggcttttgtttggtgaagacaaacgctcatgaattggcatccgtggtccttcccacattggaggtatatgattgtacattggcggcattgccccccatggtatgaagtaaggataaggataacccggcggcggcattggataggaaccccatgacatattttgtggatgaaaatatggaagtgaacgcgatcgtcttggtgaatgaccaaatcgctccctaggaggtgatcttggtcttttccctttgttgtggaccctcccaccaccttgcctctcatacttctccaaaagcatatggaaggttactttggtcttcctaggagccttagaagttgaagccccacccttattctccttctaaacgccaacctccggtttctttagcaccatcatcttaggtcttggctcaccaatgaccacttcctttcccttagtagattcggcttgctccggccgaatcaacaccttcttagcattaaaattaattgtattcaccggaaaatgatcatgatcaagcttcatcttggagccatcggtgaatttcaatcgtcctttatctatggccgattgaacctgtcgtcgaaacacattgcaatcattagtagagtgagaatgagaatcatgccacttacaatatgctcgacgtttcaactcttcttgtgatggtatgacatggcctttaggtaatctaatttgtttctcttgcaaaagataatcaaaaatcttatcacacttggccacgtcaaaactatatttaacctcactttgccgatctttgcgaggagtcggcattaggttagaacaaacaaaaggtttatttttgttagtccatgaccactaggcaacataaatatcatgataaccctcttcttcactatcactagcatcagagtaatcaactacattaacattaggctttttgtcgaatggtctagcaaattttttattatccttaacccggctttcttgagccagaaccctttgcatgagttgactaacatcaagaaattgttggccatctagtttttctctaagaggaagtccggccaaatctctatcagttatattcaaagtataacatccgtttctaacatctctaaatctcttaatataatcaacaacatattcattatacttttgcttaaccgatgttaaatcacataacctaagctcagtttctctagtatagaaataatcatgaaattgttcttctaattgagcccaagtatgaatagaatttgccggtaaagaagtaaaccatgtaaaagcattaccggataaagataaagaaaacaagtgcaatttaaaagtatcactattagcctcaccacattgcgctaaaaattgacctacatgctcccatgtggtcttaccatcctcaccactaaacttgccaaattcgggaactctataatttctaggaaacggcacattatcataataatcaggatatggctttttgtaggctctatcacgattcctagtttcgatcccaaatctatttctcataatatcgctaatcacatcctccatgttattaggcccttgtggatttggtggtggatttggtggcctaataggttgggtttgtggcgcaatatgattatattggccttgcctagtatcaggaggatatcccctagaaacatcattataaacattaggaatatatgggggaatttgaggattagtggtggcaatagatacaggaggatcaaatgttctaaagtagtacaaataactagcattagtcattggatctattccctgtatcgggacaattgcgccggtctgaccggcccagggcccggtctgactggcgtcatattgcgcggtcggacctgcctgagagccggtctgaccagtgggataatacccggtctgaccggccatctggccggtcggaccgacgggataatacccggtccgaccggccatctggccggtcggaccgacggctgtgtcgcggtcagaccggccgtcaggcccggtcggaccggccgtgagcgccgccctgtcggttttaaaccctattggatctataggagattgatcaacagtggtataggctttatcttttaatgtataatcatccataaaagcacctagcctactccttaaaaacccatcaaccttttccttaaacattacatctaatctttctttaaaattagccatagatgaatctattatagatgcaatttgtttgttgatagattgcgatacctcgtcattacttaccacgtcgggagcgagcttgggacgtggcccgggcttgatgatcacgccttgacgagtcctagtagtcaatctcatcaacgcctcccgtgtgagctcgttgatgtactcctcaacagttttacgatcctctccttcaaagtcatccaatgtgaccggtatcacatgagatggctacacctccgtcttggatgatggcttcgtcatggcgaagtcgaagtcgagttgacgatgaacggatctcttccccagcggagtcgccaaaaatcatgttggcaactttcttgacaagttaacaagcacgatcgtagcaccttaagccttgcggtgatcctagagtcgccaaccacctcgatctagcaaagagctaaatctagatgggttttgataaataaaccggctagcggagccgatttctagataactacccgtctcgtgggcaaacggaaggttttcaggacaaacctacaaagagatgtcgcactctcgcagcggcggcggacggtttacggcgcaaaccgacaaagatggacaaactaagaggaaactaaaagcaatatgaaaagaacgattcgattgattgattgtagattgatttttacaatgaaccggccttgtcccttatataggggttggtcttgccctctacaggccctcctccacatccaactcggggtaaaaaccaaaggaaacccgaaacatgccttcccgagcaaggaaacctcgaaacctgacgaaacagggtcgaactcggacctgccggtcagaccgttcacacaccgccggtctgaccggccctcaaccggcggtctgaccgcccaacacatggcggtcagaccggcacactcggaggaaaccggtagatttctaaattttggcaatctttcctattttaatcctaggtgccaaatttaggtgtaaacacaatgtggattagaaaaaattaaattgatagttagttcttaaagtacggtcagatttgcaattgctcctattttaatctcataaacgaattaacgcaaaaaaatattggattgaattcgatcggactgcgcatgaccgcatcggagtaataatttcttcacgcaataaaaacagaccacctcgccctgatccaagcacgaaacgcgaaagatcccagaaacccagttagactcggatttacttcaacagattaaaacagactccgtctcggagtttgtcaatctctggcttcatccatatatacagaccgccaaaactaacaatttccaaaccatccagttgccgagaaacgcaaacaggtttttgatcaacaagctagggcgcactcatctgatcgatcagaagttcacgcctttgttcaacaagcgcgccaccgagatggcatcggcagcagtagcagcagacggcgccgccgacggcaagaagatgatcctgctcgtcagctcggacggcgtgaaattcgagctgtcggaggcggcggcgagcttgtccaagacgctgggtaacatgatcgaggatgactgcgccaccaacggcgccatccctctcgccaacgtcgccgccgacatcctcgccatggtggtcgagtactgcaacaggcacgccgccgccgccgcgaatgctagcgggcaggaggagctcatcaggaagttcgacgccgagttcgtcaacatcgacaggaagaagttgttcggcctgatcaatgctgccaacttcctgaacatgccgtgcctgttggagctgacatgccagcgcacggcggacttgatcaaagacatgatgccggagcaggtcagggaggtatttgggatcgagaacgacttcacgccggaggaggaggccgaggtccgtaacgagaacgcctgggcctatgagatgtaggttgccaaattaggcattttgtgcattagtaggtttattcatggtttaggtgattactgctggagctggatacgctcgtgtgcgatgcttaccttgtaacagtttgagctctgtttttattaatttgcttaattatgaagaatcgtttttaagtctgatgaactgcaaacttgcgtactcctccaagagttcaaaatatatcgctccacaaactttgcaacctctcattcgatagtgtccagtgtccaccaccggcataaagctcctggatccatgacgatagtggaatgtgttgcttctacgttgaccattgctgtcggagttacatgtcacaccctgaaaatttaaaattatataaattgttgtttaattggaatttctagaatttattttaaaagtcttgaaaagaagatctaagtttaattaataaattccaacataaaattgggccagataaaatttcattaaatactttgcttaattctataattcctagatttttctgggatttatttgagctaagaaagtatttttaataaatggaattgcatttaagaaataatttaaattgaaaaagttttaaaaagtcttcttttggctttgggccgaaagtcggcccaaaacctctcttttctctcctcggcccagtccggcccagtcagccgccgcgcgcgcgcgcccgctgccgctgacaggtggggcccgtcgtcttcctcgggccgaaaccctagcgcgccgccgccgagccgccgccgctgtttccttccaattcggccgcccctttccttctccggctgaattgttagaggggaaatgatctccgggatctcctctaccctttctcctttggaatctttggctaaatcgttttggaaagcgttggattcgagttcgtctcggattcgttcttcccgatctttccttcctcgtcgccggtcgccgtgggcctccgccgtcgcctccgagcccctttaaaagcctccccggtgtctcctctacccgtcgccgccttcgccttcgcctctcgtcgtcgggaaagccctagcgccgtgtgccctagctttgccgtgcgccgccgccgttccagccgtgcgccgccgccgtttcagccgtcgccgtcgctcgggaaggccgccgtcgtgttcgccgtcgcgtcgccgtcctcgtccgccccttcgttgccgccgaagaccgccggagcgtcatcgccgccgtcgacccgaaggttcccgccgcttcctccttgtcgccgtcgccgtccgttggtcttccgccgccgttttggtcgccggtgagttcgccgtgccgcccgcttcgtcttggtgccctccgtttgcgtcctagcgccgccgttcgccggcgagcgtgcgccgcccgggccgttcaagccgccgagccgccgccgccgtcggtgacgtcattgccgacgtcatcgggaccgttcgtcgtgagccgccgtggacccgatcgatctcggccgtccatcttggattggtttgatctcggccgtccgttcgcgtgaaccgccgcccgtgcgcccggtccaccaaaccctagcccgctgacgcaataaatccccttttccttttcaaaaataattcattattgcgtcataattcaattttaaccgatttaagtgttttaatccgatttaatctttaaaaattcataactaattcatcttagctccgatttatttggttcaagtctctaaatttttctaaaattgagatctacacattaaaaatatccatatgtactgttcatgcttgtttatgtgctgttttggtgattttgctcttttctgcttagattccgtcgtttccggagagtccgttttcgccggagaagagtttgaagaattccaaggccagcaaggcaagtcacacagatcccaaacaaccctttgagcatgttgaacccgtttaaagctattgttttgttttcaacttatgcattgttttcgaatgtcattgggtggtgaacctttcccatttaattatggccgaagatgactttattttcctatgggttataatttgactagcatggaccttatatattggattggttcagctagatgttgtttatagttgcttagccatgcttagaaacattagcacacattcgggataactaatgactcactaatatttcatgatggtttcatgatagttcacgatggtcaatcgtgattagttaattaattaatgtgccaactaaaacctggtaatggtgggttgtgagcacatggttttgatggtcgtgctcatgacaattaaggaccggttcacgagtttcggttgtgaaacattaaccgtgccaatcacaagccagcatgggcaacggctttatcttttgtatagcatagttcattgcggagcaccagactgagaagtggcggagataagcccacgggggtcgctggggagtccatgccttgtttataagggggtgattatgatccaggaaggtgcgctgcagtggattgtgttatgcaaggggtattgtcacaactcctttccgaggtaccgtggtggtattgaggcacatggtgacatgatgtggggttgtgtcttgtgggtacagtggtacacctctgatcagagtaaaactattcgaatagccgtgcccgcggttatgggcgggtcgaacaatgtctttcgtgattagtctcacccttctcaccatagtaaatgatgctataattggtaataatttgattagctcctggtttggaatggtatattcctggtttggagatagaactgtacagccggtatggttgttcagaatggttgggcctatacaacagggtatgttgtatagtgttggattaatattgcttaattacctaactgttttattaaattctcaaatgtttgctaaatgctgcttttgcaaatgaaaccctattatgccatcctttgttatcctgtgcacttgcatatttgctgcgtggcttgctgagtatgtcatatactcaccttgcaatcattcatcagaggaagagttcttcaatgaggctgatggtgtggaggattaggtgtagccttggtcaagctgcctgtggagtggagccgtttgcgccgtttatttattttccgctgcttagatctttattgattgagaggaactatcttcctctgtaatgacattttattcgcttattaattagagtaatagttgtactctattatcaatttgttattgtgtgcctcggctgattcctggacgagggttcacacacatgtaagcgtttggaattttggatagaaattccgggcgtgacattacactggtggagaaaccatctttcatcggtcgggctaatttcacaatagtcctggttgcaacaaaaaccgggaccaaagatgatcttttgtcccggttaaaaagggtaacgggtatatttgatctttagtcccggttcaaatgctgtcagggcctgtcaggccccccccccccccgggatcttcagtcccggttaataacaccaaccgggactaaagatcgtaactttagtcccggttggtgttaccaaccgggaataaagaccccggcgatctttagcccggttcataacaccaacttggactaaagtcccacccctatatatatgtcttcttcctcctccagcccgagcaagcttcaaattttcttaaaaaagaggggaggtcatgccaaaatttctagtgaatttattgtgttgattatatacaaatcggaggtgcctaaaaggttagcaacttcatcctccaatgtttttttttcatattacatttggagctaagttttgcacacttttttgtctccaaaattttgttgttagttgatgagagagaaaatttgtgtggagaagaaagaatatatagaaatttagtttatttggtaaagagggctgcaggaat

SEQ ID NO: 15443 - DNA, 838 bp, Oryza sativa
taaagatcttaaagtagtgtttggaaagaggcctggcagccagcctatagagagcgaagatggtcacgcggcgatgtagaaaaagaactctatattttgggagttaccctattgggaattcttgtatgtccgccacgcaatcgacgtgatgcacctcactaagaatctttgcataaaccttcttggcttcctaggtgtatatggaaagtcgaaagatacactagaagcatgtaatgatctgaagcatatggaacaacgcggtgaccttcacccggaacctaaggagaaaggaagccattacttgagtccagccagctacactcttagcaaggcagagaaggaaagtatgtttgaatgcttggagagcatcaaggtaccgtctggatgctccacgaatataaagcgaataaccggaatgctccacgagtaaagagatatctttactcccggttgttctcaccaaccgggactaaaaatccgggggtatgtatattccggttgcgccctcgtcttctccaccaacacttagccgtttttcgatctcggcttctccttcgccgccaccgtgcctagggcaatctcgcgctgacaccgccgtcgtctctcgccgtcgatcggtggtcctcgtcgcctccgctgcagacgccgccgccgcacttcttggtgagagccgccgcagcctctctctctctctcgatctctgatctcgatctcgatctctctctctccacggccgacgatcgacgcggccgccgccgccgccgacgacgtcgccactaccacgaacgccgccccccctcgagctcgccacgccgccgcgccactgcgccactccgat

SEQ ID NO: 15444 - DNA, 14764 bp, Oryza sativa
ccgggccggcccacggcgccccgacgctgccgccactgcacgccactgtcgcgcgcgcccgatacgtggacgacctttgaacgaacgcgaacgaacatgcacgaaacgcgaacgaacatgcacgaaatgcaaacgagcatgaatgatatgattacgaaacattaacaaacgcggacgaacgtaatgaaacgttaacgaacgcgaacgaacgtgaacgatacgatcacgaaacgcgaacgaatgtgcacgaaacgcttacaaacgtgaatgcacttgtactaaaagtgttagaacgaacgtgtttctacttatacgatttactggtaatacatatatgattatatatgtaacttggcccgtttagactaatacatttcctggtaatgttgcagagaagacgtcggcgtcgtccctcaagccgaagtggtagctagccatcgaaggaatttgcgcaggcaagtgatgtaattaaataagtgattgttagagatttaatataagattgttagacttagcatatataaatgattattacaattttaatatgagattagtagccatttaatataagattattagacttagcatatatatatatatatatatatatatatatatatatatatatatatatgactattacaattctaatataagattattagacttagcatatatatatatatgactattacaattgtaatataagattattagagattaaatataagattgttggagatttaatatacgattgttagacttagcatatataaatgattattacaattttaatatgagattagtagccatttaatataagattataagagatttaatataagattagcagagtttcaatattacggttagcaaatacatcctatatacctaacaaatattttttgtatgcatagatggctgatcgcgatgaggaacagatactatacgatacaatcgcaaagggaagcagccagtagtggaacgaagaagaggggaacgaggatccaaaccagtacttgaacgaggaggggaacgtggagagggatgcggaggggaacgaggaggggaacgatgcggaggaggctagtggaagtcagccctctgctggacagaagagggcacgcggacaacgaggtgccgcgaagaagatagagggtcggcacatcataaccgaggtggacgaagacggccgacctagtgcaccggcagaagcagccaagaattttgtacgccacagcggttggcttgtaagggacaacgtacctgtcagcacggtatactggcgcagaacaagggcacgcggggatgatgacagctttgtcccggactcagagaaagagatgttgtggaccacaatgcttgagacattcacgctacccgtgggtacagaaaacttagtgaaacagtggactctgaagaaaatggcagaacagttccagagcttcaagggagatctctacaagaaatacatcctgaagggactaacaccgaacttcgacgtattcccaaagctaagggatcattgggacgagttcgttgcttacaagacagggcaacaagggcaagcaatgatggccagaaacaaagaaaatgccgccaagaagaagtgctatcaccacttggggtcaggcggatatagcgtcgcgaagccgaagtgggaggagatggaggctagcttgcttgagaggggtatcgaaccggccaccgctaattggccggatcgatcgaagttctggtacaatgctcacagtggaacgcttaacccagttgatggctcccttgtcttcagcgattagatacgcgaggctgccagtcgactatcggacgcagtggtagcctcttctcagggcacattatgacccgacagagagaaggatgagctgtcactcgccctacagactcccgagcatccaggacgaacacgagggaaaggcgtgattccctggaagattggatttaaggaggacatccacacgtacaggagtcagatgaggagcaagagagataccgaggcgaagattgcaaatcttgagtacagggtatcgagctacgagctcagcatgcaagaggaggtgacaagcaaggtggatgaacgtatggccgcacatcggtcccaggatccccagccgtacattcatcctgcaatggtcagcccatcaggcaatcgtagcagctgcgcctcaacggggcaggtcggatcacagagcatggacgccatgcaaacccaggacgaaacctcctgccccgttgatgagatcacgcagcggacaccatgtgagctgcatattcccttcaagaacttatcaatcaaggtatgctcgtagtttgatgatttttgacttgtacattccgcaagttgctgcttaggttgattactaatagataacctctcatcacatgaaggtggggtcaggaatggccatcccaacggacccttccgggacttaccactgcaggccgattccagtaggatactcgagggtcgaagttgagctggtggaagccgcgtacgaggacctcgagttggactacccaggaggggacggtgagacgcatctacgagacacaagccacgccatcatactatggcgcaagtggtacatcattcttcctgggcgacaagcggcatttcgtgcaccatctcctccggctccgccatctcctcctgcaccatctcctccggctcctccgccacctcctgctgcaccatctccttcggctcctccgccacctcctgctgcaccatctcctccggctcctccgcctcctccgcctccaccgtgtctgcctacacctcccaagacaaggtctcgccaagctccaccgcctgcccgcacaagggcaacgaagaaggcgaaagttgacgccaccaaaaacaaggagccaccatacgattgcagtcaagaagagctcgatgcttatgtggcaggagaggtgaagaggcaactcaagcctcggagtcctgaaaagaagatgcctattgacccgagcgtgaagaacttcttcaagggaatgtccaaaacaaacaaggaggcattacagatatcggactatgaccgaacacttcagagagcctatcacaataagtccaaaccagtccctcagcttggagaacaaccaaaccaagaggtcgagccgttggtgaccggcgaagattttggcataacggatttcattgcagacaccggtctatctgtggatcagttggttggagccgcaccaatcccgaaggcggaagtggcatacaagtttgaactcggtaaaccgcttgtcaaacctgaacaactggagtccctaccgatacagatgtacaaattccatgaacggtacatggaaatgagcgccaacggtagagagatgttcggggcgaggatcagaaaccccgacttcttgcaaggagacgatgttctctggatccatttcaaggatctcttcgatctgtaccagttggacgccctcaacgtctctctcctgagcgcatggattttgtgagtatctttgagttcgatttgtttcgttcaataattagctcctggcatatatgtaagcaataatactttcctttcatcgttgcagaatggagattcaaagggcccgacggcggagggtctacgatactgggttcatcgaccctcagaaaatcaactccgaaatgatcgacaagtacgagaaagacacagaggacaatctcgtccatctcctaacgcagcagcatttcaagacgtacatactactgccgtacaacacagagtgagtttttattgtcattgtcaaaaatttcattcccatacatatagcatgtacattttcgattatatatatctcatctcacgcatattccagattccactgggtcctgttattcttcgacttggatgcatgcagagtcactgtgtatgactcaatgaataaagaggagaagatttttgacaaggtcttcaaaccgatagacaggtaatataatgccatctattccaaagtcgcggggaatctattgctattatgttgatctcaggtaataattaattaatcattgcttgcaactgcatatgtagggcttgtgatcggttccgtcaattggtccgcggaacttggaaagaaaaacttggacggaggtttcattttccagtgagtacatgcatgatccaaaattatattgaattgaatctctaattacagttaatataaagagtatattaaatctctcttcgtttctcgtgtagtgtgcaaagcaggaacagggaactaacttatgcggctactacgtatgcgagtatgcccactgcctatcaaaccaaatatgcacaacacgagagctcgatgtacgtatacataaaccattcaaaagttcattgcgtatcgatttgttaagttgtttattaatttcatatattgatacgtcattatttttggaatgatagcgtattcacatgagggataatctcccacacaaggattttatcacggctgttcaagaacaactgatgagattcatcaacgaagaagtccttaatcccgacaatgaattctactacgacggatcaacaattcataacgtcggtccttcctcttctgacataacgccggcgtcgaagtcgaagtcgtagctatagctaccgagcaaatgaattgtactatatatgcatgtatatatatatttatatatgtacacatttgcttttgtgttaatatatattttggtaacatatatatatatagcacataaaatgttaagtagctttaattaaacatatgtgtgtgtatatataatatatgtatgtatatatgtattgtaacatatgtatgtatgtatgtatgtatgtatatatatatatatatatatatatatatatatatatatatatatatatatatatatatatatatatataatcaaccatgcagcaaacagggccatgcaaaaaaaaaggtcagctcgatctttagtcccggttggcgttaccaaccaaaactaaagatcgatctttagtcctggttatttcacccgggactaaagatagctatctttagtcccggattcgtagtcccagttggacaactgggactaaatggggcttaccaaccgggactacaaacggtttctccatcagtgttacctagcagaattcctaattcgcgcatgcgtgccgtgggcgcgcacttccgacccacacggcccatgtgtacgctcggcaccgcagacgctgcgctagtttctttcttttttttctcctttttttggggaactcgggtgctagttttcgttttttttttcagaaatcgccccctttttctctccacacacacgcgtgattttttttttgtgatattttataaattgaatctttcaccttcaatattagttgagagttttgaatttaaattgaaagtttcgtaaattaaaattgaatgttttgaattttgagatgaaagttttcaaatttgaatcgaatattttgaatttcgaggtgagagtttttaaatttgagttaaaagttttcaaacgtaagataagttttaatatcttgacttgaatttttttaattttgggttgaaagttttcgaatccaagttaaaagttttcaggtctgaattgaaagttttcaaatccaaattgaatgtttgtaaatatgaattgaaagttttcaaatcctagttgaaagttttcgtgtttgatatgaatgtttttaaatctgagttgaaagtaccgagttgaatgttttcaaatctaagttaaaaatttcaaaaaatctttatttgaatgatccaaatcttgacttaaatgttttcaaaccttcgttgaaagtttgttgtagttaattctccatacttatcccaattttctgcgtactaaaaaatacaaataaaggtaattaacgttaatatgggtaattagcgtgatccgatccgctaatcacgcgggggcgtgggggtgggggtgggggcgtgtgcggctgcgcgagttaagcagccgccacgcacacggccattaggaacccccgttacctagtgatatataggggttacaagaaccagatcgatcgatgcacatttccggtattttactacccccaccattttattttataaaaacgttttggactctctttctctcgtctagattcactaacatctatataaacttggccacatatatgaaacatatgcatcaactaatgtatgaatatattcaaaatcaaaacccaaaatgtcttataatgtaaaagccaaagaaaaatcatcttaacatatttttctggaaaaataatctgttaatatacaactatctttctagttaacaccactgcatagatcaattaactatatgtggtggcctggcattaactttcttatttaaggtacaaattaatgaacgtgctggaaatttgtgtcacttttgctcatgttacagcatattatatagtcaattgaacagcgatacctgagaatttattttgtatcttccaattcgctatcttacatgaagtggtgatcaatggagtaaagttaattttcagtagtcatggttagttgaaggttgggtcagtaacaatattgtctgaaatagcgttttttagcattgtgttgccgctcacgtcatccgtttctggaatctgaaatctttacttgattaatggtttttcatcacaaatccatgaaagttgtaatctgaagtcttgaggcagaaaggtagagctttgtattgttctattctcgaacaccgctagtttgctttactaccgacaactacatagagttaatacatttatgtagttgtgttaactaaatgagtatatgttttcgttgatctcggctaaaagaatcacatagcttaattaactggttagattattgaaacctgctcacccatgtttacgactaagtactattttttcaatggtaggtgatgtacccgtcgattgcgaagcgtccgtactgatttcatatataagaagggaaggggcaccatgcaagaatgacgagctctcttgcacggtaagccaccttccatgtttatcatcaggacccattcatgatcaaccatgtgatttcataaggttgtgtgttaccgctacatcaacctatggatcgatcaccggcgacgctttagacatcaaacctagtgatgaccagtccacaactacaccgacaactctaccctacggggaggattcatctactacagggctattggcttcacaaaattagatgatcatgcgtgtttaggctaacatttcagattataagttttgaaacatacactatgtacataaatataaagttacatcgtaagtttgtaactatctagttgcagtttaagtatgatatatttacatttcaatgttttttacctcaaagaatttgtaacaattttttagttactcccatctgttttggttgatgaggtcttagaaatttttggtgatctctaatcttgttgtagctctcgtgatctagtaggagacacatgcacctactcggagtcttgattaatcttcatattaggtatatgtagggtaactagcaaaatgcctgtgcgttgcaccgtgtaatggtgggtgactgaagtttgatttcaattatttattgaagcaccccaagcatgatcataagcatcgatgatgtgtataatgaccaaaaagtcaagtttgttctcgaacaattaatttgctttacattttacaggatatggatgatgctcatgacacgaggtcgatggttgtagcatatggaggaacaaatgggtgcacaatgcaattgcttttgtactggagacgattgatggaaatctgtgtgatgaacgaaaaaatcgatattttcttaaagtaggtaagtgtaaaaaaaataagaggaattgagcggacgacacatccgaatcgcagcatataaaaattgtattttctatactcatgcattgctacatgatgaaagtgcctgagattgaactgatcgacacatctaaatcgtggcacatcgaaattatattttcttatattctatgcatggtggtcgtcattgattggtcaaatctaattataagccatgacgactcattagcaaccaaaatatatttcacggataaaacttttatatacatgtaaaagccaatgctgaacaacaaactacattaagaaaacttcaaaattatgttttagaaataaattaaaattcaaaattataaacgggcaaatacgattttttttcatttatattcctagcaatatatatgtgtagtagctagcttcattaattcaatattattttattttgatggtgccaaggcatgataaaacaatagcaattctggtaaaagagattgaacagtaaaaaatattctattatgtagctttcaagatttccatgcatccagccatccagtaacactaatatctatttagtcatagcaccatatgtcacagacggacatatccaactttatctctttctcttctcccttatctattcttcgctctcctagagccatgcaacacttctcccctcatctctttctcctctctcccacagcctctctctcctacatccacacacgagcagcacagtgtgagcaacagcaatggcgctggtggccccgactagcgagcagagacatcggcctcgtcgagcagcgggagaagcgacagcctccgcaccggcgacaagcagtggcctctgcctcgtcaagcggcgggagaggcaacggcgtcggcataggtggcgacgatcccgctgtgcagctgccttggcctcgggcaagcaacggcggcatgtcttcaacatgccgtggattttgttgacttaggcatcaatctggcatgttctgggtattgatttagacatcaatatatgatttggacagagtatgctcgaattgagcttcttccgattttgtgaaacagatcgaggcataggagaagttggcggtgcagttatgtcgacgtttggctgggttttggatgtgagtcatttttttttcactcaaacgccccgtggctgaaaaaaccggcacctatagcagtatataagtgccggtttataaaaaaaggcttatattatataatagatgatgtcggcgaatgatcaatcgtgtgcccagtggttaatgatgtgatctaacagatgtagcatgtgccggttttgttaataagaaaaggtgataaagtgttgaaaaaaatacagcaggaaatttttcacaaaaaaaaggttaggaaagggaagggaaaagaacagtctctaaccatagagattgtgggaaacgaaccaacgacctatcggtcaaatgtttcataggctaaccaattgagaatcatgaacattgtgctatgcggtgtagctacattttaaaaatatgaatattcagctgagcgttgctatgtccacccctgtatccgatgcatgttggagtgcacggcaaagaaaaatatcagtgtggacccggactcagtccccgtgtgcgggcggccgcctcctgctgcgcgccgcccgccgcagtccgcccgccggccgcgcgccactcgcgccgtccccgatgtcgcccgccgcctgccgccgtccgtccgccaaccgcgcgccgtccccgatgccgcccgccgtcaacctcgccgccaaccgcgcgccgaccgcgcaccaacccgccgcacgccgcccaccacgtgctgctcgccgtgcgccggccgccgtcgaccccaccgcccgacgtgcgccggccgccgtcgacctcgccaccaaccgcgcgccggccgccgtcgagctcgtcggagtggagagtgagggtgacggcctgatgggagggagagaggggtgagagatgagttaggggtagttgagtggcatttttgtgtaaatatgtaaaaaatttaaagggtagtgggtcttttggtttggagtggagttgtggagcagcaaaaacccagctccacccccgtagtacaaatttgtggagtagctctgccaactccgctcccaaaaatagaggatctggactgtttgacatagctcctgctccaggtaagttggagttaggagctggagctgtgccaaacggggccttagtataggcaagtcacaacgtgacataccatgcatcaaagccgtccaaaatggatcgaacgggagatggcgtttgggcccgcctgcaggtcgaaatatcgccgctcgccacccatccagccgtcccgcgtctggccgtcgccgggagcgcgagccaactgagaggctcgccgccgccgcgcctgcgccaggccgctgtggtcgccgcgagtgaggaggggaccggctgccgccgcgcgaggccaactccctgccctgccctgccgtgacctgtggagaggcgccaggccaggccggcgcgaccggggacacgtggaggcggccggccgccgggcctcacggcgcggtggtgcaggcggacggtcgcccaacccgagcccgtcgcgtggaggagaggacgtcatggaggaggccgtgctgctccatgcttgctgctccatccatgctgctccatctagctatattgttccacgcttgctgatgctagatgagcaattgtttttagttatgttttcaacttgtcccaattgtttctgaaaagcattgttcagattcagcatgttaccaagttttcctgtagttctacatttccattgttctacactaatctccagacattgctctgcttacagtatctgtttgttctgcatgtcagttttttagaagattatctttatttggtcagatatgtagccggagtgcccaatgttatgatatcatcaataaacacctgttttgtgcagtcataaaaaacatcataaatctctgttcagcatatcagaactgctgaatcatgtttcaccattttttttatgacaaaaatcaagattacataatcaatttgcccaaactcacaatgccaaacaataacaattcacttccaattaggagtctgcatcatcccaggcagcagggcaggactagggcattttccacaatacagaaccacagagcaggggcagggcatttcacaatacagaaccacacaacctcgggggcatttccacaaacacctcgcgggcacaggaaacagtgcagcgttctccattgtacgaagccatgcggcggtgtcccccctcgctggcgacgaagtgggcggccaaccggtgcgggctctgacgctgaactccatcaacgagtcgaggccaccgaaattggaggtgcggcgtgggcggagtgtattcccgacggccggcaagagcaccgcggcctcctccacgcgccgggtgcctccccactcgcggtggcgcgcctcccagccggacgaggccgaccggcgaggcgaagcgcggctgcgcgggcgggtcgcggcggcaacgctggttcctccccattcgcggcggcgcgcctcccagccggacgagggcgaccggcgaggcgaagcgcagctgcgcgggcggacgcggttctggagcgaggccgtctcaggctgcggggcctcctattaaatggcaattgttttgcctgcgtgcgggcccaactagagcagccgttcgattcgttttggacggctttgatgcatggtatgtcacgttgtgacttgcctacactaaagctgagtccgtgtggaccccacctcctctcgaactttatctccttctgtagaatcctccgcctccgcttctctctctcgtcgctctctccgtctttaccgtctctccttcgccactccccagcggcggcgcgccttctccctctcccagcgacggcagcgcgccatccactcccttcctcccagatccgactggatgaggggagggcagcggcgtggaggcggcgctcccctccccttactttctccccgctcctggatcaggctgtaggaggggagcgatggtgggggcagccaccgcatgcgacggaggtggcgctcctccctccctagctcccagatccggctggaggagggagcgatagtggcaaaggcggcgctccctcccctccctcccagatctggccgaagggggagggcagcatcggctctagcgacggtggcgcgccttctccactctccgactcctcggcgagcagcaggtgcgacgatcttaccatggatgagcagcgggagcggcggtggcctcggcctcaactagcaacaggagtgacaccgtccagtggcattggggcagcgggagcgacgtcctctaccttgacaagcagcgggagcggcagcatccacgtccttagctagcaacaggagtgacgctgtccagtggcgtcggagcagcgggaacagtatcgtcttcgtcctcgacgagcaaggaggagcgggagcggcgatagactcggcctcaggcccagcggcagtggcggtgtccccgacgagcagtggcctcgacatctggcgagctcagcattctgttagtatttaatttgttgtgatttcattgatgtagacattgttctttgattagtcttttttgctcgtcaacttttttttctggaaccgagttggacccaatgaactatatggactaacaaaaatttgtttggaagcatacctagggcgatttttgatttttgatttttggatttgtttttgtctgttctttttctgatattttctgatctgattgtcatggagacggataacgcgtacgcgggctcacatattacggacgaaaatcgtgtgtgaatgatgtgacgaaaggaaaaatacgaatagttatataagattaaaataagataagatataccgaaagaaaacaaactaattaattaatctctccaaaaataactcctacaggggtacgattaaactgagtaggagtagctaattaagctgtgttggcgttatggcaaagtaacgcagaagcaatcgaaaactaattagaatcagattggatttggagtacgaatcggagttgctcggcctggttctcgcaataaatacaaagagcaccaaacagctcgccaagcaccaataaacgtcgtttcaacagttgagctcaccgcgcaactagcgagcgagttcgtcccgtccgtccgtgttcaagctcaacagcaatcccccggccccgcgtgttcgacgagaaacaaaccaacatcaatggcggcagcaaacgacggagccgacgccggcgacagcaagatccttctgatcagctcggacgggcagcacttccaggtgacggaggcggaggcgagcatgtcgaagctagtgagcaacatgatcgaggacgactgcacggagaacggcgtccctctccccaacgtcgcctccaacgtcctcgccaaggtgctcgactactgcaagaaacacgccgccgccgccgccgccgctgccgaggacgtcgccgtgaaggatcaggagctgaagagcttcgatgccagcttcatcgatgtcgacaacacgatgctgttcggcctgatcttggccgccaactacttgaacgtaccgtctctacttgatcttgcgtgtcaacacacggctgacttgatcaagggcaagacggtacaggagatcagggacacgttcgggatcgtcaacgacttcacaccagaggaggaggaggagatccgcaaggagaacgaatgggccttcgagaactgaaccatttccttttatcttagaagaatttccaggctagtagggaagaagtttgatcggaataaatataaaatctttttcttaatactatttaatgattgacaagatatttagtcatttgttatgtgttgtttactattccctctgttttatattatactatcttcgtttttaaaatacatatcacctctgtcccctaatataacggatattcactattttcttgtaacgtttgaccactcgtcttattcaaaaaatttgtgcaaatataaaaaaagaaaagttatacttaaagtactttggataataaagtaagcgaaaattcttaggatcggtcgaccaggggagggggaaaatcggtcgcttccccttgccccacgcgcgcacccccactaggcccactgtcacatccttattttcgtcttaggatttataaattatttaataaattattattataatttatattaaatgttcattaatttacaagtgaagttaaatgtgggaaataaaatttcctaaatacaaagcatggctggatttaagttttattaaattctccatggttaattatactctctggaattttctcggatttttcggaactcaattcctaattttaataatacaaagaacatttcagtaattaatcacatattaaattaatcattaagtggtcttattatatttttttaaatatttatagtgttaaagtactttcaggatttttcttgaaattattagagcattggaagtatttttaacaattcaaagatcattttagtgattaatttaattggaaaagtaaattaaatccccttttccttttcgggctgaaactggaaaaagtctatctgtcatcctcggcctattcttcctctttgcctgcttcccgtccccaggacctcctctttcgtttccaacccctagctcgatctctgtaacgccccgattttcgttcgggattaaaaatcatttaatgatgcatttcctagaaattgaataaaaagttaagcaatttaatcaagtgaaataataggagaattaaaattttcccttaaaaatcattggccgggaatattttgtaatattctttgtgccctaatgtactctccggaattttccgtgaattttcggagctcgagaaatagttttaaagtcacg

SEQ ID NO: 15445 - DNA, 5926 bp, Oryza sativa
tgtccgtccgatcggctttgggccgatccgggccgtcggatcccgtggaccggcggtggaccgcctcggtggtcccggtccacggtggaccggcgcctttgtgccgctgaccggtggggcccgcttgccggcgccgcccctcccctttgctgacgtcagcgaggaccttttcctttgtaaaaataaatagtaattgcgcaataaatcgagtttaattctagaaattcattcaaatggctcaaaacttctaaaattcatatctaattcattcgaactccgaattgagccattcaacttgcaaaattcatctaaaattgagctctacatgtttgtttactttttatgtactgtttgcttggtctttattagagtttttcctcgttttgcgtgccagcgtgtagtttctgtcgtttcggaagtccacggtcgcgaggaaaagagttcggaagatcaaagtgaagaagcaaggcaagtcacacattccccttgagcatgttgatcccaatttataaatgttttaccgtttacaaataaatatgcatgttttgctaattacatgggatctgggttttacctatctgctcgcttgtgccatgtttacttgatatctgttctttgtcaaccttgggtaatgaatcgactagctcatgttacttatgtgacctagctagaactatatgcttagccatgcttaattaccactagctcagttgatgggataactgcagtattagacctttttagtatcagagtgagctgcgtgctcgagacacctggccatgcttcatggtcgtaattatccaactaaaatgcgactgaatggtgggctgtgggtgcatggttttgctggtcgcacccatggcagttaaggaccggttcgcgggatgccctggaagaacttatcgtacttaccacaagccagcgtgggcaacggctgggcttgtagtgtagcttttctctagccgacgtacccaggcgagggtgggcatgatggagttgggtcggccggggtgtccggttgatcggcttccggattcaccgcggcacgaaaggggggctgcccgttgcctgctggggacgggggcgaaccctaaggtgtggtgcgatcggttagagggggttatgcgaagggtcctgtcacggcctctttctggtatgtcgtggtggcatgtcggcgcacggaaacgtgtcgtggggctgtgtcttgtgggtacagttgtacacctctgatcagagtaaaactattcgaatagccgtgcccgcggttatgggcggtcgaccagattcaccgtgattagtctcacacttaataaatcgacctaatacactgtagtttaggtgggttggttgggcctgttcaacgtggtgtagcgttgatcagtggagatttaatgttactttaattactcaacagttttactgttttgctcaataaaatgttttacaaccgcctttatgcaaatagccacaaaccgtccttgtgttccccttgcacgtctgcatcgttggtgtggcttgctgagtacggtggttgtactcagtcttgctattattcccccttttcagaagtgtagtgcttctgagctgaagacgaagttagaggaccaaggctcagaccccagttgagttttgcctgtggagtggagctgaagccccgctaggatcgcctttttccgctgctgctgttttcgtttcggtgcgaggactaagtgcctcttttgtaagtattttacgctttatttacgtttggaactgtatattacttgtcgttttgtgtaccctggctggtcctggacagggatttaatacacaaaatagtctggaaatttgggctaaatttctgggcgtgacaaagtggtatcagagccaggttgactgtaggttgagccaaatggtcaaaccctaaggacaagttttctgaaaaccctacttgcaaattgtctcctctcgcccttcggcatttctttgtgaaacggtttttcaaaattctcctcccaatctctccaattcttttagttgtcaaacctagaggaccagctgtcagcttcatgtctgttcggaagtcaagtcaattcgagcctcaagcttcgtgcaaggagcgagaagatcagttcagagtcgtcgttctgcgaagatcaagtggagttttctcggagatggcctaaacccaatctttcccagaagagtagttccgttagctttctagatcgtgtgttgtttgcttgtgtgtaggggtatggtttgcatcattggtggggatgcgaccatactaggttgtttgcttaagcaacttgaagaataaaagtctactcacaacatatcagtaggcaagtggtttagtaccttatctttagcaacccctctcttccacctctcttccgtcctggcagcggatggtcagtgtcagagataagatcaattaaagtcaccaatcaatggttcagttgaaagctacaaggtatcccagtgccagaagaaccctgctcgtgatcaacatttggtgtccaagattagatgatggatgtattgatgcgggagatgcaaagctcgatgcaaggtcaagtgtagcggaaagaactccagcagtagtgtgttgcagtcaagagttagtgtgtccatgagctaaatgagagtcacttttatgtggaatttcctatcatcaactaaggcttaagttccaaatcttgtcgggatgaaagtgcatcgccattgcttcaatttgatggaccgatgaagtttcagtcttcaaagtcagggcatctgtaaatccgagaaatgttggtcatttttttcaaggacaacagttcaaaggttctcagtcaggtaaaagtaagactacccactgtaaggggggtaggtctcagagatgagttttggtttacctcgtcggcatttcacttgaatgttcaacccagtgcagcaatttgggtagtaattaaaggagtccgttgcgagccactagcagagtctcccaatctcaagtcaacaggttcaattctaatgtacacccttgaggccaggtcaacagttcagcttagagaagtagcatcgaggatggttgcagttcagacgaaagacaggtcaagcaggttttcctggaattacttgttatttgaattgggaccagtcgaagcggacatagggtaaatgatttataaatgccagattccattttcatcctcttatagccagcgtggtgaattctcaggttaccaaaattgctaacctcaacagttcagtccaaactaagtaagtttcaggagcatccgcagtcctagactgggtcagttcaagcagaaccagtcggtccagttttggcaaagcaaaggaacagaaaggtcgaatccagccagttcaatcgtgcaggtttgatcaaccagtcaatcaatcagttcgaagcagaatgtggcagttcaaggtgtagatcagtcagaccgcccatcagcaccggctttctttctagccatcccagaatctcgggacgagattcctgtaaggggggtagatttgtaacgccccgattttcgttcgggattaaaaatcatttaatgatgcatttcctagaaattgaataaaaagttaagcaatttaatcaagtgaaataatgggagaattaaaattttcccttaaaaatcattggccgggaatattttgtaatattctttgtgccctaatgtactctccggaattttccgtgaattttcggagctcgagaaatagttttaaagtcacgaagatcattgcatcaattaaaataaaaagaaaacaaataaaatttcccccttcctctctttgggccattttcggcccaagtcttctttcctctcccgcggcccgcgcgcctcctccctctctcgggccggctcccttcttccttggcccgctcgcaaaagtctgttttgcgtccctccttctctcccttcgccgacaggtgggaccggcggtcccacccgtcagctcctcctcctacctctcgccggccgaccccaaccgccatagccgtccacgtcgccgcaaaatccggcgccctcccgcacccgagctcgcatccaacgacgtgggcacgatcccctccacgtcctccaccatttcccccactctccccgcgaaaatcggcaccggttaacccctccaccaccccacgtcggcgccccacttcgccggccgattccgccacgtccggcctcgatcccgccttcccgagcccataaagagcatccccgtgctcccctcgtccgtttccccatttttcccgagcccggcatactctccctcgctctccccacgccgcacccacgcgctgccacactccggcgagctccggtcgccgtttcccgccgccacagccgtcgccgcgccgagccaccgccaccgccagcttcgccaccgcaaggggaagtccggccgcctcttatttccccctctccacccctcgagcaccactcccaccgcacacccgaggccgccgcccctttcaccgcctccagccgcgtcgcgccgccgcttcggtcgacgtcgactcgcgccgttgcctccctcagctccgcaaggacgaggaggacctcggccgccgcccctcttcgccggaaatccgccggagctcctccttcctcggtcgccggtgagctctacctcttgtcatcgccatcggtcttcgtttccagtcaccccgcatcggtcctcccctccctaactccctcttctccttctgaaggtcaagggcgaccccgtccgccctccgtcctcgcaagccgccattgggcaatcgtcgtcgccgtcctcttcctccgcgtcggccgccgcttccggtgaggatctctcctcccttccttttttcccgtcccctttcttgccgaccgccgcctcttggggtgcgtcgccgtccccgtgcgcgccgctgtcctccggccacccgccgccgttccacgtcgccggctgctgcagccggttgccgcctcccccttgccgcctcccccttgccgccgccgcgccatgtctcggccgagccggcttcatgccgtgcccgtgccccagccgcgccgcctcgtggccgtccgatcggctttgggccgatccgggccgtcggatcccgtggaccggcggtggaccgcctcggtggtcccggtccacggtggaccggcgcctttgtgccgctgaccggtggggcccgcttgccggcgccgcccctcccctttgctgacgtcagcgaggaccttttcctttgtaaaaataaatagtaattgcgcaataaatcgagtttaattctagaaattcattcaaatggctcaaaacttctaaaattcatatctaattcattcgaactccgaattgagccattcaacttgcaaaattcatctaaaattgagctctacatgttcgtttcggaagtccgcggtcgcgaggaaaagagttcggaagatcaaagtgaagaagcaaggcaagtcacacattccccttgagcatgttgatcccaatttataaatgttttaccgtttacaaataaatatgcatgttttgctaattacatgggatctgggttttacctatctgctcgcttgtgccatgtttacttgatatctgttctttgtcaaccttgggtaatgaatcgactagctcatgttacttatgtgacctagctagaactatatgcttagccatgcttaattaccactagctcagttgatgggataactgcagtattagacctttttagtatcagagtgagctgcgtgctcgagacacctggccatgcttcatggtcgtaattatccaactaaaatgcgactgaatggtgggctgtgggtgcatggttttgctggtcgcacccatggcagttaaggaccggttcgcgggatgccctggaagaacttatcgtacttaccacaagccagcgtgggcaacggctgggcttgtagtgtaacttttc

SEQ ID NO: 15446 - DNA, 3577 bp, Oryza sativa
tttcagaagtgtagtgcttctgagctgaagacgaagttagaggaccaaggctcagaccccaattgagttttgcctgtggagtggagctgaagccccgctaggatcgcctttttccgctgctgctgttttcgtttcggtgcgaggactaagtgcctcttttgtaagtattttacgctttatttacgtttggaactgtatattacttgtcgttttgtgtaccctggctggtcctggacagggatttaatacacaaaatagtctggaaatttgggctaaatttctgggcgtgacaatctcccgtgccttagccgtctctccccgcagccgccttctctctccgccgctggtagccgctccagccgtccctagcatccgctgtagtcgtcgcctccagtcgccatcgtcaccaccgggttcgcaaggaggagaagaagcccggccactggttcattttctccgtaacccactggaagtccctcgtcgacgtgaatccgatctactccaccttcgaccgagcctcgccgtcgacttcgtggttgctggacattgtcgtcgccttcttcggcatcgcagcgccaaagtaaagcccgtccgctggttttcctccgctaaagatcgccgaaataccgctgtcatcgtcgaccagtacctcgccgcccttcggagctcgtcgccggtcgtctcccgtcgtcgttcgtcgtcgtgccgcccctcagtgagttcccctcgtcgtgctctttcttctggtgccttcggtttgcgccgtcgtgccctaggtcaccggcaatcgttggaacccaagcctcccgccggtgatgacgtcatcgatgatgtcataaagcccttttcttttctaaaataaatcgtgaatccttttctgtataaggctaaaatcagtttaatcttgtaaaattcataactaattcatatgaactcggaatgaggccgttcaaatctctaaattcatctaaaatcatgatctacatgtttgtttacttttatgtactcttttatttggtttttattagtctttttctttgttttgcgtgttagcttgtcgtttctgtcgttgcgaaggttcgtgagtgcgtcggaagtgttcaagaagactaattgaataccgattattgcaaggcaagtcacacagatcccaaacactatccgttgagcatgttgatcatatatttaaattctctatttatttcaactgtgcatttatattcgaatgtcaccgggtggtgtgaacctattcctttgttatagccaatttgcattgaataccctattccttgatacctcggctaataattgattagcttgaaccttgtatattggtttggttcacctaaatgctatatatatataattgcttagccatacttagaaacattagctcattaatgggatgaatcatactatgttattatttatggttatatttaacggtagctcatgatggttaatcgtgttatgataattaattcataattaaaacttgacaatggtgggttgtgagcacatggttttgaaggttgtgctcatgacaattaaggactagttcacgagctactgttgtgagacattaaccgtaccaaccacaagccaacgtgggcaacggctttaccttttctatagcatggttcattacggggtgccaaactgagaagcggcgagaagtccgtggggtcgctagggagtccatgcctctggttattgagggggtgattatgatctaggaacggtgcagtgtggtgagttgtgttgtgtagagggtgttgtcatagcctctattcgggtactttgcagtatcgcgacacatggtagacatgatgttgaggctatcttgtgggtacagtgatacaactctggccagagtaaaactattcgaatagacgtccccgcggtcatgggtgagttgagcaatgtttttcgtgattagtctcatacctctcacaataattattgattctataactggtaataatttgcttagctcctggtttggagttagatctgtatagccggctatggttgttcaggatggttgggcctaagcagcatgggtgtgctgttcagtgattgattaatattgatgattaattactttattgttttactactcccaaatgttagctaaatgctgcttttgcaaataaacttatattatgccatcctttggtatctttgtgcacttgcatatttgctgtgtggcttgcggagtatttcatgtactcaccttgcaataattaatcaacctcagttgaagaaaaatgatccagaaggagaagacatttggtttataccctaattgatctgcctgtggaagtggagctgaagccatcgctagaccgttaattccgctgttgtttttcttttcttttgtaagttgtaacgatgttattatgatggatttgtatatttaattgtcagtttgtgtacctcggctgattcctggacgaggattttatgcacaaataagttcggaggcgtgacacccacacacctgtccctccccttgttccgtaaaaaatgtttcacctagttacttacaatgtttcactatgtatagatctaatattgcagtggattaaaatattcttttacaacagatcacccacatatttttgaaaccctctattaagggaattcgtttcattttttgttgcacaaaaaatgtttcacctaatgtactcacaatgtttcactatgtatagatctaatgttacagtgaacgggacattcttttgcaacaaatcacccatatattttggaaaccctctattaagggaattcggggaattcgtttcattttttgttccaccataaatgtttcacctagtctactcagaatgtttcactatatatagatttaatgttgcagcgaaatgaaattttttttcgctatttgctgaaacattgtttcattgtttttatataaggtgaaacaacacccgatttaaacgattgaaatattttcgatctacttagtgaaaattccgatatacttggtgaaacatcgtgcaacatttaaaaataatacaataataagctaattttttttcatcggaatatatgtatgtgtgatcttgttttgaagatttaattgcaagaaagttaatggtgcaatcggatcatgatttggataagtaatttaagagaaaaaatagtttaaagtggttttgcacgtatgagtgacgccgatttgactccctctcgatcgggcgcccgaccaggagtcgtgtcctaaagtaagtcacaaataaaattaataataattctaaaaattttttaataagacgaaaggtcaaacagtgtaaacaaaatatcaaaatctcttatattatgggacggagggagtaacttattagttaccttttcacataaaatttaaccatttattttattcagagtttttttgcaaattaaaagaaattaagtcatgtttaaaaatatttgatgataaatcaagtcacaataaaataaatgataactatgtatatatatgttaaatgataactatctttagtcccggttcaaataaccgggattaaaaatcgatctttagtcccggttgtta

SEQ ID NO: 15447 - DNA, 678 bp, Oryza sativa
ttgcggatgatcttggtcaaatgttggaggacgccaaggaagattgcgaaagtgaaaagggggcccataaattggacaagatgttagaggaccacagaacgtcgttgtacccaggttgcgagcaggggcacaaaaagttggataccactctggagttcttgcaatggaaggcaaaaaatggtgttagtgacaaggcatttggcgatttattgaaactcgtcaagaacattcttccggagggaaacaagttgcccgagacaacgtacgaggctaagaagatagtgtgccctctaggattggaagttcagaagattcacgcatgtccgaatgattgtatcctatatcgcggtgaggagtacgagaacctagaagcataccctgtttgcaaagcgctacgatacaagattagacgagatgatccaggagaagttgacgggcagctaacgaagaagagaattcctgctaaggtgatgtggtatttccctataataccacggttaagacgtttgttcaggaacaaggggaatgctagaatgatgcggtggcacgctgaagagcgtcaacaggacgggatgctgagacaccccgccgatggttcgcagtggcgaaacatcgacagaaaatttaaagactttagaaaggacgcacgaaacatacggtttggtttaagtacggatg

SEQ ID NO: 15448 - DNA, 1131 bp, Oryza sativa
ccttagaaaaccctctagtacaagaaagaaactttacataatcaatcgtaccatatttggactccttccaaattcgactccgcatcccatacgcacacaataactccatcgtatgccatatggaatctccatcaaccacgtgcatcaactctagcctaagtatcccgcatgatctctgatcaccacggacgtcgtcttatccccaagccgactcccggtccatcaccgcaaatactctcccgagacatcgagtcacctacacatggaacaaacaaaaaaaccatattccgagaccaagctatctccaacttgactcattagtagcaaacaatagtattacatacgtatagtatccatctagaactcataatcatggaataaactcggatatccaaataaacaacccgaaaccgaaaccgacacagtgtcggccggtcagaccgcgggctgcgccggtctgaccgggcattacacgccggtctgaccggctaccaaagcccggtctgaccggtccacattaaatcctgcagattcacctgtgaaatccaatcatcttcaaaaccacttcgtgaataaattccaaataacaaaaccaataatctccaatgcccaattgttcatcacagagtaataatcaaaaacacctttggttttacaatctcccccttgatgaacacattggcaaactcacaaaaatgttttggtatttggtggtaaaaagcacacttcgtacaaatgttcacatcgtgctcaaaaatccaaaaaaaaacttctcccccttttgaaaagaaagaaatacccaattgaacaaaaaaacatgctcttcaactctccaaaaaatcaccttgcttctcaaaaaaaaatccaaaaattttcacattacttctcccccttttgacaatgatttcatcaagcataggaattatattcattaatgttcaagagcttagcatacatatagcatatcaagtcatgtgttgcaataaaaagaagattaatccatctataacagaacaagcatgcattaaagtataaccatgaatcaaagattttacaattaagcttgaatcaacaatcaaaattcatgatttcatacgatttataatgcaacatcttaacaagcacataggt

SEQ ID NO: 15449 - DNA, 572 bp, Oryza sativa
atttgttccggcggatgtcgtcgttgattgtgcaaaggagcagcaacttctgaagttgatccacgttctgtttcagtactggtcgaagttgaattctctagaggaccatctcgatcagcatcaacagtatccgaacccgacgaacctggccggtctgaccgctcctcatgagccggtctgaccggaggtgtgccggcggtctgaccggcctggcgcccggtctgaccggccgagccgacctcatcgtcgtggtcgtagtcgctctcgtcttcaaaaatacgaccatcctccccctgaacctgtgacagtgtacctgcaatatcgggtctagtaccaggactagcctcatcaaaagaaacttcacaagtctcaacaattttgttagtccctaaaataagtacacgatagccacgagtgtgtgcggggtaaccaagaaacaatccatcgatagagcgtgcctcaaacttatccaaatttccagatttcaagacaaagcatttgcaaccaaaaacacgcaaatgtgaaactttgggttgatgaccaaatcgaagttcataagaagtttttccaag

SEQ ID NO: 15450 - DNA, 907 bp, Oryza sativa
tggattgcactctagccgaaccaacagtgtccatgtgtaacagctgtctcggtgcatccgtcatcacagaaacaataggagcatgtgaagtagaaaccatcttagcatgacgacacggtgtacaaaccaaatcaagatctttcttaagtttaggcaaaccacgaacaagatccaaaccacttaacctagtgagatgatcaaaaccaacatgtccaagtctacgatgccaaaacatcacatctttatcaaacttagcaaccaaacatgttatcacaggtgaaacaggattttcaaaatcagctttaaacactcttgcataacgagaaatattcggcatagaatcaccacgagaatcaaaaactttacttccagttttcttaaaatgaacctcaaacttttcatcaacaatttgtgaaaccgaaagcaaattgtactttaaatcctcaaccaaagcaaatttgtgaatcctcaacaatttgggatggagtcgtctgcgccgtttattttattttccgttgcttagatctttattggttgagaggaactatctacctctgtaatgacattatattcgctttattaattagagtaataattttactctattatcaatttgttattgtgtgcctcggctgattcctggacgagggtttacacacatataagcatttggaattttggatagaaattccgggcgtgacaagttggtatgagagcctccttgaccctaggttatgccaaatggttacccatagaagccctctaaaaatattgaaaaagtagaactgttctcctctctctcttttaattaaaccaagctaatggcacatgcagttatagtccctttaattgttctcattcaaaatttatttattattcctgtcttattagtactatacatctatta

SEQ ID NO: 15451 - DNA, 7456 bp, Oryza sativa
  unsure (1)..(7456): unsure at all n locations
aatctatatacaatgatttaatccgatttaatctttaaaaattcataactaattcatcttagctcgggtttagttgggtcaagctttctaattttttctaaaattgaggatctacatgttaaaaatatccacatggtattgttcatggcttggtttatgtggctgttttgggggattttggctcttttctggcttaggattccggacgttcccgggggaggtccgattttgcaaggagaagactttggaaggagttataagcggctagcaaggncaaggtcatatcaggattctccataacaaccctttgaggcatggttggattcctcgtttaaaggctttattatttctattcaacctattgcgatttcattttctggaatgtctactggggtggggaataacccctattggctttgtatagcccttttgatattgattatctattctttgtcacttggttaataattggattagctagaacattatatggttttagctaaagtgaataggatgcttagccatgcttagagacactagctcatataaaggggatacttatgattcactattatttaatgatggcttaattatagttcacgatggtcaatcgtgattggttaattaattcatgtgccaactaaaacatgataatggtgggttgtgagcgcatggttttgatggtcgtgctcatgacaattaaggaccggttcacgattttcggttgtaaaacattaaccgtgccaaccacaagccagcatgggcaacgactttactttctgtatagtatggttgatagtagagcacgagactgtgaagtggctgagataagcccacgagggtcgttggggagttcatgccttgtttacaagggggtgattatgatccaggagcggtgcactactttgaattgtgttatgtagagggtattgtcacaatctctattcgggtacttgttaagtatcacgacgcatggttgacatgatgttgaggttgtgtcttgtgggtacagtggtacacctctggccagagtaaaactattcgaatagccgtgcccgcggttatgggtgggtctaacaatgtctatcgtgattagtttcacacttctcatcataaaaaaaatgatgctgtacttgttaataacttgtttagctcctggtttggaatggtatattcctggtttggagatagaactttacagccgagattggttgttcagaatggttgggcctatgcaacacgggtgtgttgtatagtgtggatttaatattgcttaattactcaactgttttactattctctcaaatgtttattaaatgttgtttatgcaaatgagcctatgttatgccatcctttgttatccattgcacttgcatatttgctgcgtggcttgctgagtatgtcatatactcaccttgcaatcattcatcggaggaggagttctacagtgatgctgaaggtgtggatgattaggcgtagccctggtcaagctgcttgtgggatggagtcgtctgcgccgtttattttattttccattgcttagatctttattggttgagaggaactatctacctctgtaatgacattatattcgctttattaattagagtaataattttactctattatcaatttgttattgtgtgcctcggctgattcctagacgagggtttacacacatataagcatttggaattttggatagaaattccgggcgtgacaagttggtatgagagcctccttgaccctaggttatgccaaatggttacccatagaagccctctaaaaatattgaaaaagtagaactgttctcctctctctcttttaattaaaccaagctaatggcacatgcagttatagtccctttaattgttctcattcaaaatttatttattattcctgtcttattagtactatacatctattactgtactgatggcccaattacgagcaaaggttttaaaacattgttttaattaatcttgttgcaataaacttagcatgttgatattataactctcttttatttcatttcttttgaaacctgttattcaaaagtccaaaatttgtactcttgttttcaactgtttcatcttatcttgcaaagattggtttactttatttatttaccttttactttgattttctaactttattcaaattaatctaaaaacttgtgctattaattggataaatatcttaactccctcctttcacttgtctttagatgccacgcttcaagcctgagtacttgttcggtactgagggatttgtcctggagttgcgtacgatgtctttcctcataggattcgggactgcccctttgtatgcccagattcctcatgatcgtgatgaagagaagtgtcgggtcaaggtcaccttgaacagtaatcgtgaagatatcccatcagtgatgttcgaggctggagggggaaactgtattcatgcttgtcaggaggtggcaaggattaccataggagagctccgcgaacgctacaatgatcagttggccgacaccgagtatcgctaccatcctcgtcaaccccagggaagtggtcgtggcagctaccttgaacttgcaggaattgagaatgatgctaccacaaggcatttggttgagatgctgtgggccatggatgagacccgcgctgagattgtgttagcagcccaagatcgcgaagaccggaatcgtggtaagatttgcaagctggaggacaaggtggatcgtttggagaaggaattagccgcattgaagggagaagcaccaccgcagaaggccagggttcgtcttaccgcaaggaagagagctctttttgtccctcgctaccagttggcatctaaggttcgtgtggtggaagaagaagaagctgccccagccccagtgaatcttcccgtcattaatgtaagtgatgatgaaggagaagagtcaaagcgcacccattcgaaggttgagtggggagctacccaagatgatgagatcgagccttcaatcaactccgatgcccggaagacctagaacgccttgttaagtctttgccttagatcgttgtgttagtttgcttgtttaagtttggttgtgtgcgtgggtctcgcttgtagtttacatcattggtgggatataaatgcatgcgtttgtttgctttcgagtgttaggaagcttgtgagttagtggtgtaagagctttcagttataatgtaataatgaaactcagttaagagtttttgagggaggagaaccaatttttatcgccggtcatgtgccgcgaacaaccggaatccacgatccacacgttctccttcctttccaccaaggcctacacacaatcagaagtcgaagcctcagtaccggggttagacaataataaaaatttaggaatccagtactgagacacatgaccagaagatccaataggcatatatccacgtgcaaaatcaattttagaattttcagaaaaattcctccgaggccggtctgaccgaggtacagtggccggtctgaccgccactgcaccgcccgtctgaccggtgtcctcgagggaaaaccaaatttttgccactttgattttgcaaaagcaatctctctcttctttttctgtttatgagctaatctgaaacaaaaaccaacaatatgccatctttgccacaaaaagaacaaatatatttttcacgatgattagacacattggtaacattagaagatttagcaacaatagtactaataggaggttttgcatgcacaacattggattttgaagaagattcattcatagtagacatgataccagcagatttaaacacagttttattagcatcaggtttaaccaaaacctcaccacttctagcaccaacacctaacacaacaggaggatatctagaattatgagcataaggattaaaacctaaaccacagttatgtgtactaacctttgattgatccaaaatcgtgttgaggttctttttactatcagaaaatctttgcaaagaatttttcaaataagaaacctctttttccaaactagcacaattttcacaatctaccatgacacatttgctttcacgacatatggggcaagaaagcactttgttgtttttcacaacatcttccatgtactcaacatgacctgaagcatcttttagtttcatcttattcaaattacatgttgagcaatccaaaacatcatgaggttgttttcactttttagcagaaatcatgttaaacatcaaactagcatgaaaagtaatttgatatttttgcaacaactttttagttaaaaacaactcatccaaagtgcgtgtacgcaaggcaaaactacgagcaagagaagatctatttttcaaatcatgtgcagcattaatatctctaatttttgaaatctcattcattaaaacctcacaatttgagcaatcatcatcattaggaataagagattttaatcttgcaacttcagatttaagagattcaatgataaattcctgttttctatacatcttctcacacttctttttttttcactcaaaatattaatagcttcctcaaacgcacttacctcattatgttcaaactctatgtcagattcaccacgtgccatgaagcaaacatcggagatgttcttccccttatcatcatctccactttcaccatctacatcacttagtggctcgaaggcagcccaaacttgttgaaaagccttcctaagattctccatcttcctcccttgggatgtacccttcgacttgttgttgttgggcttgttgttgttcgtcttctcaccatctttgtcttctcttttgcctctcccaagcttaggacaatgcgaacgaagatgatcaattgaaccacattcaaagcaccgatttggaccacatcttttcctgttcctggcattattcatagctcgagcaatacggttagcgaccaaagccaaatcctcctcctcgatttgttcgagttgatcatcggatatggcattaaaagcagcaagaaaagaaggcatagatgaagaagcatcaacatccaaagaagaagtagaagaaaccaaagcagtcgacttagaatcaacttttcgagaaagaacattcatctcatgtgttttcaattttgtgtaaagtgaatccaaagtcaaagtagacatgtcaacagactcctgaatagatgtaactttcatctcccaaatagacatattaagaccattcaaaaagtgacgagaaatctctgattgcggataattagtatcataagaagaatcaataagatcactcaaaattttattaaacctagaaagatagtcatcgaaagcttctccaggtttcatctcaaatttaatgtactcctttttgaaaatatcacgacgaagttgttttatgttatttgttccttcatgaaagttactcaaagcattccaaatctcatgagcagttcgaagatgcgcaacacgatcataatcagaacgagaaataccactcaaaagaatgttgcgagctttgcaattttgttcaaaagcagttttttcagcagcagtattaatagcttcaggaatcacataaggatgagaaacttttctccaaagatcataattctcagccataattgtcacaccctaaaaatcccaaaaatataaattattgtttaattggaattattagaaataattttaaaagcctagaagcaaagatctaattttaaataataaattccaatataaaagtggcccagataaaattttattaaatacttctcttgattctatagttcctagatttttctaggatttatttgagccaaggaagtatttttaataaatggaattgcatttcatgaataatttaaattgaaaaaggtttttaaattcctccttttgactttgggccgaaagtcggcccaaaaccgccctttctctctccccggcccaagtcagcccgtagccgagccgccgctcgcgcgcgctccctcccgctgacaggtggggcccaccagtcggggtcgtcgtcttcctcccaccgcacggccgcgccctagccgccgccgccgcccttccaattcagccgcgcctttccatctccggtcgaattgattgaggggaaacgatcttctcgatctcctctatcttttctcttttggaagcatcgtctattctcctttggaaatcgccgaattcgatctcgaatcggattcgtttttcccctccgaaccctaatctttccttcccgtcgccggccgccgtgggccttcgtcgccgccctctagcccctatttaaggacacccgagacctcctctctccgccgccaccctcgccttagcccgccgccgtctgtagcgccgcctccgcgtgagctcttgcgccgccgtcgccgccgtttgtccagccgtgcaccgccatcgctccggtcgtcgtcatcgctcgggaaggccgccatcgagatcgccaagccatcgccgtcctcgtccacctctccgtttctgccgaggattgccggagcaccgccgtcgtcgtcgtccggttgccgtccgccgccgttcgtgcctcggtaagattcgccgcgtcgcccgcaacccgtaggtgccctccgtttgcgccgccgcgccgtcgttcaccggcgagcgtgcgaggttgagccgccgccagtggtgacgtcaccgctgacgtcatcgacgccgtttcccgtggaccgcgatggattagatcgatctcggccgttcgttttgaatcgattagatctcggccgttcgtttttgtagaccgtcgccgtgcacccggtccaccgtgaacccgcgccgctgacgcaataccttttttcttttcaaaaataattcattattgcgtcataattcaattaaaatctatataaatgatttaatccgatttaatctttaaaaattcataactaattcatcttagctcggttttagttggtttaagtttctaaatttttctaaaattgagatctacatgttaaaaatatccacatgtactgttcatgcttgtttatgtgctgttttggtgattttgctcttttctgcttagattccgacgttctcggagagtccgattttgcaggagaagactttgaagagttccaaggccagcaaggcaagtcacatagatcccaaacaaccctttgagcatgttgatcccgtttaaagctattgtttctattcaactattgcatttatttttgattgtcactgggtgggaataacctattgcctttgtatagcccttttgatattgattatctattctttgtcacttggttaataattggattagctagaacattatatggttttagctaaagtgaataggatgcttagccatgcttagagacactagctcatataaaggggatacttatgattcactattatttaatgatggcttaattatagttcacgatggtcaatcgtgattggttaattaattcatgtgccaactaaaacatgataatggtgggttgt

SEQ ID NO: 15452 - DNA, 10851 bp, Oryza sativa
aagattgcaagctggaggacaaggtggatcgtttggagaaggaattagccgcattgaagggagaagcaccaccgcagaaggccagggttcgtcttaccgcaaggaagagagctctttttgtccctcgctaccagttggcacctaaggttcgtgtggtggaagaagaagaagctaccccagccccagtgaatcttcccgtcattaatataagtgatgatgaaggagaagagtcaaagcgcacccattcgaaggttgagtggggagctacccaagatgatgagatcgagccttcaatcaactccgatgcccggaagacctagaacgccttgttaagtctttgccttagatcgttgtgttagtttgcttgtttaagtttggttgtgtgtgtgggtctcgcttgtagtttacatcattggtgggatataaatgcatgcgtttgtttgctttcgagtgttaggaagcttgtgagttagtggtgtaagagctttcagttataatgtaataatgaaactcagttaagatcaataaaagttaagttagtaaaaaattaattccctgtcctaagtagttttccgctgtttctcttcttgtgctcctgtctatgctagatggtgcttactcgcagcaatgggaatggtcccaacaacaacaacaacaacaacaacaacaacaatggagagaatcccacgcttgcccaagtcctggctcaacaggcacagctcatgaatatgatgatgcaccaactacagaaccagcagaaccagggaaacaatcatgcacctccccagaacaagttagcataatttcttcgtgtgaggccgcctactttttctagcactaccaatccagtcgaggctggtgattggctgcatgccatagaaaagaagttggacctgcttcagtgcacagatcaggaaaaagtctccttcgcttcgcatcagcttcatggccctgcctctgagtggtgggatcatttccgtctcaacagaactactgccgaaccaatcacttggcttgagttcactgctgctttccggaaaactcacataccctcgggagtggtgtctcttaagaagaaggagtttagggcgctcactcagggatctcgctctgtcaccgaatatctgcatgaatttaatcgtctggctcgctatgctccgaaagatgtgtgcactgatgatgggcgtcaagagaagttcctggaaggactgaatgatgagttttcttacccattaatgactggggattatcatgatttccagaagttggtggataaggctatacgccaggaggacaagtacaaccatatggagcagaagaaacgtaggattgctcacttcaaagctctacaggggaatagtcagaggccgcgtcttgctatgggacctcaggcagtgttgcagggagggtcttcgtctgttgttcgtccgcaacgtcagttcttcaacaacaatgctggcaacaacaaccgcaaccaagctccacgtcccgttgcaactccagtccagcatcagcctgccaagagggagcaaggcagcaagcctggggtgtgcttcaactgtggtgaacaaggacattactccgataagtgtccgaagccccgccgcgtgaaggttgtccctgcctagagcaactccaccgcaccagcgacaaaggctcgtgtcaaccatgttgctgctgtagaagcccaaggtgctctagatgtgattttgggtacgttccctgttaactcaattcctgcaacagtacttttcgattctggtgctacgcattcttttttgtctatgagttttgcgggaaatcatgggatgcaggtagaagatcttagacgtcctttgatggttagtactccgagtaagcaagcactcacatcacaacgtagcccctctgtcagaatagagattcaaggagtaccatttctagccaaccttattctgttagaatccaaagatcttgatgtcatcctagggatggactggttagccagatataaaggtgtgatagactgcgccaatagaaaagtaactctcaccagcaatgatggtcaagttgtaactgttcatgcattgccttctgagcctttatggtcaagtctgaaccaaataactttggaagagattcccatagtacgggagtacccggacgtgttcctggatgatttacctggtatgccgcctaaaagagatatagaattcagaatagatctggtaccaggaacaaccaatccataagagaccttatagaatggcagccaatgaattagcagaggacaagaggcaagtagatgatttgcttcagaaaggatacatcagaccaagttcgtctccatggagagctccagtcatctttgtggaaaagaaagatcatacccagaggatgtgtgtggactatcgtgcactaaatgatgtgactatcaagaataagtacccattgcccagaattgatgatttgtttgatcagcttaaaggtgccaccgttttctccaagatcgatcttcgatcaggttatcaccagttgaggatcaaagaggaacatatacctaagacggtttttaccactcggtatgggttgtttgaatgtacagttatgtcttttggacttaccaatgccctcgctttcttcatgaacttgatgaataaggtgtttatagaatacctagacaagttcgtggtagtctttattaatgacattcttatctactcccgaaccaaagaagagcatgaagaatatcttcgccatgcactagagaagctacgagaacatcaactgtatgccaagtttagcaagtgtgaattttggttgtctgaaataaattccttggtcacatcatctcagccggaggagttgccgttgatcctagtaatgtggaatccgtaacgaactggaaacaaccgaagacagtttcagagattcgtagtttcatgggtctcgcaggttattactggaggtttatagagaatttctccaagattgctaagcccatgacacgactgcttcagaaaaatgtgaagtacaagaggtcagaagaatgtgagcagagctttcaagagttgaaaagtcgcttaatatcagcacccattttgattttgcctgatccaaagaagggtttccaagtgtactgcgacgcatctaagcttgggttaggttgtgttctgatgcaagatgggaaggtggttgcctatgcaggttgcctatgcatctcgtcagttacgtccgcatgagaagaactaccctactcttgatcttgagttagccgcagtggttcatgcgttgaagatttggcgtcactatctctttggtactcgtacggaggtgtacacggatcacaagagtttgaagtatatctttacccagccggatctaaacatgaggcagcggagatggttggaattgattaaggattatgacatgggaattcattaccaccccggaaaggccaatgttgtagcagatgctctcagcaggaaaggttattgcaatgctacggaaggacgacagttgccgttggagttatgcaaggaatttgaaaggctgaatttgggaattgtcagtagaggtttcgttgcagctttagaagcaacgcctactctcattgatcaagttagagaagctcaagtcaatgatcctgatattcaagagatcaagaagaatataagaagaggaaaagctatcagtttcttggaagatgagcaaggaactgtatggttgggcgagagaatctatgtcccagagaacaaggagttgaaagatgtaattctgaaagaagctcatgacactttatactctattcaccctggtagtaccaagatgtaccaagatctcaaggagaaattttggtgggcaagtatgaagcatgagatagcagagtatgtagctgtgtgtgatgtttgtcagcgagtcaaggcagaacatcagaaacctacaggtctgctgcaacctttaaaattaccagaatggaagtgggaggaaataggaatggatttcatcactggtctacccagaacgtcatcgggccatgactctattttagtgatagtcgacaggcttaccaaagtggctcatttcatcccagtgtggacaacatattccggaagccgtttggcggaattgtatatggcaaggattgtgtgtttgcatggcgttcctaagaaaatagtatccgatcgaggtaaccagtttacttcaaagttttggaagaagcttcaggaagagatgggttccaagctgaacttcagtaccgcttatcatccgcagacagacggacaaaccgaaagggtaaatcagattttggaagacatgttgagagcttatgctttagacttcggtggaagttgggataagaatctgccttacgcagaattctcgtacaacaacagttatcaagccagtcttcaaatggctccttatgaagcgttgtatggtcggaagtgccgcactccgctattctgggatcagacgggtgaacgtcaggttttcaggactgatattctgagggaagtagaagagaaagtaaagatcattcaaaaaagattgcgtatagctcagtctcgtcataagagctatgctgataatcgccgtagggatctgagttttgaggaaggagatcatgtgtaccttcgtgtcacgcctcttcgaggggttcatcgttttcacaccaaaggaaaattggcaccgtgttttgcgggaccttacatgattgtcagtagaagaggagaggttgcttatcagttggagttacctcaatcattggcaggtgtttataatgtgttccatgtgtcacaattgaaaaagtgtttaagggtacccactgaagaagctaatcttgagcaaatagaaatccaaaaggatctgacatatgttgagaaaccaatccgtatcctggagacagatgagataaggaccaagaatcgggttattcgtttctgcaaggtccaatggagtaatcacacagaggaagaagctacctgggagcgagaagatgaattaaagtcagctcatccgcatcttttcgacagttcttccgaatctcgaggacgagattctgtttaaggggggtaggtgtgtcacaccctaaaaatcccaaaaatataaattgttgtttaattggaattattagaaataattttaaaagcctagaagcaaagatctaattttaaataataaattccaatataaaagtggcccagataaattttaattaaatacacctcttgattctatagttcctagatttttctgagatttattttagccaaggaagtatttttaataaatggaattgcatttcatgaataatttaaattgaaaaaggtttttaaattccaccttttggctttgggccgaaagtcggcccaaaaccgccctttctctctccccggcccaactcagcccgcagccgagccgccgctcgcgcgcgctccctcccgctgacaggtggggcccacctgtcggggtcgtcgtcttcctcccaccgcacggccgcaccctagccgccgccgccgcccttccaattcagccgcgcctttccatctccggtcgaattgattgaggggaaacgatcttctcgatctcctctatcttttctcttttggaagcatcgtctattctcctttggaaatcaccgaattcgatcttgaatcggattcgtttttcccctccgaaccctaatctttccttcccgtcgccggccgccgtgggccttcgtcgccgccctctagcccctatttaaggacccccgggacctcctctctctgccgccaccctcgccttagcccgccgccgtctgtagcgctgcctccgcgtgagctcttgcgccgccgtttgtcctgccgtgcaccgccgtcgctccggtcgtcgtcatcgctcgggaaggccgccgtcgtgatcgccaagccgtcgccgttctcgtccacctctccgtttctgctgaggatcgccggagcaccgccgtcgtcgtcgagccgattatcgccgccacttcatcctcgtcgccgtcgtcgtccggttgccgtccgccgccgttcatgcctcggtaagattcgtcgcgtcgcccgcaacccgtaggtgccctccgtttgcgctgccgcgccgtcgttcgccagcgagcgtgtgaggttgagccgccgccagtggtgacgtcacagctgacgtcatcgacgccgtttcccgtggaccgcgatggattagatcgatctcggccgttcgttttgaatcgattagatctcggccgttcgttttcgtagaccgtcgccgtgcacccggtccaccgtgaacccgcgccgctgacgcaataatccctttttccttttcaaaaataattcattattacgtcataattcaattaaaatctatataaatgatttaatccgatttaatctttaaaaattcataactaattcatcttagctcggttttagttggttcaagtctctaattttttctaaaattgagatctacatgttaaaaatatccacatgtattgttcatgcttgtttatgtgctgttttggtgattttgctcttttctgcttagattccgacgttcccggagagtccgattttgcaagagaagactttgaagagttataaggctagcaaggcaagtcatacagatcccaaacaaccctttgagcatgttgatcccgtttaaagctattatttctattcaactattgcatttatttttgaatgtcactgggtgggaataacctattgcctttgtatagcccttttgatattgattatctattctttgtcacttggttaataattggattagctagaacattatatggttttagctaaagtgaataggatgcttagccatgtttagagacactagctcatataaagggaatacttatgattcactattatttaatgatggcttaattatagttcacgatggtcaatcgtgattggttaattaattaatgtgccaactaaaacttgataatggtgggttgtgagcgcatggttttgatggtcgtgctcatgacaattaaggaccggttcacgattttcggttgtgaaacattaaccgtgccaaccacaagccagcatgggcaacgactttactttctgtatagtatggttcataggagagcaccagactgtgaagtggcggagataagcccacaggggtcgctggggagtccatgccttgtttacaagggggtgattatgatccgggagcagtgcactactttgaattgtgttatgcagagggtattgtcacaatctctattcgggtacttgttaagtatcgcgacgcatggttgacatgatgttgaggttgtgtcttgtgggtacagtggtacacctctggccagagtaaaactatttgaatagccgtgcccgcggttatgggcgggtctaacaatgtctttcattgtctttcgtaattagtttcacacttctcatcataaaaaaaatgatgctgtacttgttaataacttgtttagctcctggtctggaatggtatattcctggtttggagatagaactgtacagccgggattggttgttcagaatggttgggcctatgcaacacgggtgtgttgtatagtgtcgatttaatattgcttaattactcaactgttttactattctctcaaatgtttattaaatgatgtttatgcaaatgagcctatgttatgccatcctttgttatccattgcacttgcatatttgctgcgtgacttgctgagtatgtcatatactcaccttgcaatcattcatcggaggaggagttctacagtgatgctgaaggtgtggatgattaggcgtagccctggtcaagctgcttgtgggatggagtcgtctgcgccgtttattttattttccgctgcttagatctttattggttgagaggaactatctacctctgtaatgacattatattcgcttattaattagagtaataattgtaatctattatcaatttgttattgtgtgcctcggctgatttctggacgagggtttacacacatgtaagcgtttggaattttggatagaaattctggcgtgacaataatgtaagattgcatccaactacaccaatgagaaaaatccgttccatcgaaaatatgaggcttagttgtaaacatagcgggagtagccatggcaaaaactctagatcaataaaaatccaaagaagaaaaaaaggctctgataccacttgtaggatcgaatagcaagaactaagccaaccagagggaggggtgaatgattggtatacccaaaaacaaaaaacttttattggaaaataaaagttaccctcgaattcgacggatcgcggtctgaccaaaggtattgcgccagtctgaccgcctgatgaacgtcggtctgaccgagatcgaacttcggtcgaaccgccgagattgcctgtcgccgactcctgtcaacgccggtctgactgccgtactcccaccggttggaccggcgcggtactgccggtctaaccgccggtatgtcactggttgaaccgccgaaactcggtgaaacacaaatcgtagaactcttaaagtggatgacgactttattacttctctctatgtttacgaagtgcgccaacagcactccttacaaaaatttcaactaaactcgaaaccctaactcaaaactcaactcaattgctctcaaaagcgataccgggaagtctcacgctccccctctatttatacccgaggtaggcagcctaaagccacgaaccaaactcatactaggagtcctaaacaccttagaaaaccctctagtacaagaaagaaactttacataatcaatcgtaccatatttggactccttccaaattcgactccgcatcccatacgcacacaataactccatggtatgccatatggaatctctatcaaccacgtgcatcaactctagccttagtatcccgcatgatctctgatcaccacggacatcgtcttatccccaagccgactcccggtccatcaccgcaaatactcttccgagacatcgagtcatctacacatgaacaaacaaagaaaccatattcagagaccaagctatctcaatcttgacttattagtaacaaacaacagtattacatacgtatagtatccatctagaagtcataatcatgaaataatcacggatatccaaataaacaacccgaagccgaaaccgacacagagtcggccggtcagaccgcgggctggatggtccgaccactcgatcaccgccagtctgaccggcaacacctgcccggtctgaccggtccacataaaatgataacctgtagattcacctatgaaatccaatcatccccaaaaccacttcgtgaataaattccaaataacaacaccaataatctccaatgcccaattgttcatcactgaataataatcaaaaacacctttgattttacatttctgaataccacaacctctagttttccgaacatacttccttctactcggattatgaaaatcaataattcccatagaatctagccaaatattgacaaacaaaaaaaaatcttaacttataatcttatatatcttattaactacttcctccgtattttaatgtatgacgccattgactttataatcaacatttgaccactcgtcttattcaaaatttttatgcaaatataaaaatacttatatcatgcttaaaaaatatttgatgataaatcaagttacaataaaataaattataattacataaattttttaaataagacgaaagatcaaacgtttgtcaaaaagttaacggcgtcgtattaaaatatagagttaacggcgtcatattaaaatatagagagcactacttaaaaaactgcaattttctaatcatcacacgtcgatttttgtctgtccacgtgacgattttcgtctgtaatcgattttcatccgtccacgtgattttcgtccacgcgacgattttcgtctgtaattgattttcatccgtccacgcgattttcgtccgtagtcggtgagaccgcgtatgcgtttccgtcttcttaagctgcggccaactcagtgtcatagccggataaaaaaacagaaaaatccaaaaatccaaaatctctctaggtagacttgctcaaacaccctagagttttaattcaaattcagaagatagcatcgcaaattgcattttggctcattcatttgcccaaaacaatcatagcatctatcagattcagatcggagcatatagacgaaaaaaaatccggtatcacaaccctcttcaacaccgatccggattctatcttataaaagaaagaaaaggaagagcgatgcgtccacggaccacgaatcatgtgcagcaagcccaccagttacagatcgatgctcaccacttcgagattgaaggagtggcgtggggaaggaggtcgtctccctgctgccaatgggccacagctaagcttgaggacgacttcaaggcgcgatggacgatgaggcgaggagccgacgccgccccatcctcctccctgctcctggacggcacgcgggcgccgagctcgctccacgccgtcgcacgaagccgcgcccgcagagaacggccgctctcgccgcctcagctccccaagcgcgccggcacaccctccctctaccccgggcgccctcctgcctgctcctcgctgcaccgccaccggcgctctcctcctcctactcggaggcagatgagagaaagagagaagaaaagatcgagataatgaagggaaagagagagaaaaaagaaaagaaagagaacgtgtgggtagaggtgggcaaaataagaccgaaccgaagaaccgaaccgaaaaaaccgagatcgaaaagaccgagaccgagaaattcggttagtagttcggtcccaactattaaaagac

SEQ ID NO: 15453 - DNA, 20251 bp, Oryza sativa
atcctgatgaagatggtgaagctgttgatcaaaaggaatatagaagtatgattggatcttttttgtatctaactgcttctaggccagacatacactttgctgtgtgtttgtgcgcacgctttcaagcttctcctcgtgcttcacatcgtcaagcggtcaagcgaataatgaggtatttgaatcatacacttgagtttggaatttggtattctacttcatcttctatatgcttaagtggatattccgatgctgaatttggtggttgtagaattaataggaaaagtactagtggaacatgtcattttcttggtacatcattgattgcatggtcttctaagaaacaatctaatattgctccatcaactgctgaatctgaatatgttgctgctgctagctgttgttcacagattctttggcttttatctactttgaaagattatggtcttacttttgagaaagtacctctcttttgtgataatactagtgctatcaatattgctaagaatcctattcaacactcacgcaccaagcacattgatattcgttttcactttttgagggatcatgttgagaaaggagatgttgagttgcagtttttggacacaaagttgcaaattgctgatattttcactaaacctttggattctaatcgctttgcttttcttcgtggtgaattgggcgtcattcatccttttggcatggtttgaggggtagtttgtacctcatggttttatcaagcaaaaatatgataatgaaaaaattgagaaaagagagctttgtttatgcatatggtattttcttgtgcatgctagcaatactttgaaggtttatttgtctctagcatagcttgtatgtattctagtcttttcatgagatttagattttgcttttaagggagatgatgcattacacttaaattctatacttgaattaagaaaatatgcaatgttgatgctagcatatggtttgatttataaatgctctatatatatgctctattgacttgttattcctcaaatacctttaattgctcattgtgaaaaagagaataaaaaatataaaaaaaataaataccgaatccttggaaacagtcttgacgacaagaacgtattcgatgtgagcaaaataatgggtgccgaatccctggaaacagtcttgacgacagggacgtacccggaataagaaagagaaaaatatgagaacaaaggctcaagaaaagaaaaagttaaaaaaatttctctttgttagttttgtgcagaatgcttatttgagaaagagtgataaatgcaataggtatatgtgtttagtgtttattctttaacctatgtgcttgttaagatgttgcattataaatccaatgaaatcatgaattttgattgttgattcaagcttaattgtaaaatctttggttcatgactatactttaatgcatgtttgttatgttatagatgggttcatcttctttttattgcaacacatgacttgatatgctatatgtatgctaagctcttgaacattaatgaatataattcttatgcttgatgaaaatttttggatattttggagaagcaagatgaatttttgaagagttgttgagaagagcatgtttttggttcaattgagaatttctttcttttaaaaagggggagaagttttcttttagatttttgagaacgatgtgtacgtttgtacgaagtgtgctttttaccacttttgtttttaattttccaaacactaaaacatttttatggatttgccaatgtgttcatcaagggggagattgtaaaatcaaaggtgttttttattattattctgtgatgaacaattgggcattggagattattggttttgttatttggaatttattcacgaagtggttttggagatgattggatttcacaggtgaatctataggttatcattttatatggacaggtcagaccgggcaggtgttgccggtcagaccggcggtgatcgagtggtcggaccggccagcccgcggtctgaccgaccgactctgtgtcggtttcggtttcgggttgtttatttggatatccgtgattatttcatgattatgacttctagatggatactatacatatgtaatactgttgtttgctactaatgagtcaagttggagatagcttggtctcggaatatggtttctttgtttgtttcatgtgtaggtgactcgatgtctcgggagagtatttgcggtgatggaccgggagtcggcttggggataagacgacgtccgtggtagtcagagatcatgcgggatactaaggctagagttgatgcacgtggttgatggagattccatatggcatacgatggagttattgtgtgcgtatgggatgcggagtcgaatttggaaggagtccaaattcggacgattgattatgtaaagtttctttcttgtactagagggttttctaaggtgcttaggactcctagtatgagtttggtttgtcgctttaggctgcctacctcgggtataaatagagggggagcgtgaggcttcccagtatcgcttttgagagcaattgagttgagttttgagttagggtttcgagtttagtcgaaatttttggaaggagtgctgttggtgcactttgtaaagacagagagaagtaataaagtcgtcatccactttaagagttattctatttgtgtttcactaggtttcggcggttcaaccggcgacgtaccggcggttagaccggcggtatcgcggcggtccaaccggcgagagtacggctgttgtcacatcctgatttttgtttcaggatttataaattattttactaaattaataatataatttatattaaatgatctttaatttacaagtgaagtaaaatgtgggaaataaaatttcctaaatctaaagcatggatggatttaatttttattaaattctccatggttaattatactctctgaaattttctcggatttttcagagctcaattcctaaatgaaacaaagaacagttcagtaattatttgatcattaatgatctaactataattgttaagagcttttcttgtttaaaaatccttaaattataaattgttgtttaaaaggaattattagaaatgattttaaaagtctaaaagagaagatctaattttaatttgttaaatctcaatataaaattgggctagataaaattttgttaaatactttgcttaattctagaattcctagatttttctgggatttttttgagctaaggaagtatttttaataaatggaattgcatttaagaaataatttaaattgaaaaaggtttttaaaagtcttcttttggctttgggccgaaagccggcccaaaacccctctctttccctctctctctttccctcggcccagccggcccaatccgccgagccgccgctctcctctctctcgctgtcgctgacaggtggggcccgcttgtcagggtcgtcgtcctcctcgcgccgccgccgcccgcaaaccctagccgagagccgccgccgtctccttccaaattcggccatgtctttccttctccggccgaattggttgagggcaaatgatcttctcgatctcctcttccttttctcctttggaatcttcgcctaattcggtttggaaacttgtggattcgaggtcgaatcggattcctctctttcctccgaatcttcaacctttccttctcgtcgccggcagccgtgggcctccgccgccgccttccaacccctttataaggacccccgatgtctcctctacccgtcgcccccttcgccttcgcctctcgtcgttggaaaagccctagcaccgtgtaccctagctttgccgtcgccgccgccgctccagccgtgcgccgccgccgctccagccgtcgctgtcgctcgggaagaccgccgtcgggttcgcaaggtcgtcgccgtcctcgtccgccccttcgccgccgccgaagaccgccggagcgccgtcgccgtcgtcgacccgaaggtttccgccgcttcttcttcgtcgccggcgccgtcctttgctcctccgccgttgttttggtcaccggtgagttcgccgcgtcgcgctctacccgttggtgccctccgttcgcgtcgtcgagccgtcgttcgccggcgagcgtgcgccgcccgagccgtctgctccgccgagccgccgccgctgtcggtgacgtcattgctgacatcatcagggtcgtccgccgtgagccggtcgtggaccgttcgatctcggccgtccgttttggatagggttgatctcggccgtccgttcccgtgaactgttgccgtgcacccggtccaccgcaaaccctagccgctgacgcaataaaccttcttttccttttcaaaaataattcattattgcgtcataattcaattaaaatccatataaaggttttaatccgatttaatctttaaaaattcataactaattcatttgaactcagtttaatgtggttcaagttgcaaaaattatataaaataaagatctacatattaaaattgtccataaattgaattaaatttatttaattctttttaaatgggctttaattagattataatcttgtaaaatttataataaattcatttgaaatcggaatgaggccgttcaagtctcataattcatctaaatttatgatctacatgtttgtttactttttatgtactgtttatttggtttttattagtctttttcttcgttttgcgtgttagcttgtcgtttccgtcgttgcgaaggttcgcaagtgcgccggaagtattcaagaagattaattgaagaccgattattgcaaggcaagtcacacagatcctaaacacaatcctttgagcatgttgatcctatatttaaattctctatttatttcaactgtgcatttattttcaaatgtcactggatggtgtgaacctattcctttgttatggcctgtttgcattgattaccttattccttgataccttgggttattataacttgactagttgggctttatatattggttcagctagatattagatatgattgcttagccatgcttagaaacattagcacacaattgggataactaatgtttcactatcacttatggttatatttaatggtagctcaccatggtcaatcgtgattggttaattaattacttgccaactaaaacttgataatggtgggttgtgagcacatggttttgagagtcgtgctcatgacaattaaggaccggttcgcgagctactgttgtgaaaaattaaccgtgccaaccacaagccagcgtgggcaacggctttaccttttgtataacatgattcattgcggagcaccaggttgagaagtggcggagataagcccacgggggtcgctggggagtccataccttgttttataagggggtgattatgatccaggaatggtgcgctgcggtggattgtgttatgcaaggggtattgtcacagcccctttccgaggtaccgtggtggtactgaggcacatggtgacatgatgtggggccgtgtcttgtgggtacagtggtacacctctggccagagtaaaactattcgaatagccgtggccgcggttatgggcgagttgagcaatgtttttcgtgattagtcccacacctctcaccataactatggatgttacctggtaataatttgcttagctcctggtttggaatggataattcctggtttagagattagatctgtacagccgggtatggttgttcaggatggtcgggcctgtgcagcatgggtgtgctgttcagtgttgattaaaatttctgattaactactctactgttttatttctcttaaatattttgctaaacgctgcttttgcaaatgagcctatattatgccatcctttggtatccttgtgcacttgcatatttgctgtgtggcttgctgagtatgtcatatgctcaccttgcaataatcaatcaacctcagttgaagaaaaaggatccggaaggagaagacgtttggcttataccccagttgagctgcctgtgggagtggagccggagcttcgctaggttttattttccgctgcagttttcttcatggtgaggactaagtgcctcttaagtaagtatatatttgtttagttaatttgatgaatctgtatattaaattgtcagtttgtgtacctcggctgatttcctggacgaggattttatgcacaaataagttcggaaattactagtgaatttccgggcgtgacagctgtcagaccggcggcgacaggagtcggcgacaggcgatctcggcggttcgaccggagttcgatctcggtcagaccgaggttcattaggcggttagaccggcgcaacacctttggtcagaccgtgatccgtcgaattcgagtgtaacttttcttttccgctaaaagttttcggtttttgggtataccaaccattcaaccccctctgggtggcttagttcttgctattcgatcctacaagacattgatgctcgacacatgtttttattttccaaaagttacttttgactcttaatagttagtacattgaaaggtcaccaataaataagaaaaaaaatatcagtcatcgcttaacaagttaacaaagtttggtcaggccgccgctagacttcaacgaagtaattaacagcaatcagcaagtggcctaattgccaacctagatgatgcgacattccagcagcaattaagtggcctcatcctcccagcagtaaggatatgattggagcagtttttgcgaattagtctttttattcaaaacaaattctagaaatggaccactagcaaaacattttgctgaaatgcatcattcaaaatagcacgaagacgtgtatttgggaagttgggaatattaaaataaaatcattgtggtctgtctgtaagattcgttgaaaaagaggcacactaactagtacaaaggattatgcgtgacgagctggattataataagctgacataaaataagctgtgagttgattatattttttattattgaaggtatttaggggtagtgggtctttagtcacccaataatataaagaaatctcctctagaggagattattagattatattaatctgggcttactctattataactacacctatcactaataaatctactctgtttatctactagttatctcttcaacaatccagattataataatgctaatctgagtctagctaactctcagcctcatgtatagatatatctatctcctaactcaacatttccattcggctctcgctccttttcttggcgcttatatttttcttttcacatcaaactagcttctcaagctgtttagctacatagaattttttttcctctgtactctcggattactgattttcagcttggacaagtactgcttttcttgatcttttgctttacatggaggaattatagtttttctccatactatccctaataatcatatctcatcttccaataggagggtattactattgattctgcatctctcttctacccgctccaacaatttgaagctagtaaacttgtcgaaactagatttcggcaataataaaagggggtggctatcaagctggaaaagtgtatgggtttggagacaaaggatttatacaggttcaggccttcttataaaagaagtaataccctactcctgtccggggatgaatccgccgagtgtgttattgattgtatgatttgaagaaaatcaacatctgcccctagaggcacccgaaccccccttatatatgggaaggagtccgtgttacaaaagataatctatatccctaacggaatatacaaatacaggtaaaatacagtcgtaaccgactaagtctcaaggtgtttccttgatgtacaagttaagaaacaaacccgagatacaaataagatattctatatatattcggtatcctatatccagtccaaatatcatcgccatgtagatatgggatatccataatctccacagtagcccccgagacctttgcagtcaaccatcatagccttctcaaagataataatccgagtgcttcaaacttttcatgccaaggcctgccgagtagcgaagacgaagactgtaaagggcgaaaagataaagaatatggtgcatcgaatagatgcacctaattaggtgtagcccccaactatgtgattagttaacaaactaaacatatagttgagaacaaaataatagcataatcatgcatcatatgacaaaagcatatgcggcgcctaaagaggcattctagccgactgctttttagccataacaaaagaaatccgagtggttaacactctaaaaggttcacgaatgaacacacttgacaggcatccgaataaaaactctaaagattacccaccaagtattataaaaattatggtaataaataagtctaatagcctaggccatgactatttaccataatgaaaacaggcatataacataccagggaaacgactatggtaaaaacaagtcattccaagttaacccagacagcttttgtagcctaaaaaagcttacaaaaacagcataacgcctttctgtcgggcaccttttaatttgcattgcaataattccaaagaattatatgaccgcgtaaaaaggattttatcagcatcgggcaacactattgtgcacataaattgccaaagcaaaaaatgcctaagtccctaaggaacacaatgggccacgctgttaaaagtattgggctgaggtactgttcaggcctaggcccatttgcacctccgatacccttaacaagaaatccgagatccaagcgacgcttcgtcttccccgccggaacgctcgccattttccccactccccgctacagtaaagagctgcgccggcgaactagggttcaccaatccacccaaatccaccttcaaaacgtgatcaaaatccttctcgtgatccaccgcctcaattcctcatctctcccaagccatccctcgaatcaaatcagcgcatttgagaaaaatcgatggcggaagagagagaaagcttcgaaagccaatgggcgccgtccgacgtgacggaagagaacctgaaggagatggtggcacacggcgttctccctgtcaaggatatcatcgggtggcggccagcgtgcggtgaggcctttccaacccccgatacacacgaggtcgtggtcttctctcatttcttttatggcggatttgctcttccaacctcaaagttcttccgtgggatactgaatttctatggaatcagcttacatcatttgaatccgaactccatagtccatattgcaaatttcgtccatgtctgcgaagcttttttgggcattagacctcattttgctctgttccgccgaatatttttccttaagcctcaaccgaacaaaaacaaaccatgcgtagttggaggggctggatttcaactgaggggcactctgagccaaaagtatttctccatgcctttcaagacttcgaacaaaggatggcacgccaactggttttatattcaaaatcccgagcccgctcttcctgagtactcctgtcttcccccagtataccaagatacatggaactctctccccatgggagatgaagctgcccaagccttagaactgatggaacgcatgctgaaactcaaagagcaaggcttacagggagagcaaatcactcggcatttcattaagtgccgattagctccaatcaaagaaagatcccgcacagcatttgaatttgacggcaagcatgatccaaaccgtgaagacccagattctctggattttaagatcatgaaggagaggatgtacaagatattctcgaacgctattgtcgtcagctactcacatcaactgccagtcgtaccatacaacgcattcaatccgcctccgcaggtatgcatctgaaatcttcaacccatgagcaaaataatatcttgtcttcatgttgagttaactaaccacggaggcatctcattcaggaatatgtattgatgaaatctgatcccccaattgctcagcgccgatctcctcgccagcacaccattcaaggaagtggggggccgacaatcaggtcagacccacaacctcaaacctccaaaccggctgggcagacaggtcctcgcaagagaaagctggtgcttaatgacgacgagggcgatgacagcaacaaatctggggacaagggctcgcccaacaaactcccaaagcataccatgcccaggaaaaaattggctggccgtcaaatgccaaagattagaacatcttccaggtataaacctctcgataccattttatttcggcatgcttctctcatagaaattatgctaaatatcgaaaggacactttgcaggaaaccgtccgacatagatccaaccggaaaagaccctgatccggctgtgacagagccaaatatatccaaggatgctgagccgactgctgaaagccagctgactgccgaaagccagccgactggcgcccatgcttcggatgacaaggccaatccgagtgaccagccgccgactggaaaccagtcggcgacaactgaaactgcaacaacccgagagcccccaactggaaaccagtcggatgtaggtcctgatcaagaaatccctgaagttgaagcgcaagcgacagcttctcaaggaccagaagctggtaatgactcgatgattgggtctccagataaagagcaaggatcacctcgcactcagccaggcacatcttcaggtaactcatcttctcaagtgatgccgttctgaataactccagcttgttcgtctaatgtcttgggaatacatcaggtccactaggcgacgacgaagaagaaattctccgcataaaggcagctaatgactctcgtcctcctatcttactcaaatggtgggacgagaactctcaagtttccggcattgttataaatcgccaaaaagaagatgaggaagtgtgccagctgaagaaagtacttggagaagccactcgcattgtgaatgtaagtcttctaggtgactgcctttgatgactttgttttctcgttagcaaaactaatccatgaaccaccgtgcagagaatccatcttcgtaatgaagccaagactgcaaccttagaaaagctggttccacacttgggaactcttgaagccgttagggaacagctacacgaggccaaggagcatgccaagaaaacggagaaggaattaagggagcgaattgcacagctccaggactccaacttcgagctgagtggttcatcaaaaggtaatctctagatctgtcccatttgtgctgtcataactggatcctcaaacatttggacttcaaacagcgcaagccaccaggatggctcaaatggagaagcaaatagaagccttgaaaaaaaacaaagcagaactggctgcggaaagggactcagccttgaaggaggttgaaggtactgccaactgacaatttgaactttcctctcttgaatgcagcagattcttattataaatgtgttttgtagaccgtaaaatcaaatctcaagctcagtttgatgtcctggttggtaagatcaagaagcttgaaggagcaagagacgaagtcgccaatgtcgctacaccacttgtccaagctatgttccttaataacagtggtccgagtgcacttgacgcaaccgaaatctttgacaagctgagagttgcaccggatgtatacttcaagaatatcaagaaagctggaagtatgggagctagtatggcattggcgatgaccaaatccttgtacccgaggattgaaattgataccattgatggctttgcagacgggacaagtgaagaagctgctcttgatcttatcagtaatgctcaaagtgcggctgacaagattgcaagtgatgttgtagagcaattccacaacaacgaccttcagccgagcaataataactctgatgatgaaaggactgattctgactgagtataaatgtagcaaatggaggctcaatttgtacaatactggtgtatttatgctgtgcttgatagttctaaccaagtctttgatttcttaaaagcttttatcaagctttgttgagcctaaaacccaaagaagctattaaaaactttcagtcctcgcagactatgtagaaaaaatcaaacaaggcaatgatagaccaagtaagcaaattaaattgataaaaaatcacactccattattatgatgatagcccccgactgacaacggcaagaagaaaacttggtgttgacagtcaaaatagggaaatacaatgataagcttaagcatagaaacggcgaagatgttcaatattccaagagttgtcgacgagagtaccgtcttcgcgcttgagtcgataggaacctggccgggtaacttcagagatgataaacggcccctcccataaaggagataacttgtgccgatctcgtgtagtttgaattttccgcaaaaccaggtcgccgactaaaaaggcacgggatcgaacattgcgattatgataacgccgcaacccttgtaagtatcgagccgaccgaatcaaagtttggtcaggccgccgctagacttcaacgaagtaattaacagcaatcagcaagtggcctaattgccaacctagatgatgcgacattccagcagcaattaagtggcctcatcctcccagcagtaaggatatgattggagcagtttttgcgaattagtctttttattcaaaacaaattctagaaatggaccactagcaaaacattttgctgaaatgcatcattcaaaatagcacgaagacgtgtatttgggaagttgggaatattaaaataaaatcattgtggtctgtctgtaagatacgttgaaaaagaggcacactaactagtacaaaggattatgcgtgacgagctggattataataagctgacataaaataagctgtgagttgattatattttttattattgaaggtatttaggggtagtgggtctttagtcacccaataatataaagaaatctcctctagaggagattattagattatattaatctggcttatctattataataacctatcataataatctacttgtttattacagttactcttaacaatccagattataataatgctaatctgagtctagctaactctcagcctcatgtatagatatatctatctcctaactcaacatttccattcggctctcgctccttttcttggcgcttatatttttcttttcacatcaaactagcttctcaagctgtttagctacatagaattttttttcctctgtactctcggattactgattttcagcttggacaagtactgcttttcttgatcttttgctttacatggaggaattatagtttttctccatactatccctaataatcatatctcatcttccaataggagggtattactattgattctgcatctctcttctacccgctgcaacaatttgaagctagtaaactgttcagtttacaggtccccttgactgttacaggtatgcatcgtttcatcaaatttgtacatatgattttcttatttacctcaagcctcaaggtgtgttatacaacacaattcctagattttctatatgcatatgtccacagaaaagataatactggtcatatgtttgttttttacgtctggttaaacaaacaatcctagaaaaactattattataggcggtcaataattcatttgcacaagtttagctaaccagcatgtagaaattaaataatttgtattggaggattccacaacggtatgtggatatcaatttccagttctattaagaacccacccacggaaatgaattttcaactttttgttaatgtaggcgaaagaaaaacacattttaccaggcaactatacactgtcactggtcgcaaatacgaagtcacagtgatttcttacacgaaatatgcattttatcaaaagtcacaggtcgcaaatcagaagtcactaatacctatttcatattacaaatattttaaaatggaattatcaccaataacaaagttgttgatctcggccagctctttagtttttaatatagggcatatctcccgctgaggctgtttgaaaactttttttaaaaaaacatttttagagttgtttctatttctagacacggtttgttaggttagccgtcagcactaatcatttattccgttagtttttcagaggttctcccgtggaaacaagttgctttaaaatattaaataaatctatttttcaagtttcatataattaaaacttacttaatccagtgctaatgattttctcgtttttgttcgcacttctctccggatcaaacgtagctaatagtgtagacagttagttacagggtctgcctgtcaaaaccgttactcattatttgaaaatgccaaaactttgaaaattgatagaaatttgattttaagtccagtattagtgaatcaaagttctagctctcaacaagatctatctctttgagactgtatagagtccaaatattcgttataagctcttagatctatatttggaaacaaatttatgaattttttgaatgcccttaaatggagatgtgttctgtaatatgtattgaatttgtaaagctcgatgagattctacaactttataactttactggtgataattttttatttgatgtcatttatcctcccaaatatgctaaatgacatgaggtaaggttatgagaggtaatcctctttaccgcccatgtgcatgcttcacgtgaaaaattgcgtgactcgttgttttgtgaaatgtgaattattttattggtttttttttcatacaacatttaaaaactagaaatacatttttctcacgtgactggaatttatctgtacaaaatcgttgatttctacttgtcttagtcataggcggttggctaaacgcctgtaggaataatgggttaccgtcttaccgacctcctatacaatttttttatgtaccaatcattatttcgactattcttcctgaactggagctaggttatactaaaatgataatttatttaacagaaaatagtagtcactataaattgatatgttccaagttgataaaactacattcatttttgttttttattaaattatactccttgtatcccaaataaggtttaaccactttttacttatgtctcatcatataagacaggcaggcatgcatacattaattatcacctcttagttctttaaatttggtttactttaaattctccaccattaaacccccaatcacattgtttgcatgtatggatgtgatccaatcaaggaggtgattaaattctttcttgttctttgtggtagtagtggttgagccttatacttttagatggagagaataaatatatactataggcaccattagtttttttttgtctgtactatgttccacatttttctgtaactctatggaccgaatcgtcttcacgcttgagtcgatatgaacccggccgagtaacttcagagatgatgaaaggtccctcccataagggagataacttatgtcgaccccgtgtagtttaaatcttcctcaagaccatatctccgactagaaatgcacgtgatatgacattgcgattatgataacgactgaattaatgttgcctcacgagcttcttccaattggttgagatcatccactcggtcttcctcgtagcgttcctctttaacattgcgaaatctcatggactcaaactccacttcgcttggcaacattgcttctactccgtaaactaagaaaaacggcgactagcccgtagcccgactgggcgtagtgcgcaaagaccaaagtactgacggcagctgctcaacccatttgccagcatagggacgcagtcggttaaaaaaccgtgccttgatgccttgaagtaccacaccattggcgtgttcaacttgaccattgctcataggatgcgctacagaagcataacatatcttgatactaaagtcttcacaaaaatctttaaaaactccaccagtgaattgggtaccattatctgtaatgattcgattcggcaccccaaaccgatgcacaatgttgataaagaagtctcgagctttgttggctgtaatagttacaactggtttggcttcaatccatttggagaacttatcaacagccacaaaaagttgattaaatcctccggtagcccttttgaaaggaccaaccatgtcaagcccccaaaccgcaaatggccaggaaagagggatggtttgcaactcttggtccggcaaatgaatttgcctagcaaaaaattgacaactttcacacgttcgcacaaccttctcggcatcagacaccgctgtaggccagaaaaaaccctgtcgatatgctttgccgactatcgttcgtgctgccgcatgatttccacaaatgacagaatgaatatcttacaacaattgcctaccttcttctagagaaatatagcaatgtaggattccagatggactctttttgtataaatcggcctcaatcatgacataaagcttgttgtgtcgagaaatccgctcggcttcattcttgtcttgaggcaactcttgctgagttagaaatttgatgattggctctctccagtcggcatcaattactcctacttcattagcctctccatctccgactttatcctttcttgatactgtcagctcatagagatgctcgacaaaaatatcagaaggagctgcttctcgttttgacccaaaattagctaatctatcggctgcttcattgttgtgtctaagcacatgagttaactctcgaccatcaaatttatcttccaatttgcggacttcttgtcgatatgcaaccatattgtcgtcgagacaggaccaatctttcatgacttgattgacaaccaactatgaatcaccacgaaccactagatgtcagatccctagggatacaacaatcttcagcacatggagtaacgtctcatactctgccacattgtgggatgcagaaaagtgtatccacagcacgtagcttaacctttctccagtcggaaaaatcaaaacgacccctgctccggtgcccgatagtctctttgacccgtcaaaatgcatagtccaatactccaatttctccacaggtgtgtcttcttgacactcggtccactcggcaacaaaatctgctagtgcttgagatttgattgaagttcgcagcttgaaagataaatccaaagacatcaactccaaggcccacttcgcaatacgtccagttgcctctcgattatgaagtatgtcaccaagtggaaaagatgtgagcaccgtgatcgagtgactctgaaaataatgggataatttcctgacggtaattaagacaccatataataatttatgtacctggggatatcttattttggagtcggccaagacctcgctaacgaagtaaattggtcgttgaactttttgaacatggccgtcctcttctcgcttgacaaccaaaaccgtgcttaccacttgcgatgttgctgacacataaaacaacaatggctcttgcgggtgtggtgacgctaggattggtggagttgagagaaatcttttgaaatcattgaaggcttgctgagcttcgggtccccattgtaaattgtcagtcttcttgagcagtttgaagaagggcatccctcgctcgtcaagtcttgaaataaaccgactgagcgccgccatgcatccagttagcttctgaacgtctttctaggaactaggcggtttcatgttgaggatggcattgattttctccgggttggcttgtatgcccctatgggacatcataaagccaagcagcttccctgacggtactccgaaggtacacttttcagggttcaacttcatcctgaaagcacggatgctagcaaaggtttcctccaaatcagcaattaagtcatccttctgcttggtcttgatgactacatcatcaactacatcatctgagttgaaaaacatctctggattatgtgttgataagttgctctagcattcttcaatcaaaacggcatggtaatgtagcagtaagctccaaatggtgtgatgaatgaggtcttcgagcagttggattccttcaacctgatctggcggtatcccgagtagcaatccaaaaatctgagtaactcgcagccggttgttgagtcaactacctggtcaatgcgaggtaacccaaaagaatctgtaggatatgatttgttgagatctgtatagtcaacacacatgcactattgttctattttcttccgaactaagactgggtttgccagccattcgggatgtaagacttctttgatgaagcctgccgctaacagcttggttaattcttccttgattgcatccttcctatcctgagcgaatcggcggagtcgttgcttaataggtttagcatcgtctttgacatttaaagagtgctcaatcacctctctaggaatactaggcatatcagatggtttccacgcaaaaatatctttattagcttaaaaaaaggtgatgagcgcgctttcctatttacaatctaactcggcgcttattacagcaattttagatggattagatggatcaagggggatctttttggtcttggcatcgccttctccggaaaagcttgaaggttcatcactgacagatagcaagagattgctacaatcgacaggtcgacaactagaagtaggcatctcttgatcacctgaaggcaactggtgagagatcgctacaaccgctggtcgacaactagtagtaggcatccctcgatcacataaaaacaaccgaaaggtggcgagagatcgctacaatcggctggtcgtcaatcaggagtaggcatctgtcgatcacttgaaggcaactgataggtggcaagagatccctacaatcggctagttgacaaccatgagtaggcatctctcgaccacctgaaagggtgctagtgttggctattatatgtgcatctcatgtagccagcatgactcacatacccaacttatagcatacccggatgtccgttcgcaatcatgtcaggtgatcaagccgacaacgtttgcgaggaattatccgttaacaacctattctcaaatagtgcagccgtggcctgcactatacgtgagataagtcgttaatctttgctggtaggattggtccgacaactccgcatttgtcgagaatgttctcgataatgagttgtactcgaccacaacctactctagtgctcaattgtttctgaaaaatattttctataagaaaagacatatatggcagagaatatcgagtacgtactaaaaaaaactgcatgaatcttctagtattatcaggatataactggcagattcagattaaatatcgcgtactatgtaaacgtaaacaagcatgacttataacatgaacatagcgagcccccaatattagaccatagttagtctagtataggaaacactcgcacaatagatatcgtataaaaaacatgctctaggtaaacagaataagttatggatctgacaatatcgcatcgaactgaaaaataggtacattaaattgtttataaaatattacgtacctttgtagataattgccatatgtatctacgaaattagtagattaatttaaaaaatcaatctaccaattaccttgatgcgtaatcgttcgacatcatatatatttgaaatcttctggtacggtgcgtgcctaggacctttggatgatctcgatagatcaaatggttggcgatgacgattccgagctagttggggggcgtactctggccgggtcagatctcccaaggtgaaagtcgttgaagtatccctcgttgaaaaatccacggtggcaatgacttgatgaagctttaggtgacgagggtcctgatacgtcatagaacacacttcgttcgggtcgtatacccctacagccaaagtcgtcgagtaatttattgtcggagaatccatctcttgaacctatctcgccgaaaccttgaagcaccaaaatcccctacctggcgcgccactgtcgatgttgtagatcacgactacggtatttgcatagtatggggatcgttggtgccagattgtgcgcgagattgaggtaaaagatacgaagacaaggatttttatacaggtccgggccccttaactaacaggtaatagccctacttctgttggttgaagccagtgttgctcttatccatcagagtcacacaagtataatatttgggatagcctatccagttgtcgtcaactcggcggcatgaaccaacactcttagtcgacgacagggtagtcttcctcctcgaatatggacttggcgagattagagatagtgcta

SEQ ID NO: 15454 - DNA, 3072 bp, Oryza sativa
aacactgtagttttgtacgaagttattttcatgttttttcaacctgctaaggctacttcattgatacttatgtaagggaaatcttattttctttatagtttatagaaagatacttttctggagcagaactgcaatgcactgcaaactcattgtttaggaatctgagtatacatatgttgcccagagtgacttaccttggaacatgttatatctgcaggtgtgcataattaaaaatggcacaaattttgggtggtctagtcaacattgttgtaacaccgatctataatgctatattcaaacatgcattgtatccattcaaagttaccagaaatgtggagaatctcgagaaggctacaaagaaattgattgctaaacgtgatgatgttgagaacaagattagtaacgatgagagaagcggcatgagaataaaaagtgaagcaagaagatggttggaggacgtcaataccaccatatctgaagaagcggatattaatcagaaatatgaaagcaggggaatgactttcggcggatgctccatgaattgctggtcaaactacaaaatcagcaagcgtgcatcgcagaagctccttgaagtgaaggagcattatatagctgatatgagtgtcgttggagatcaaccatcgccagaacctgttcaaaagatccctattccctgtgatcatgtaatggacaatgataacaatcttcgtgaagctctggactatatcaagaacgatccagttgggataattgggatatggggtgtaggtggagttggcaagacccatctcctgaacaagatcaacaattcatttcttggggactcttcctttcattctatcatctatgttattgcctctaaagagtgttctgtgcagaagatccaagctgagattgtcaagaaacttaacctacggaaagatgacgatgtaaaattccaagcccacatcatttctgaatttctcgacggaaaaaattttctgttattgttggatgacctctgggagaggattgatcttctggaagttggcataccaacactaggaattgaaaacaacctcaagaggaaggtggtcctcacaacaagatcacaggatgtatgtggtcaaatggaggtgaggaaacagataaaagttgcttgtttacgagatgaggaagcatggaaactatttctggagaaggtcgatgaagaaactctcccttccagttctctaattgaacttgcaaaacaagtagtgaaggaactcaagggcttgccattggctcttgtaactgtcggaagggcaatgtacgccaaaagggacccggtgctatgggagcataccattgattacatgaaaggggcatgtcgtgataaggacggtcccctctctatggaaactgttttcaggcaacttaagttcagttatgatagtttacggaatgacaccctgaaacgttgtttcttgacttgtgcattgtggccagaggatgtgttcatagctacagatgaactcgaccaatgttggatgggcttaggtctggtggacaaggatgatatacaaagttcctacagagaagcatgtaacgtaagaagtgaacttcaatctgcctgtttgttggagagctggcatacttctcgtgtaatcacaatgcatgatgtggttcgtgacatggctctatggatctgttgcggttgcagtgaaaagaacgacaactgggttgtccatgcacaagttggcaaaaatttatcaagaagaaccatcccatggagcaaagctgaatgcgtctccttgatgtggaatcgcattgaagaattgcctcccatggattcaaattattttcccgcaaaactcaggacattatgtcttcaaggcaatcgtttggatggaaggatagttgaaactcttaagaatttcactgcactcacatatctggatttatgctcgaattccctcactaacataccaggggagatatgtgccttggccaatttggagtatctcgatttgggatataattcaggaatatgcgaagtccccacctgctttagagaactcagtaagctcaaattcttgtatctgtcatgcactaacgtatggagaattccagaggatgtcatatctagccttaaagcactgcaggtcatagacttgacgccaaaacccaaaccttggaatcggtacggtaacagagaaaaccacgcggatcatatgccttcagtagtactaatccaagagttaaccaaactaagtaagttaaaagcagttggcattactgttgaaagtgtttctagttatgaagcacttaaggaatatcctaacctacctattaggagacttgttctaaatatagaggaacgagagtcagtgttctatctactgactggtcctttgtcagatcacttggctcaaatgaccttacataagttggaaatttatcgcagcagcatggaggaaataataatagagagacacgagagtggtggccatttggaacaaaactatagttttgacgctctgaatcagctggacttacaatttttggaaaacctgaaagttattacgtggaaaggaatacgtccggaattgcttttccataggctcaccgttctgtataccattgactgcgaccagctggaagatatctcgtgggcgctgcatttaccttttctggaagaactatgggtgcaaggttgtggcaagatgagacatgccattcggaacatatcaaagcaagagagctcaatgcaatcgattgatacattcccgcgcctcgtttctatgctatttgcaaataacgatgggttggtcagcatatgtgattcagatgtgacattcccatccctaaagagcctgagggtcacaaattgtgaaaatcttaagaggcttccttttcggcggcagcagagcttgccacccaagttgcaggttatatactccgatagtgttgaatggtgggataatcttgaatgggaagaagaaggtatcagaccaatgctggagccccttcttaaaatcgtgtcataatgattacgctgagcagtcctgtgatgtgtttcatccatggttagtatctccccccgtctctctc

SEQ ID NO: 15455 - DNA, 814 bp, Oryza sativa
cctcgtgcccccgcccggtgtcgtcgtcggatggcgtgtacgaggaaggcgaggccagcgggcagggcgaggcggcggcccggtggtgtgcgaggtggtgctggccagacacgcggccttggcccaatggccggtggcgtgagactgtggagctggtgcgcgaggagcaagtcggcggtggtgaccgggtcatcaggtggctggctgccattggtgacctcagtggctttcggcagcacgcaggaagcggtttggcagtgaagagttcatcctctgtattgccagcttgacctgcggggtggtagactgagcttgggtgttgaagggatggcatggtggtccggcgatggtcgttgtgcaggatagttgtgtggggttttgatgggaaaccgctggcgaaagccttgccaggccatgggccagcatgacgacggcgacgccatttggcgccgttcccctccttggaggtgtcgtcctggcgttgacccctcataacaccaagaaccctctgcgcgcaatggtagccttggtggactcctgcaatgtccccgaagctcttcaggtctagggtgtttgacgaggcctcacttccttggcttcgttccttgctacagcgggtgttcatcactcttatctggttactgtggggtagtgtcggagctgctttgctggggacgaagcttggcaacgatgacacactgcaatctctttataggattgctgatgctagctgtgtgtaggagtggttccttggtagcttgggctgatgtccttcgtgggtgtcgttcttgtttgttcattttggcgttaggat

SEQ ID NO: 15456 - DNA, 1269 bp, Oryza sativa
tgttccgcctgtgtagccaaccttcgtactggataaccatgggtgtaagtctactcttcttttacgatacaatcgtcgtaaatcatgatttattactgcagcctaaccttacgcttcctcaaaccatctggtgaaaccatcttcttgcagctgattgttgcggtaggaatgggcccggtgctggctttgagatacttcaggaacatgtttcgacctaatgccatcaacatacttcagcaaatcgagcaatccaatggacatacccataccaccagaaatatggagtcacggatcatatctgctggcagttatctcacccatttactagccgattcgcgtcgcaacaggggcgctacctatcagcctcttctttcagattctgtagcatctgacggatgatctgctgcacctatcagcatcagaccttggcagcttgcgttaactgtatctcttaccagtgcaatatgctagcatgcacacccatagtctctaacagcaataggatttactgatcacacaaaattctgagagtcaaagcacagaagaaagtttcgcaggttcattgcaaaaatgctgcaatgcctggaattcaggaaaaaaaatacatgtgttccaaattatcccagatgtatagttttgctgttaaaacagaagtatatatggctgttttggtttgatggcaattattgccctaccaattatttggtacttcgttcgtcccaaaatataaagcttctagtattcagaatttgtcctaaaatataacaacttctccatttacattctcttattaaccaataacaatctcgcaccatttaacttcacctagtttcttcctcaaccaattataacattatcctatttaattccatctactttcttaatacccgtgttcaagtttaaacttcttacaccaaaactatacaccaaatggttactagataaccatttggatcggatctaagttcgccaattctacagggttggggcaaatcaacccaagaaaacagctactgtgtcgaagcatgtccaaaatttggtgctactaaccttattccttgcattgcataccacattgtcaaaaaaaaaaaaaaacagagagaaaccaacatcatctgttatccaaattgtccaaattcatgtgttccaaattgtcccagttgttttttaagcgtactctattaatacaacatcagaattgtaaaaaaaaaaaaggaactaaaagccagccaaacgaaccaatccgaggcgtcttcgcgggatatgctc

SEQ ID NO: 15457 - DNA, 1744 bp, Oryza sativa
aacatggaactctatgatttcaggttatgttcaaaatgatcagtcttcagaagctctaaaactgtttgcggtcatgtgccgattgtctattgaatgcagtgcttcaacgtttcctgctctactgcatgcatgtgccacaattggtaccatcgagcaaggcaaaatggttcatgctctcctatgcaagactccatttgagtccaatggctatgttgggacagctctagttgatatgtattcaaaatgcggctgtgtgagcgatgcacgggctgcatttagttgcattatgtcacccaatgttgcttcttggacatcactcatcaatgggcttgcacaaaacggccattggatggaagctatagtacaatttgcaaggatgctgaagaacaatgttaaacccaatgagatcacctttttgggcatcctgatggctagtgctcgcgctggtttggttaacaaggggatgagatttttccactctatggaaagctatggagtagttccaactgtggagcattatacgtgtgcagttgatcttcttggtcgagctagacgtgtaagggaagcggagaagttcatctccaaaatgcctataccagcagatggtgtggtgtggggagcccttcttactgcctgttggtacacaatggacttggagatgggtgagaaagttgctgaaaagctgttctacatgggcacgaagcacatatctgcctatgtcgctatgtcaaacatctatgctaagctggggaaatgggaagatgttgtgaaggtaagaacaaggttgaggagtatcaatgcaaaaaaggagccagggtgtagttggattgaggtgaaggatatggttcatgtattccttgtggaagataggaatcatccagagagagaagagatctatctaatgctagaagatttagtttctaatatatcttactctgaaactgatgatgaaacacatggttattatctcgagcctgcatcattagacctccttacttcccagaaaaggctagctaaccaatagtcaataggcaagttgaatggaattaacatttatgtacatatttcattttgcaaggtattctgtacagatgtaacatctcttttggcacaacaattgttagctcattgaatggggcaatcttggaagaaagaacgtattttcgttgtttttttttcatattttcgttgtttcgttgtttttttttcatatttagacatatttcaccctaaacggttcacttgaaacgtttatgtgccagaatccacagtcatctcaatcgtttttaatgtcttgggatagaaatgattcatctttttagtggtttgtgcacaaagaacaaaatgaaattgttttcacacctaataggtgtagaagaatatccatatatggtatatgatggtgcaaacatgtgtcgttgaattattttgtagcttttttcttcaattcggacgatatgcaaaaagacaagtgttgtccagacttgaatttatatttgttttcggattctaccgatatagtttagctatgcatatttatagaatgatctaatatatattgatatttttttatcatacttctttgctatttagatgtgttaacgaccaaatttggtaaattatgcattggatttggggttaaggctgaagcagatttggaaggaaatcaataacagagacagagcaaaaatcggcttcgggactgcatcggctacggtgtgcatcggcagataccgaatcggac

SEQ ID NO: 15458 - DNA, 6342 bp, Oryza sativa
atagattttttttttaaaaaagaaaacattgtaggggaatcccccacagtaaatgaatttatataaagatcaaaagaataaatttacaataggcttaaccaatccgaaagaaaattcctatctcctagaggtaatctataaataaggatataaaggtccttcttaaagaaacccctccaagaagaaacagatggaatcacaccatcaaagataagcccatttctctgattccaaatatttcaaaccacatagagaattttttcaacaaagtgccaagaccgataagtttgttttgcttaaagcaacatttgctcaaaagcaagagatacatcccagactattccaaattgagcccaacactgagagctgaaaggacattggaagaaacgatgcatgaaggtttctctaattccataagaacacaaaacacaagttaaatcactgttcacaggtgcacaatgctttctatctagcatatctcgggtatttaatctgtcaattagaagcagccatcgaaaaaccttaactttcatagtgcatttacttttccagatccaattcagataaccaggagcttgaatatacataaaatggattgcatatacttttcaagaagagaaagaagagttttcccaaacataactccgtaagtctctatcatctgaaagttgacacaaaggatcattagctgacattaccaaatattcctgaaaagcctgttctgacgttggaagcatgaagagttgtgacagccccttagtagaactcataaaaacagattcctttgtatttttagcgaaagagtaagctcttggataaatgactgatctaatcttgttgttccacagatcatcccagaataagcaggattttccatcacccactttacatgaagaaatccctctaaaaatgtctgcaaactacatcacatccctccaccaaaaagagcctctctgggaaacgtcatgaggtactttatcaatatagtaagaaaaccaaaccagcttaacccatggaacagggtgcttattatagaatttatgcagatttttcattaacaaagcattgttctgaagcctgagatcaattacccctaacctcctcttttctttggctgacaaaccgtctctcaaagtaccaaagaatttttagtagagtttatatgagagcctctccataagcaatgccttctagctcccatgaaattccatgtatgtacataaaattttatgggttgactgtgatatatttcttatatagaaaagtataggcatacgaatcttaatttgtttgtttagttataaatagagcaatagttatattagaaatcaaatgtgtagcatgtagcttaatcatttcaaaattataattattaattatttctcttttcgctggatagctaaataatatgaatggggagaggaatgaagagcgccagttcaagctagtgggaggagcagacagtgatacgcatgtgaggggacggggagggggagatgaagaatccttattttctttgagatatatgtattgggttcataggtggaggcgaaagtagatggaattgtttgcaaatgaatgtggtgttcaataattgttaatactatttggtgagaaaaggcataatacggtttaagtgtgataaattgttaattaaaatattgttaatatgtgatgtaataattttttcttttattatagataagatagatgtgctatgttttaaataaccatattgatcgtttgtttttctcgatgataggtgcctatgtacgtacgtgccctctttttttttatctactgtgtgtttgcttttttcttttttgcattttcttctcctgggatatgtacgtacataagtttttcttccttttttctggtgaatgtgtacatatttaattatactagcataatacacgtgcgttgcaacggattctaaataatattcattgacataaattaaaatccaaaaccatatattatagttgggcataaatgatgaaggaaatataaacgtataaataacaacatcaaactacaaataactttgttgggaatgataattcaatattaggaaaattatatgacttaatcctattttcaaatttagctataaataatttaatatagagaaaactataagttacaataatttttagtggatcaaatagtgctaaatctaataatgtaaatgaaaaaacaacttaaattagttagaaattgaaaaaaacttcttttagcccacgtatgaaaatctgattcattaattctgaacgggtgcttgtttcattgatataaattagaatttttcatgttctattcatactccatttgtcttaatattatgtgagtagtctaggatcatggttggatagactaagaaagaataatgcccaacataagctgttcattgttttccctagctcaaggcgagaaacaaaagaggagggaagatgggtgtcggtgctccggcgaccaaacgatggtaaggaaagtggtaggatgtatcccacgatgtgactcgttcataaacggtggaggttggcaatgaagaaaccagaacaagagggatgcaggggggcaaagagggagaaacgacaacgacgagctctagtggtgaacacaactggatgagtgtgtcaaaactagttcccggacgagaggattctgttttccttgaacacgcaggagaaaccaagtaatattatttatcgtcttccctaaccaacacaataaacaaaagagaagagaagaagggcaacggtgctccaacgaccaaacggcggtgagtatggtggtcgagtgtgttccacaatatgactcatccaaagatagtggtggttggcaacgaagaaaaccagaacaatgggcatgaggtagtcaacaacatggtcccgatagagagaaacaacaacggtgatctcttgtggtgaacatgactgagtgagtatgtcaaaacatgtttccaaacgaggaggttccgtttttcttgaatgcgcaagagagagggaatgaaggggatgttggtgatccttaaatgataatatttgaccgtcaatacctgcagataatgaaataaaatgtggtatccaactagtggtagggattattactaatcaattccactagtgttggtgaaatatgtgtatgcaggtattttaaggagaaaacacacccggcatacaaggaaacacacctctggccaatcagacacaagcacacggattggagggcccacaagtcaggtgaaactgccatggaacaagacataactgccataaccaccatcagggcccaccaatcagtgaccccgccaaaggagaggccaggaggtggggcccacggttcggccgaaccaccacaaactcccctcatcctggccttccacgtgtacattcctgacgaagtcccaatgatggttgagggcattttggacatttcccatagctataaccgttatatagaggctataaatagagctcctctccctcacttcaagacacacaactttgagctgaattacaagaggctctattgtatcttttgtacattagaaatagatggagagtgaggggaagctccgggggagtacccaaatacccatgcattgcaacggattactgagatagtaaaattaagtccttgttgaacaaatatatttttaattggttgaaacaagacctttcatcctaaaaacaaacaatatgccatgcctagaaaattaaagagctgagtctacaaagtacaaattcacccaaatcctaatatcattgcccacatgtcaatcatgtggcggggggcaaactcaccaacagcactactatcttttaataagtgctataaatatgatttctaatgtattggatttactatctcaattggcaaatagttggcagggaaactattcatctttcaattttggacacctatcagtttcgcataataaattataaatacttaaaaagtggccacattatcaaagtatgttgcatcctagatataagaatcaaactatcattcatcataaagtaaccattcaaaaaatattgagggtccaagaaaaataataaaagtcaatagtgccaaatatgtgtaacatgagggaggtagtactagttgtctgtcctagcactgctctaccaccggccttcttgaaccatgatctttagagctaataaaaaatgactgacatttgacacaacacatataatcataaatgtaattaataaaaagaagatatttcaacaatggcaaatttccaccagcagctgcactatgaatagctctagaatcacacgacatgtctgtcacctcagtttttgatagtaagccctcttatccactgaaacagcaacctttgcaaagtgaccaccaatagaatcactaatccaatatacatacctgtaaaagagggaaggctgcacatgtaggcattattaaggagctcatttactagggatgggtctgcaaacaaaggataaaatttagtctgcaaatatacccgttgtaatctaagtactgaagataagcaatttcaggtttaatcaaacttacagcagtttcataacccattattttaaccaaccatttcagcgtaagagaatttttcaaaaaaatttgacatcttcctgaaattgatagacattcctcgtatcccacatcttactatttgttgtgttccactgaatttagaatgataataataaggctaaaatggtcttttcatttgaaaattttctcctgattctcgtttggatttgagacttcgttcgaacaaaattttgaaacgtaacaagcaccttgtcgagttccttgggattctcccacttgtgtccctcggcgagcaccttcttgaaaatgtcgccgtacttgcagatgtccttgacactagcctaggaaagcagctcgacgtcaaaccgcagcatggcgttgggcgggatcgccggcggcgggccgacctcaccgaaggccagctccgttttcggaggaattggcggcttgcttgccgacgacggagatggcttttctgctgacattgttgtcacttgccgtttcccactgggcatgccaaaagcgtgttgatgcgaaaaacacacactggcctggaagatctgcttaacttcaatgcaggtccaaaatcttgcctttaggttcgtgagcgtgccagttgatttgatcctgcaatcaacaagaaataaagacaaaagaaacctcgggtaaattcataaacgatagctgatcggccagtcgtcgatgacatatcatttatcttcaagccgatgtcatatgtgaatcgatcggcagctataaataagcaagataagactaaatctactcgatcggctgtagatattaacgctatataatccttctgtcgatgtatatttaaaccaagtgattgggatagatcagacgccatgccgagacagtataaatcacttagattgaaatatatattaacataaagattataaacacttatagcatagccgatcagatatatctaacatgtatcggctagtactccgataccactctgcgttaagatattaaaacagaaaatatatcaaacagaagcctaatatactttattacgataagatcttaatataaagggcagatttagcatatcaatcaaacatataagacatgaagctaaatcaggtaagatcggctgaaaccctgatactaactctctcgatgatcataaaacaagccagatatcataattataaataccacttaatagatcgaactcaatcgatgtagcattaagcataaagacaagtatgagatctaagcaagatgatgaaaatctataagagatggtagatacatgatacaatctagattaataacaaaaacataattctaccgattgtttcctaacgataagaaccagtcaataacaagttatatagcgtaactagcatagattgcaacatgtatatgataactcgacggattacataaaccaggttaaagtaccataaagatggaagcattaaccctgagaacgcaagccgccataacaagttttacctctagttgaagatcgaatcgatgcagctcaacccgaaagcaagaactcgtcaaaataaacgaaagtaaaaagggtggctatgcgccaagattgtattgaacgattattaattgatttcttgggttctggtcatatttatacccaagatacaaaatatgtccttgccggacacgacacttaactctaacaaactctaagataccataagtctttgcggcagatttttgcccaaacatatctctaaggaaattacatgaaatatcctaattaatagatacaattgccttatccgaaagctt

SEQ ID NO: 15459 - DNA, 5629 bp, Oryza sativa
agatccggtcgcctgtcaccaacgcatgccgccgaatctgcaaaggaggggaggagagccgccggatcgtcacggggagggaagggagggagtgcgcgccgccgcgcgtcgccggatcagccgccccctcccccggatctgcaaggggaataaggggagggggcgggcaccgccggatccgccgcctccaagcccccctccgccggatctgctaggggaaggaggggagggggcgtgcaccgccaccgctgtcgcccgtggcggccaccgccgcctgctctcctcccgccgccgtgcgccgtgctgtcgctgtggaggggagagagaggcagggagagagaggagaggagaggagaggagtagagtgggagagtggttggtggagcgggcggtgggaggtgggttaaatggtgggcccgtgcggggtgtgcggttggcttaggacgcccgcacgggaaaatcaattttcccgtgcgggcgacaccccaccgccagttctctatttttctatgcggttccacttacgaaccacatggaaacaaaaaggggggcgtccaggaaaatcaatcgtttagtagtggttaattagcctttattgggaagtaaggaagtctaatgatgcaggctcgagacaataaccatgtgtttcttcatcaggttcagaatacaaagatatattagaaactaaatcttctagcattaggtacatctcttctctctctggatgattcctatcttccacaaggaaaggaatacatgaacaatatccttcacctcaatccaactacaccctggctccttttttgcattgatactcaatcttgttcttgtttacacttaaatttggcacctgtggacgaaataggggaaaattgccaaagtttgaaaagtgacggatttccttcatagggacggtcagaccacaggtgtgtgggcggtttgaccggctaatagggccggtctgaccgcaggtatgtgggcagtcagaccgtcagggtccgagtccgagtctgttttcgtcgggtctcggatttccttactcgggaaggcatgtttcgtgtttcctttagtttctatctcgagttggacgtggagaagggcctgtagagggtaagaccaacccctatttaagggacaaggcaggtttattgtaaaacccccgaatacaatctacttgaatcgttcttttactatgttttctattttaccctagttttagtccatctttgtcggtttgtgccgtaaaccgtccgccgccgctgcgagagtgtgacacctctttgtaggtttgtcctgaaaaccttccgttttacccacgagacgggtaattatcctcatatcgatctaaatcagcatagaggctgattttgatctctaaatcggctccgctagccggtttatcttttctttttacaaaacccatcttgatttggccctttggcttgatcgaggtggttggcgactccatatcaccgcaaggcgtttaggtgttgcgatcgtacttgtcgacttgtcaaaaaagttgccaacacaatttttggcgactccactagggaacgatctaatcggcatatcagggccgaatttcgtttaatctaataattactgttcatcaaatcaggagtttcggctaaatagctgaaatcaatctacactgtaattgctatcgctacgcactggttcttttcgccgaattaatccgttcggcggcgaagttaattatctggtcgtcactgaatccatctgaatacttgccgtccagcacgccgcgtataccgaggatcatcgtcaggaggcagaagccggctcgacggcctcgtttctttgtgtttcatacggcaacagagaaaagatcaggctactagagccgatctaccgagcaacagcagcaagaacattgtttccttttattgctacacactgttaccgagaagaaataggaaacagagcagccgatcttatttcagatcggttaattttgtatagtttgctacagtaccgaagttactgttacgtccagaaaaatcaacaaaggctagttttaataaaattggctaaacacaataacatatcaagaccgtatattaatctattcggtcagcgatttcggctatgatctgtatgaccagatttaatcaagaaatttcttcattaactataacgagcgggaacgagctcaacaatgttactacacaatacattaggaccgatcaaggcgtcgtgaaaggaaacgtcccgctacctcaagttgtagtttcaccgaaggtaacctccgattcatccaacccatactttgctattcaaaaggttaatgatcattatgtagatgcatatgctatttctagttttgctcctatacaatatgcttataatgctatgggggggcgtcaatgggtgattatacagccgattacacaggaatcggctatatgcaaaacctagctaacggtatgaccggtcatgacactggtctaaccgcatcctatgccgttcagaccgtacctaccatagccggtcagaccgtccatagccggtcagaccgtgccctatttagccagatcggacctcctgtggccggtctgaccgcaccactgatcaccggtcagacagggccatgggccggtcagaccggtttcctgggagtttctccaggtttttataccacgactagcagtactgattttaattattattcatcacctgttaatactgttagtcatactattccacgtatccctaatgcctacaatgatattaataggggatatcctcccgatactaggtatggccaatataacaatattgtgccgcaacaaccaccttttaggccaccaagtccaccaccagatccaccaaagcctgaaactgcggaggattggtttagaaatactatcagagagaatttcgcaaagctaaggaatcgtgctagggagtaccaaaagccgtatcctgatttttatgatattaggcagcatatcctgtgcacacgggagtaaagctgcactcgtgtacacatgcgtccggatccgttcgatcgacatcctacggccaagtctcctagcgtggcaattttacgaatacacgcccgcctcctccacttctgttttgcataacagcccatctggtaccgcctcttcagctgatctcgttaatcacggcgctgatatgctacgcctcttcagctcctcttgtggttccatgcgcggcgcgccgccggcaaaatatttcatcgagacgaaggggatcgttgttttactctcagatgtcttctgttcatccgaatctggtgactacttcgaatcattctacaccatcaagagacgaatcattctactacttcgaacctgatgctacggtatttttagtttctctcattcatatcgtcatatacaggctagttagggatagctggtgctggcgtgcggctgctccaaattgcatacatcaagagacaagattagattgcactaattttcgttcagactagctacagatttccataacctgacaagtacactgtattgttgttacttctccgcttcccttacacgtctagctcgaccaacaagatcaaccgcacacatataatgctccacagtttgaactactccatagctttccactagtgaacgtgcacgtgcaaggcacgttttcgtaatatatattattgctgatcatatatatactgatacattattaaagaatcgtcatagacactggtaaaaataaaattattacattggtcattcatgaaataaacctaatttgttattttattacatagcaatggaatggaaaaaatgtacaggacaaaaatgtgaaccgattccatcacacatccaatcaataccattcaaaatcatagctagtcagttagtggccaagttcagtttgtggaagtccacatataaagattcaaagtgtagacctagaaggtgtattaatcagtgaccaactgctatagttacatcacaatatatcccagaaaggtactgtaaattataggacaacaagagattatatgaactgatgcaaacatattgctgcagaaacctcagctccctgtcggcatttccttagacaacaagagattatatgaacagtaaattgtaggcatttccttttttttttcctggggttgccatcatctccttgtctatggtgctttactttttgcaaaacctcagctcctcaagtgcacctgaaattgagaaaacatgtaatgttatactgtatcaagatgcaatgcagtagataaaatttagggacatctctcttatacagtcaaataaaatttaactggacaataaatctctaggatgtaccaggcgctagttgaagacccaaagttcatgacatagccgaaaaaatatactgtaacatgcagagataaagatatattaagaagatgataaatcccaatgctttcatggtagttttgcagtaagtatatatatagatacatacatattacagattgtgaagtatcccacctccacaagggtcatttacagtaagtttaataatcgtcagttataccatgttccatagtccataatataattgagttgtcaaactaatacataatatatactgtagatatgaccatgcatattaatgatagaaagcaaatagtctgaaacactaataaaggtcttcagataagttgaaatgatagcatgctagcatattgctggttaaaaatggctaggaatagagagcacaataaacatatcccaccatgatcaagcaccaacttcaatcagatcggtcaaccttgttttttcattattttacctcttgtgaaactctaggcactctgcgcacagcacgggcgcaggtggcggaggggcacagggctgccggcggcggcgcacggcgggctgggcgcaggtggcggcggggcaaggcacaggcgcaggcgacggctggtggcacaggagcggatttctttccctctcgttcccttcttcccaacctatccagaatattcttgaccgtttgctctcttttactgagcctcttttacacgctgcatccaacggcaggggctgaattttggttgcatccaacggctcatataaaacatatgacgtggcttaatattatttgagaaagcttgttgctttcacatatttagatatattgtccatcaagcaagctgctgacagcttgagagtaaggatgaatgacaacacacagctcatacaggagaactgagaaagcatcacctatagaaacaacaccatgcctgaaattgcacgttactcatcctcgctctggctacagttttttataagaaaaagtacgaatgacaccccccgaactatcgtgttcgtccgaattaccctcctgaaccacaaaaccggacattcttcacctcaaactatgcaaaccggatgaattacccccctcgacccaatccgcggtggttttggactacatggcgtacacgtggcagttcaatcagcattttatttataaaaaaaaagtgggacccacatgtcactctctctctcctatctctctctcacacacacactctctctcctctcggcaatggcggagtcagcaagcgcggggaggcgaggcgagccggcggcggcaaggcagtggaggaggctagcgg

SEQ ID NO: 15460 - DNA, 2469 bp, Oryza sativa
gcctccccgccgccgctcgcctcgcctcgcctccgcgctcgttgcctccgctgtcgcctcaccgccgccgctcgcctcacttccgcgctcgctgcctccgccgccgcctcgcctcggctccccgcactcgctgcctccgccattgccgagatgagagagagagaaagtgtgagagagatagaagagatagaagagagagagtatgacatgtgggtcccacattttttaaataaatagaatgctgactggactgccacgtgtacgccacgttgtccaaaaccaccacggattgggtcgaagggggtaattcgtccggtttgcatagttaggggtgaagtgtccggttttgtggttcaggggggtaattcggacgaccgcgatagttcagggaggtaattcgtactttttccttttttatatgaacctgacaggtggcattccactattcataactaagaggtcaacaacgtaaggcaacattgcaaagcaatactgtttaatgattcatacaggtctcctatgtaactacctgagccaaaactacaaaaaagaagggggcaagaatttttatctgggtcatgaaagaactggttcataatgacctataaaatcatataactctacacagatgctgtaaattcacaagcaaacaaataggcactgtgaaagatatttcgaaaaaaaaaaggtcaggaagaggcaccctacccttcatcaaacctcaaagcctcgagctacaataatcatattgccatccatccatgtacaatctgagcaaaagacagggcagtgaataagtgaacagtgtgacaaccaacaattgcacacaccatgttcaaatcaatccacaatgtagtaaaatacttttcagattattttttctcaaatacacatttcagattatgtatcataaaaatagtttcaatatagtaaaaggcataggtagtactgaggaggtttcatacatctaaaatattcacacatagatctaaaagaggtttgaattatcaaatagaaatcgccactcacaaccatcaacttgaaagtcccaactcctaaaagccaaaatctatagaattcaatattagttcgattgccaggtttctgaaattgtaatctctacttctgtcagtcagtcccagtaacaccaagttgaaaatgtattaatgaggcggcagtgaattaaaagcaagtccaagccaacagaacatcatgtatatagaagtgattccttgcgtaagttgaagtctacatgagcaatgaacaaatataattgatgtttgcatgactcagatattaagcaagataggggaattatggaagagttgagcaccttctttttctgttacaagaatttttcactcagacaaaattcttctttgataacacttttactgaacccagtccatatatatatatattttttgaccaaacagtagacacgttagatgtaaaatgacccaaatcggtcccccaaaaaaaagagcagtaccgctgcttcaagaacagccacattatctgtggctgtgataagagatctcgcttgagactgcggagatagcggccgtcggagtacagttggtcgtcgtcgcctcgtcgcccggctgcgatcctctgctggctggccgttaatgtggcggggtcgatggtatatgctgcggtgtgagcagaccccagctctctttcctctccgtcgcggcgcgagcagggaagcagggcagctccagcgggaggcggcggcggcaggctggaaaagctaacgcgcacgtacgcgttggcggcgagcgtttccgattgtttagcctaattaattaagtgattagtagataatgacggtaattaagatatgattttttttttccggaagatttttcatactaaccgattgaaaactttcaagttagatttgaaaacttttgaagtcaaattttaaaaactttcaaaactcaatttgaaaattttcaaatcaaaatttaaatgtgtaatacaaattttgaaaactttcaactcatatttaaaaactttcaactcatatttgaaaactttcaactcgagatttgaaaactttcaagtacagatttgaaaatttttaagttaagatttgaaaaaatatgaaaactttcaacttgagatttgaaaactttcgactcagattcgaaaactttcgactccaattcgaaaactttcgactcagatttgaaaactttcgactcgagatttgaaaactttcagcccaaattcaaaaactttcaactcgagatttgaatactttcaaatcggatttaaaaattttcaagttaagatttaaaaactttcaactcaaaacattttgaaaaaaataagtgtgctaaagattaaaaaaaagtaatcagaaaaaacgaaaaaaaaccggaaaaaaatcgcaaaagaaaaaggaaaaaacaaatcgcgaaaaaaaaagaaaaatgggctaatgggcccggaggcccg

SEQ ID NO: 15461 - DNA, 2839 bp, Oryza sativa
tttacccttggatgatcaaaaaattcatgaattacattattaaaaatataaaagcttctcgcatgagactattatagttatgagtttgttgtgcgatgcattatttatcccaaaaaaatatttttagataatgaaataaaaaaaatacgtatttattttttaaaaaaaaggtcataaaaatgaggagcattcatataaagataggtataccaatgttcacaacatttttttttatgaatgctcctgataaaaaaatccattgtcctattaaaatttcaaataaaaattttaattttttacatttattttattttcaaaatttatgtcaaaattttctgcactaattatttagtctcattagttttataaaatgcacacgatgtgcactcaaacaaaattttcaattatttttgaagcttatatttaaacctaaagcatcaagggcaaaaaagacatttgcaaccaaacgtaacattaaaatgatggaaaatgtaacggtaggggcatggaagggatcaaattgaaatttcaggggtatagaagggatcgggtaaattttagtggtataaaagggattgagtgagttttcaggggtacccagggaatttactctttttttttccctttcatatagcaaatcggtaggagtcggactttttttaaaaaaaatttcgctatttttttttgaccggacctggaatcggtagagtcggactttttttttatttttggatcggactcttttttcgcccagtttttttcccaaggttttttttagccagttttttttcgctcttttttttttatcggacgttttttttttctcccggtttttttctttttttgatcggactcttttttttcatccgggttttttccgcctggttttttacggatgataaaagcacctcttgtttttttaaaagtaagcagagattacggccagttggaccttcccttctggaaccatccacggccttccaaacccctcccgccaacccccgtcttctctctcgaaccatccgtccccaaaatccgccttctccactctccaccctcgtcctcgagcttcgtcgaacactctagaacctccataaatacccacctccaccacactattataacaacctcgcctcccttccctcgctcttcccaagtcacagctacgcacgcacgcacgcgcaccacgaaccagcacgcgcaccacccaatggcggacgacgcgtacgacgacctcccaatggccggcgcggaggaggaggtggacgacgtgatgaaggacgagctcgacgaggagggggactcctcctccccggtggcaatgaaggtcggggaggagaaggagatcgggaagcaggggctcaggaagaggctcctccacgaaggggaagggatgggatcgccccgaatccggcgacgaggtccaaggttagtaggcgcccaccatgcctgtgattcttcatcctcccgttgattcgaatcacacgaatccattcaagcacgcagagcgttgaataattcgaatttttttgtttgtttttgtttatttcagttcactacaccggcactctcctcgacggaaccaagttcgattccagccgcgatcgtggaacccccttcaaattcagcctcggccaaggtgcggatcggattcccaatttccccccacatttcgtcgcaatattcaccatagttgaattgaattgccgaatcgtactgaatttttttgaaaaatctgcaggggaggtgatcaaggggtgggatgagggtatcaagacgatgaagaagggggagcaggcggtgttcaccgttccgccggagctcgcctacggcgaggccggctcgccgccggcgatcccgcccaacgccacgctgcggttcgacgtcgagctgctctcctgggccagcgtcaaggacatctgcaaggacggcggaatcttcaagaaggtgctcgccgagggacacaagtgggagaatcccaaggacctcgacgaggtgctcggtacgtttcaaaattttgttcgaacgaaatctcaagtcgaaacgagaatcaggagaaaattttcaaatgagaagaccattttagcattattgtgatcattttaaattcagttcaacacagcaaatagtaacatatggggtatgatgaatttctatgaaattcaggaagatggcaagtttctgaaaatttcaaattggaagactattttagatttttgttcttctcattttaaagtccgtgaaacaaagtgagacagtaagataaggggcagaaggaatttctacaaaattaaagaaaaatataggcgaatttcgaaattgcatacactgattggtggtttggtaaattggtatccatcagtgaaaattctcttatactgaaatggttgctaaactttttttttgaaagaatggttgcaaaacttgttctctatttgcagtcaagtacgaagcgaggctcgaagacggaactgtggtatcgaaatctgacggtgttgagtttgctgtcaaagatggtttgtatcccctgcatcattgagcctctgcaattcagaatttaaccctgaaaaatgccatgtcactctccgatgaacataattctgtttatcttcaggctatttctgcccggcgctttcaaaggctgtcaagacgatgagaagggcgagaaggtcctctcactgtcaagccacaatgtgagtcaatcggagtcctcctttcaagagattttgcaactaatctatgtctttggtggtaatgttctgatgatcttggaaatggcattgttgagtgctgacatgcacttttctgatctgtagatggctttggtgagcaaggcaaa

SEQ ID NO: 15462 - DNA, 638 bp, Oryza sativa
cacacttacctcagctcagatgcgcttgtttctcaccattgttgcttgttgaactgctgcagaaggtgcctgggaagcaggaggcacagcctatggccattgacagtgccgcttgaggattagctctgctttcttttttctgaacctggttactgctagtactactgtctctactggttgtatgagtatgaaatatgaatggaaaatggtagttaatttgccctttgcttgatagttgcagtctttgcaactctgcacccatatgtgctcagctttgtacgagaagtggttgccgtcatttgaagatgtgatgctgtgattgtattgtggtgttagaagagcaaaaatgccataacgacactttggactgcgctactaatgttgttctttcttgtttctattgcaatatggtataacatctgtgccttgtacgcaggacgtatgtcccgacattgtttgtttgtttatgagaagattgtgagactgaactatgttttgttctcgaggcagtaggccacaggtgacacgtagaatgatttacagacataatttatgggcttgaagatgaagataggtttacgcacaaacacaagaattaaggaggtttggacttgtaattcagacatcatatgaagatt

SEQ ID NO: 15463 - DNA, 904 bp, Oryza sativa
tgcggtgacgcccccgccctcgccatcgagctcttcaagcggatggaccgatgggcctgcccccgccactctcctcccaccatccacacctacaacatcctcatcgactgctaccgccgcgtgcaccgccccgacctagggctcgccatcgtcggccgcttgctcaagaacggcctggggccggatgatttctcgtactcgctcatctacggtttcgttaaggatggggaggtggacaaagctcactgcttgttccttgagatgatggagcagggcgtattgccgaagatactgatttgtaactcaattatcaaagagctttgcaagatgaaggaaatggacaaggccgagagcattgtgcagaagatggtcgattcgggtattgcaccggacttgtttacttatagcttgattattgacgggctgtgcaagtcaaaggcaatggacaaggctgagagggttttggagcagatggttgaggctggtactcgacctaacagtataacatacaatagcttaatccatggatattccatttcggggatgtggaacgaatcggttagagtgttcaaacaaatgtcaagttgtggtgtcatcccgactgttgataattgcaactcattcattcacgctctcttcaaacacggtagaaccaacgaagcaaaatgtatttttgactcaatggttctgaagggccccaaacctgatattatctcctactctacgatgcttcatgggtatgctactgctactgacagttgtttggctgatgtgcataatatcttcaatttgatgctaactaaaggtattgcacccaacaaacatgttttcaacatactgattaatgcatatgctcgttgtgggatgatggataaggctatgcttatatttgaagacatgcaga

SEQ ID NO: 15464 - DNA, 1790 bp, Oryza sativa
atctcagactgatttttgctttcatttcactattttctatttctacagagatttctttcaacggttctaagttctattatgatttgttggatattttggagtttacttccgatcgcaaaagaatgtctgctgtggtaaaggatgtccagagtgggaagatccttcttctttctaaaggagctgatgaagctattcttcctcgttgccatcaaggtacatggtataacagggaaaactgcatcgtgtttatgtgatatcatgcatgtacacccctccagagtaattaatccatttcgcttgaatataaatacattcttaggtgtcattttctgaatttaattatctcgaggcaagagtaattatgcttgttctaactcgaaacctgtcttctggtagataaagatccctccagaattttaaatggaacagcttccttgttctgatactgatggaactaattaattaaacagaatatcgctcttaggaaatatatatatatatgagtaatgtcttagttctattcatactataaaaaattatagtccatataatcctgtgatgtaaggcagtaatgcatctttatgtggatcaacttatctattacaaacatgggatatacctattgcataccttgactagggaaaatattaccaaccttttaaatttgggcatcaaactaaattggaaaattcccaaactttttggaggcagtcatttatgtaatgtaccatcagatttcaagtctaaacatgatcagtactaatggacactaaaggtaagatgtgctgctaatttagttagcgtttttctccatatgtcacaggacagcaaattagaacctatcttgagacagtagaaatgtattctcagttgggcttgcgaacattatgtttgggatggcgtgaattagaagaagatgaatacaaagattggtccaaaacatttcaagatgctagctgctccttggagaacagggaggtaagttgttgagcctgaccttggctattatttattgtttaactattttctgtatcttttgttgttcacactgttatctcaccaactttaactactgtattcttagctaaatattgcaatgcttcatcatatgtagcgtaaaattgccgaagtatgtcaccgtttagagcaagatcttcaaattcttggtgttagtgccatagaagaccgtctccaggtattcacgaccttccatttttcttagaataagtagaattacttgttgcaattgttatcattgcattcttgcacctctaatagagtcttgtggctagcaggatggtgtgccggaaaccattaaattgctaaagagtgccggaatcaatgtgtggatgctaactggtgataagcaacacacagcaattcagattggacttctttgtaatctcatagcacctggtactgcattgtcactagaaatttgatatgcattaaaattgagcatgctgtataggctactactccattaaaatgcattatcctgtaaaacgacaactgtttcccgactttgcttgcatcatttgtttttaatggcactttttttgtttgggttgttatttattagttcttgtactcacctgttcaagaattagagcttcatctaggtggatatttaatcccttagtccattatcttctttttttttagtataaaatgatttcatttctactgtatggtgctcaagtgctggtctcttgggttacagctagaagagaccagggtacctgttctcttggatatgtcaaaatgattaataaaaatgttcatcttat

SEQ ID NO: 15465 - DNA, 654 bp, Oryza sativa
cattttacttttagaactgtagatctaatttaattattgtgaagttatgtaggatgataaaatctatattattattattattattattattattattattattattattattaggaaaaagtacgaattaccccccgaactattacgatcgtccgaattaccccctgaaccacaaaaccgaacattcttcactcctaactatgcaaaccggacgaattacccccttctacccaatccgcggtggttttggtctacgtggcgtacgcgtggcagtctagtcagcattttatttattaaaaaatgtgggacccacttgtcatagtctctcatctctctctcctctctctctctcactctctgtctctctcactcatcctctctcgcgcgcaggacaagcggcagcggcggcgcacacggcgggcggcggcgcgggataagtggtgggcaggggcccgtgggtcaagcggcaacggcggcgcgcacagtgggcggcggcacgagacgggcggcgggcaggggctggcaggccgacggtcggcgcgaaccgcacggacgaccgcgctcatggcggctcggggacgggcaggcaggctgtcggcgcggatgattgcgctcatggcggcgcggggacgggcgggggcgggtgggtgggcc

SEQ ID NO: 15466 - DNA, 1042 bp, Oryza sativa
cagcagcgctcccgtcacgccgccgctctcgtcgccgacggtgtcgcagccgccaaagatcaggaagctggactgggacgtcgaccccttctagcaccccttcttcgcggtctccgcgccggcgagcccgacccgcggccgccgccttgagcacccggacacgataccggagtgcgacgagtccgacgtctcgacggtggactccggccggtggttcagcttccagatggccaccacggcgctgacgtcccgcacctacaacctcgtcaacccggcctggtggattgggaaatttcagggtgaagtcttcgattcgagtccttcccgtgcatgcaagaaagggcgatgtgccgtgaggagatccctcagctttgagcatccatggggttcctcaaccttgtgggcaactccattgggtgctcggcttccggcgagcggctcgtctcggcggacagggacggcgacctgcaggaggcgcgcgcgctgctcgagtacaacccgcggctcgcctggtactccactttcggtggccgcaactcgccgctgcactacgccgccgcgcagggtcaccatgaggtgatgccatttgtctgccaaactagctgaagtatcagtgtttctgtatagatgggtaaaagaactgcaatactgcattcacattttctgttgcttgcatgttcagattgtttctctgttgctcgaatccgaagtcgagatcaacctcaggaattacaggggccaggtaaaccaagatttatggtacatttaattgtttaagtttcacttgcgaaattcgacaaggggagggtgatgccatgggagggcgagaggaggtggcgtggactggggcgaaggacggcggccgcacaggaggacatgtgtggagagggagatgacttgtggggccggatgtaggtggcgacgtaggtgtcggagtggccgtcgaacacggcgaagaggccgacctcgttgccgtcctttaggcggcgaaactcggcggcgacctcctcctctggccacctccgccgcccgcgccctgccg

SEQ ID NO: 15467 - DNA, 2949 bp, Oryza sativa
ggttgttgtaatcatggtgagttggtaaaagccaaggaattgatttctgaaatgatgaacaaggatattcctcctcgtggtgtcaagtatttcagttcaataataaacaacctgtgcaaagagggaagggtagcagaagggaaagatatcatggacatgatggtacaaacggggcaaaggcctaatgttgttacttttaattcattgatggagggatattgcttagttggtaatatggaggaggcatttgcattacttgatgctatggcatcaattggcattgaaccgaattgttacatatatggtacgcttgttgatggctattgtaaaaatggaaggattgatgatgcattgactgtattcagagacatgttgcacaagggagtcaagcctacaagtgttttatatagcatcattctccatgggttatttcaggccaggaggacaactgctgcaaagaaaatgttccatgagatgattgaaagtggaacaaccgtgagcattcacacatacggtgttgtgcttgggggactttgtagaaacaattgcaccgatgaagcaaatatgctgttggagaaattatttgctatgaatgtaaaatttgatattattactttcaatattgtgattagtgcaatgttcaaagttggcagaaggcaagaggctaaggaattgtttgatgcaatctctacttatgggttggtgccaaatatacaaacctacagcatgatgataacaaatcttataaaagaagagtcatacgaagaggctgacaatctctttatatcagtggagaagagtggccatgcttctgactctcgtcttcttaatcatatcgtcaggatgttactcaataaagctgaggttgccaaggctagtaattatctgtctataattggcgagaataacctcactcttgaagcttcaactatttctttactggcttctctcttctcaagggaaggtaaatatcgggagcatataaaattgctccctgcaaagtatcagttttttgagggagcctggcaagattaatacattgttgtatctgaaattgtttcaacatgttgcactctagagtttcttctgctcccacgggaaggaaaataacctgtcccccaaaattctggcattgattattttattgttgttgtcagtaatgtgttgtttgtgttgaaatcgtgagcttgtcaattgctctgcataccttttatctgttgttattgaatgagaagctagacagcggagttcaaaataaactgttgcatttttaatacgacaacttctgatgaaaaaggtagcacaggtaggtgtatgcattgtgaagatatttgtgaagataggaactaacttacctttatattcttatgttttagttgatgttattcttggcgatcttctgcttataagcgactacttgattacttttgcttgaaggatattatcttcatttcagcacaaaaggtcctttgaagactgaatattgtttattcttcgacaaatttccaacgacactttatcagtaggaggttgttgcataatggtcagatcagctatagtttcgtttggacaatactcgatcctcaaatgttcaactggctgatctggtgatcgcctttatttcagacagttcagagcagagaaagccatttcctatgtttcgtggctatctttctggaccctgattcaaaacaattacttttttcataagcatatctttggcagatacaatcctagctagctagtgaacttcgtgatatggatgggcttattacttttgatacattgaagtcgtgtggaagcaggatttttgaacacgctgataaaatttttcactatcagcagacaagatgaatgcccatcaagttatacttgcataaaggtgagatgagtaatgctatgttttcattcttctgatgaaaacttgctatgttaaaatttcaactgcttggtttctatatttatttaacgaagtattaaacatacaaaatatattggcaatgtagggactgccatttaaaggaggggtaatcactcggtaaaaatttaaaaacattctgctaacaagtttttatcattgtttgcatcttggttgcctcctgctccgtggtaaatgacctagtcttctcctgtaacagaaatggaaaattgagttgctgcatgcgatgaggttcagcgttgtgtttacgattcactcagggaaaggctggaggtagcgaagagggagattcgccattgagttgaagatggaagtgctttcccatgattgcggtaggtagaagaaattattttgcaggtagtgttggtgcttttgatgtcttatttttgcatatcgttcacatttttctccttcttaaattctcctgaaacttgttagagctgtgacattcatcatctacgttttcagttcaggcaatgttgcttactgcttagttaaggtataagaaattatcgaagccaacttatatggagtgtggacagtttcatcgttattttagaaaaaccaactaatagtttcatcatggtttggatattgtgcatgtaggtttagatgcaagaaacataagtactgcagacctgaaaatcgaagcgctgacaacatagctgcaataataatttctctaactggcttgggtttgaggtctgaattaatcagctggttttggtcacaaaatgtgacatgaatatttctgaacgttggtcaacttacaattacatctgtccaaggctcacattctgttctctctttcagaattgcacttgtgaccatataaatctgcatggatagggatcactacctgtttatgattctctttccctttttgtactgaaattttccagggatgattaagggcctgtttggcacagctccagctccagctccggccctcctggagctggagctcagccaaacagtttcagctccaccaaaactgggagtggagctgg

SEQ ID NO: 15468 - DNA, 6813 bp, Oryza sativa
cagcgccatgcaaaatggacggcgtctccggccggccgcctcccgcattgctcgtcgtcatcctcgccggccaccgcgtgtacaaacgtacgacgttccgctcctcccacgccgccgatcgctgtgttggaaatagtccccacattgattatttaggagaagttgaaagtgaggagagtggattttaagctttttttttctccaataaaaactggataaacttttagataaaagtggcatgctttttaaactgctaaacggtgcgtttcgtgtgaaaactttcaatatgaaagttgctataaaatataagattaatctattttccagtttgtaacaattaaaactcaattaatcacatgttattatcaccttgttttacgtgaaacacttaatttttatcttcatctttgtcttcaggaaatttaaacaccaccagaaattcaaacacttaatctttctctattaagctagcttttaggatacaacaagattattttttccggttagaccaacatatctcggttttgggtcaacttgctgcgcaatacagcagtgggattgatcatggctgttgctgaggctaatcgctgctgcgaccgcggcgaaactggccggccggcacagcattaaagagttagcttagcttcctccgatgggtgtagctaccggccggccgccgggaggtcccccatctgcctgccgccaaagccttttaattatgctcactgtttgagtgtgttggtttcgtatgcttgcacaattaaggctaaacatgaacccatcgatcggtcgttgccctcagcttctctctcatttttttcatggcagtcggctgtgttttttttacgggtttggaaacatttctcctcggcgcataaaacggaggatggattaacgcatgattgattaagtatttagttttaaaaacttttaaaaccgcaatgtttaggctgtgttcgagaggtaaggttgggaacctttcctcctaatacggaaaacgaagcatacgattatagtgagattaattaagtattagcttaaaaaactttagaaatagattaatatgatcttttaaaacaactttcacataaaaaaacttttgttaaaaatacaccgtttagtagtttgaacagcgtgcgcatgaaaaacgagggaagtgagttgggaaagaggaaaaaagaacacggcgttagcagttcggaaaacatacgcgcaaaaaagagagtaaaagtttaaaatgagaagaaaaagaacacatccttaagagcataaaatgttttataggtgagggttacctctacctttgtctacatcatctatttataaatttaaaactagcctacatcaatacacctctaatacactagtcccagtacatttttcaccagtctacttctctattctctttcaatctttaaagtttgtgtagatgttacccttatatgaggggtgatttgtcctctcttatcttctctcctacacatcaccatttaaacctacataacaccttgtgtctactattaagaagcttatagtactttctctaccaacaagatactccattcgtcctaaaatataaatatttctaaaaaattttttaaaaaaattaagcatgtatatgaaattataggttgaaagttatgattgatttgagaagagaagatagatgaagaaactaaatgagaaaatgttgtgattggttaagatggggtaagtggagaaaatgggacggaggactaagacattattggttttagatattacgtttgacaattcatttccattaaaaaaaattatattatcatttttattgtaacttgttttacactaatcatgctctagatgtgacttatcttttcgtatttgtgctaaatttttaataaaataaatagtcaaaatgttatgtctacaaatcagcagcatatcatacatttataaataatgggagtacatttataaataatgggagtacaaggaaagataatttattgttcaatgcaaccttccattaccttaaaaaaaatcatttgccatatgtacttccatctagaacactcctgcttctttttaccttcagcctggtcagagtgattttctatgtaacgtgatcagaggccaaactagctttgtccccccgccaatatttaacattttagttcaaataaaacaacccacccaccaaatccaaattattaagaatgcctcttccccctctaaaaacagcattcatcctcgggcaacatatgcaaattaattcgtgatttctatataattctttcgttatacccataactttgatttgatcatgcaagaacgtactgtgtgtcaataaaacaaatggcacgggggtagcttagagcattattggagtactcttatataggagttagtagtgagtgatatatctgttctaattaagctccttcatcttattgggttaagggtttttatttttggtaaactggtcactaaaatacactgatacagactagtcctaataattcataagcacattgatgatgcagaggaggccatatgtaggggcatgggcaaaagtgctttgacagtggcagagcagttaagaaagttaaagtctaggagaacttgtgaacgaatgctgaggcccaatcaggctgaagatcgatgtgtgttctgactttggctagtttctgcttcccctttgcagacagcttattaatcagatcccccacagtctcatagttgcatagggtcgctagtggtgggcttgatctgcctctgcctctggaaacaatggaggagtagatccgatgtgttttatggaacatgatcgattgatcatatatcaaaggcggcttggatatgggtgtgcaaggcaatcagagatcctgtactatggttcacgtatcagtggcacaattgcaaactatacaaaatgacaatcagataagccacatccacaaacgtaaggatggcgatttttcaagtgcggtcgtttagatgggccgctgatagaaatatatttttcaccggggatactttgaaagggccgtctgtttaaaaatcaatttcccttaacctattttgctgatgtattttcacattcttaaccagactatcccgacgtatttacatatatagacgtgcatgttttaatccgcctctaaaaatacaaagggtgtcactaaaattgattttttttaacagtgttggccactaatactagtaagtacatgctaatttatataagcacattgatgtagagagggaccataaacaaaaggggctttggcaacggagggttgcggcgtggactgtagcgtagcaacaaagttactaagtctaggccaaacttgtgaaagggcgaggcccaactaggctaaagattggcctttttgcttacgcgtttgttgtgttcctctttgtatttagcttaattagatcccatgcatatggttcaattgtcagcgatctcccaatagttgcgcagggttgctgctggtggctctgcctctgcgtcaggaaagagtggaaaagagaacatcgggacatgcaacttcactgaaaataaatatcaaatatggatatgtaaaataaaaaaactactaattaagttttaataatttcaaacttgaaaaatgttttatctgatattttaaagcatcttctatttatatataaagttttcgcataaaatacactatttaacaatttaaaaaacatgctaacggaaaccgatgtaagatctatacgttaaacagaacgaacaaggtattaaaaatgagtagatatgatgtgcaatgtacgagtgagaatcatataaagatgcgaagaaatgtgacagtgacctgcactaatagaaaaaacatttttgtgacgttgggtatttatttttgcaggcagacatgatctttggagctaaatggcaacctaaaaaatgcaaaccggggtaagctcgctgtccacttgtaaaaatctattttcacaggcggaccacttaagcggtccgcctgcaaaagtaccctttatttttgcaggcaaatctcttatgtgccccgtctacaaaaataaacttggaatataaatagaggcgacataggggagattttttctaagtcctctctctttctccctcactcctctcctgcgtccctcaccttcggcccttccccctcccctcccctcccctccccggcgtgctcccggcagcgggcggcggcgactcccggccccttcctcccagatctggctagagggggcagggggagggcggtggctggcagtgctcccctccctcgcgacatggcggcggcggcctccggcagctgggcggtggtggcggccgcatgcggaggcggcgtggaggcgggaggtcggcggcagtggcggcgtccccacctcccacatccggcagctcccctctcctccctctctctctccaaaaacactaaccgagagtggagggcagcggtgggtagggctagggcaccgaatttttttttacgcttaaaaatatttttgcaggcgggtggatttagctgcctgtaaaagtcattaattttcgcaggcgtttggttgcaggcggaggctatggacgcctgcaaaaatgtgttttagccgccagtaaaaacgtgttttctagtagtgctagaaggacattacataccatcaaagataatttagataagagtgagaataggatcgaggtgtgtttgtgaagactttgtttggttaatcccatcaaaagggaattaatttcatacctatctttcttagagattaactgaacaaggtctaatggaagatgatagatgatcaaaggcatatataaatactacgcctcatacatagatcttgagcaagggtgagagagaagtaactaaggacataacgctgatattaatgtcaatataaatactactccacatgcatagatgtcgttgtattagcaaaacaatgtacacagttatccggtttcataattggaggccaaactttagaccatgttaatagactggacatgtaaaagataaatataaccgccgcatacaatttttaacatttcatatccttttctctggttgattttcgactatggtgcgacatcaacactattgtagcaaaaccacaaacaacttaactcgatcaacattttaacttgcacagtgaataagagatactcaaattagagaccatagaaattatacataattattatcaaatcaacatgtatataagagtaaaccaggatacccttcaaagaaaccaaaagaaataaagaagaatgtccgtcgtgatttcaaaggaaaaagagagaggggaaggttgggtgcgatccttcacctctctttttaaaagaaagttcatcgctctccacgtgcacgcttcttaaactgataaactgtattttttttaaacaagaagttatatagaaaattattttgaaaatcatattaatttatttttatatctaaaataattatatctaattaattgtacgcaagtggctcatctcattttccttttatctactcgtttctccttgcgtcaatcacacacttacaaaaaaaaaacttgggggtatctgtggtttccattttacgttttacccactagaaagcgtattccaccgcgctgtccatccactgactcctatatatattttcttgcgcgttatttaccgtgctcgtgccggcatctcttcccacccaccaatacggttacttccctccccctttcctgacttataggaaaaagtcagttttactcccctcaagtatgaccctggagcaaataaccccctaacctttaatttggtttacttaaccccctagattcttaaaaccggatcactattcacctttctaatctaatacaaaccgctttgctgatgtggcacatggattaggtggttttgcttactaggttggatctaacgtggagaaagagaacctgggagattaatcacacgtcgtattctcctccatgcgttggactcttctccctcacaagtcctctcatcatctcctctctcccttccgacggcggagaatccaggtgatgatcgtctcagataggcggtgctgatccgtgagatcgcagccccgtggtgtgtccctccccctccctcccttcctccctccctcctccccactcgatcttggcatgctttaggtttagggttgttctagaaggggataataagtgcgtgtggcagttggttgatgaaatttttttggttgatttcgttggtggtagggcactactgagggttaggttgttgctatcccttgctgtttttttttcttgcgagctcattatccatcgtcagatgccggcgctcggcgtgtgcgtcttgaagccgtcgcgagcgatggcacatgcaccgcaggcatcatacctagtggaaatgctgaaatggagcaaatcattgccatcgacgatgtagcatgggtggcagccgacgcccggcgagggtggctcacttcataagttgttgttcatcagctatctcacttcatactgtataagggactgttttttggttgatttttattttatcttgggatgagttgtttaggatttggtagataattgctgcttgattaatgtttcattttttaagataagtttactgatgatctcattgttgccatgttaggtgtaatggataatttggatgtactttgtatccggtttcactttggtggggaatttgattatgatggatattctgtggtttataatggtggtcaaactgagatgtcatacatagagagggacaaggtggcattaaaagacagggggatccatggtctataaaaacaccccgcg

SEQ ID NO: 15469 - DNA, 3879 bp, Oryza sativa
atatgatcaacaaaaatacatgaatattgatcctcatgctgtttcgtttaccaatgtagggactgtaagtgcagttgaggaatttttgccacaaattgagcacaggatgtgcactagacacatctatgctaattggaggaagaagtatagggatcaagcattccagaagccattttggaagtgtgccaaggcatcttgtagaccatttttcaacttttgtagagccaagcttgcacagctaactcctgctggtgccaaggacatgatgagcactgaacctatgcactggagtagagcttggtttaggatagggtccaattgtgatagtgtagacaacaatatgtgtgagagcttcaataattggataattgacatcagggcacatccaatcatatctatgtttgagggcataaggaccaaggtttatgtcaggatacaacagaacaggagcaaagcaaaaggatggctaggtaggatatgtccaaatatcttgaagaagttgaacaagtacattgacttatctggaaactgtgaagccatttggaatggaaaagatggatttgaggtcactgataaggataagagatacacagttgaccttgagaagagaacatgttcctgtaggtattggcaattggcaggtattccttgtgcacatgctattactgcattatttgtgagctcaaagcaacctgaagattacatagcagattgctacagtgttgaggtgtataacaaaatatatgaccattgcatgatgccaatggagggtatgatgcagtggccaattactggtcatccaaagccaggaccaccaggttatgtcaagatgccaggaaggccacggaaagagaggaggagggatccattggaagcaaaaaaagggaagaagttatccaaaactggcactaaaggaagatgtagccagtgcaagcaaactacccataacattagaacatgtccgatgaaaggaaattcaggaaaaaagatatcagtacaagagagagcaagagaggcaagtaatttacatgctacatatataagtggttgagtattgacatatgtgattctgatctctacattgaatgcaggttcaggaatgtagcaggccgcagaaaaggtttaggccatctgtagctgcaggaacttcgcagcaaaaagttcatgtaagttgcaactacattgcagactatattccatcacaataaaggtgcccaaaatatatgatcttttttttcatgtaaggtgcagattgatttgccatcccagagcagcagcttgtcaataacaaagaagggacaaacgatgaaagttgcaagaacaaacacaacaaagaagtgaagatttggttgcatatggcgtgttgtttttatggaatactttacatatttttcaataaagtacttgtcaaatatttggtggaaatggtaggtgtaatgtaaggtagattgagttttaagttattgaatctggttagggtgaacaaattttggtattacctttcagtctaacttgttataaatagtctgaatgtcaactcgttaatttagcatgtaggctggtgtgcttccttgctcctgctaccttgctgctatcttccagtagtctcaaaactgacatatgaaaaatcctcacgtcatcactttccacgtcaagtgcaaatttccttgtagcctcatcacctggcaagtaaaacctggctacaagtgaaaattctccacgttggatccaacctagtaagcaaaaccacctaatccatgtgccacatcagcaaagcggtttgcattaaattagaaaggtgaatagtgatccggttttgggaacctagggggttaagtaaaccaaattaaaggttagggggttatttgctccagggtcatacttgaggggagtaaaacggactttttccttaatttaataattaattcggtcagttttccatgcacgcgcgcgtttgttggtgtgtgactgaaactccaaatcatctcttacagacagtcttcagagtttgaatagttcgtggcacacttcctgcaaatcctgcttgtgcatcaagtagcgcgtctctgtgtgtgtgttagcacttactaatatcccatttaacgagagtatgcttttcaaactactaatcataaataaaatactacttccgtcctaaaatattaggatttgattcattcttggaaaaacaattggacactaccatataattgattttttcatgcggttaaaatcgattttcgcagacgggccggtggcccgtctacacccaggtgtttgcgaaaattatatttttgtatgcgggtagagcaaccatcatgaaggcgcttaagcctctgattgcaaaaagaaaaaaatgctaaaattattttttctaaagccccaaaactctagctagattcacccagccggattcactgcctactattactgctggatccacccggccgagcccgcggtcgattcgccgcctcccatcgccgtggtcgcccaccgccccacccgccccatgccaccagtagatcccacgctcgacggttgctcaagagagagggagaggtagagactggatagaggccaggagtgggagggaagtgaggagagtggggagtgggagggttggatagggagtgggcaggagaagagaggaatggacttatgggaagaaagggaggaggggagaaagaagagtgggatatttttcgcatgcggacctcttaaaatatccacatgcgaaaataggtttacttttttatgcaggcttgttaacacacccgatttttgcaagaggtcatcggatcgtccttgggggagcaatttttatatatgggatagttatgatccgtctataatataaaggggtctcgttggtaaaatcaattttataatagtgacagaggtcaaatcacattctagagagcaacacacattttgtaacaaagaaagtataaaagtttgtttttttaaaaaaatagttttaagtttttttttttaaaaaaatagtttttaagtttgcaaaggttaatacttaattaatcatatactagtaataattcatctcgtttcacgtgacacgatcagctcaccagacgcagctgaatcgaacgcagctactactagtatcgtcagtgcgacttaactgctgtgcagttgagttactgacatatgggccatagtaaggtgggacccacatatcagtgactcaactgtatgtgcagttaagttagaggatctgcttccgtccctgtagatactgtgtaacaccctaaaaattagaccgacaaaaatctaaactccaaaaaattgggccttcaaaaactttttaaataaattgcatcatgccgattttattcgattagtttattggattttgatttcggagtttataaatcacgaataatggaataattaattaggaataaaccctaaaagtaaattgacagggtaaataattaaagtgcaatttaaaataagatttggggaggacagaaatgagtaaaatattattacgaccatatttgtatcaattaaatctaaatgtgatggaataagaattaactctaattaaattcaagaaaattatataaaaataaaatatgggtgctatcaatctagagtgaatttttcgattaaaataaacacaagtatatgtaaacgtcatttgtggaaaaattaggaattaaaggacaagatttataaagaataggttaaattaggctagcactgttcattgcactctaggtgctcgacgaggttccctagccctaaccctccttgccgcgcacgcccggccgcctcaagccccgcgccgccgtcgcgttgccgctaccacaccgcgccaacgtcgctgtcgctgcctcgcgccgtgcgccgccgctg

SEQ ID NO: 15470 - DNA, 1838 bp, Oryza sativa
cttgcctgtgtggcaataattaagtttaatatatatacaattactttagtttcagtattgcctagagctaggagttggactttttgctactgggatagataaaattaagtaaaaaaataataatcttttttgtaccgaaagtgtgagcactaactgcggtggttagtctatgcagccagtagtaattttgaccgtaatgcatgtaagctactagtagtactcctaagttaagctcccagtggtccaagaggatataataataattgattagttaataatctgagaggctcttgctctgtacttaaactaatcaaaccggctaatcaattgcaaggtcctggtggtttaggtggtgcgcacgattattttagttgccccaattattgccacggtagtgatgccaccgccggtggtcaaatttgggttgaattttaaatttggttgataacttttcttacctttttaaaatttattgctgagtttttttctagatgattgtttattgtttttgttttgttaattagttagcaaataaatgtgaatgttgcggtgtgcagatcaccggcaaggctctcatgctggacgagatcatcaactatgtgcagtcgctgcagcgtcaggtcgaggtaccaatgcaagcatttgctttaatagtgtgctaaatgaacttgttttaatgacaataaatatgttggagaaaaatgttgttgtgttctccttctgtcgtcctagctagctcttatttgaagttatgtatgaaattaagcccaaaagctaaattttgacattggtgtgtctcacagtttttgtccatgaagttggcgaccatgaatcctcagctggactttgacagccattacatgccttccaaagatgtaagtatagcatctgaaaacacttttatctgatctagagagacagttgacacagagtactattacgatattgtccctcaatttgcaaatgttatattcgccgcactcggggtatcattttcagatgagccatatgccagtacccgcatacccgtcaagcgatccgaccaccaccaccgcgttctcctacaccggctcacccgccactgctgatccattcaccgtctacaactgctgggagctcgacctccacaccgctatgcaaatgggagccaccaccggactcagccaagacggtccaatcgcaacgatggcaccctctccctcgccattgccgcaccatcctcctcttcacggcttctacggtaagtgaaatcgaaccaccacatctccttacatccctaacaaattatacatgaatttttaaaaatactcaattttttttttaaaaaaagttcaaaaataagattattttttttactggactacagtagtggagtggtggtggtcatactactccagtacggtaggtttgtttgtccaagtttgttgagtttcgctgttggtggtaattgggcgcaggggggcagcagcagcaggggacgacagtaaaccacatgaaggccgagccataataaatgcggcgacctctccttctgtacatacgcccagccgccgtacgtgtactccgcttttctgctcccatcctgcagcatcagcatcaccagcagcagcaaacccaagctcacaatcattgccatcaaagaagaaagaagaggatgttgtgtgtgactgtgtgtgtggctttgatcatggctttggcttgatcctacaaaagccactatctttttttccgcttttctacccctctgccgtctgtcactgcaggtggggcccagctgcacagggaaggagaaggttttccaaggcttaactttttccagatgcagtgtcatattgttt

SEQ ID NO: 15471 - DNA, 1837 bp, Oryza sativa
gcacaatcgttccatcataaaaaatcactaatcagtgatttcctagataccgcgataaccgagcggttactaataaaacccgagtagattaggacgaattctgtaaaaatctgaatttttatttttttttatttagctgatttacagatcgatttctaaatacaactggttcgataagggagactgataaccacaacaatcaagcggctgtcgatcgtcgcattttgaattatacaactatagctgacaccacaacatcgcactttcaattatacaactggatttgtgtgtggtgatccggcgtggcaaaaagattcctcaactcgtagcacattctttctgcttaatcctaggaaatcaaccagtaatctaagctaaaatcaatgtaccaaagtgggtactagccatgcagccagtggcaatgttcccttgcatttctttttcgattacacgataagcacacacattacagtatactcacacacccgtgaagcgtgaatgtgcccccctaacacatgctccagcgagacatatatctgatcccgtattacaatcctgttaaaagttcacctatacatgtataatattcgtagtcactacgatttaaactctagtgagtgaagccatgcacccacgattccaccaccgcacagccaatgcttcctcggttcccttgcatattgtcaccgctcaaatcactcaccaagatcgaagtgctttatttgtactacaaaattaacggtgtgtttagttcacgttaaaattggaagtttggttgaaattagaacgatgtgacggaaaagttgaaagtttatgtgtgtaggaaagttttgatgtgatggaaaagttgaaagtttgaaaaagaaaagtttggaactaaacacgatgtaaaggcatgtttttcctctctacaaaagtatatgtggtgaaaaagaagaacaaaagaaagaaagaaaggaagaaaggtgaaaagaaggttggatgtcctctctcaccggcctacatatgttgttgctgttgtttgtttctgtgtagcgtgtgctttccatcataccctgccaactggcttatgcatcgtctgctctcttcttttctgacgtcgacccatgctcaaagccatcgattgcatatgtgtgtacgtactgatgacaattgacactgcagtagttgtgatgtgcgggacctcaattttaaatcacgtgatccaaattcaaacgcgtctttgtgcggtggtttcttttgcgacattgttaacctcggatttcgacaacagatcgagcatcaatagatggatacgtcaaagtgaaagatgttgagttagaaatcaaagtataaattatgtattatttccctagagtacaagtttgaaaaacacgccgtcatcgcttcgcttattttgattataagttgtactccctccgtccctaatataagagattttgagttttttttgtttgaactctttcaccactcgtctgattcaaaaaatttgtgcaaatattaaaaacgaaaagttgtgcttaaagtactttaaataataaattaagtcaaaaaaataaataataattccaaaaaaattgaacaagacgagtggtcaaacagttcaaataaaaactaaaaatcccttaggtagtgtttggttgcaaggatgggatgggatgggatgggatgaacccacttttagaggtgtttggttgagaggtgagtgggatgggatggtccctggagaggaatattcctctcagatccgggatgagatggtccgccaaaatcggacggaccaatccatcccacttcgacggacaaaacggggtcaactcccgcacgcagcctcccc

SEQ ID NO: 15472 - DNA, 3659 bp, Oryza sativa
taacagtgtctaatatggaggagagagtgaagcaaatgcgcataaacagctcacaagagtgaaaatggctcagacacggctctaacacatttgttttcatttttctttaatcggaaatgaaaactggaaaggaatttcactataaaaaatcatctttgtaggtgcccctttttatttttagaggcggtctaaaaagtctcgcttgtgaaaatgtatggagaggtccctgatcaaggcccacctggtagttttcggtcgaacgcataaaaaaaagagggcagtcttttacaccgtcaccaacaaaaatcgattttagcttgcccactgctaaaatagattttcgctaacggtttgctgcccgcatgtaaaaatacattattttcaccgacttgaagtcacaggcattgctggccacttgtaaaatcatgttttgctcattcgtgattggctttttctaagtagtgattaattgtccaatagaggtacagatcgagtgaatatgagcggaagggacatgtactgattcttcattttgtactccatattttaatgtaatgacaccgttgactttttgtctaacgtttgatcattcgtcttattaaaaaaattatgtaattatcatttattttattgtgacttgattcatcatcaaatgttttttaagcacgacataaatattttcatatttacacaaaaaatttgaataaaacgaatggtcaaatgttgataaaaagtcaatggcgtcatacaaaatatgagaggaagggacaaacattgactctcaactaaaggattgtagtacaataggcatctatggtaagaatccatgggccatttgagaagggaatacttttaggtgaattatattgtaggacaattcggttgcgggaaataaatattgaggtcgtttagcttaaacgaaggagatacgtataacgtgtccatcagtaatgctcctctgtaacaactgagtataagacttttgcaggaattagttcaccttccacataaattctccattcaaaggagacattactccctcggttctatacagatgttttgagttatcataagtcaattatttttaagtttaattaaatttataaaaaatatagtaatattattaataaaaaagtactccattagttctaaaatgaagttatttctaccactggagtattatgctaaaatagagctatttttcacctatcctctcatatcaactaatcagaatcattttttatttaattttattacatattttctcttctcaaccaatcacagtctttcccaaatcatttacatctactttcttatattattcatacccaactctataactgtttacattctggacttgtaaaatatacagaatttctaaatggccattgacaacaaaattgggatcaaaatctttcaaatttttaacctcaggacatgtgtcatgattcatactccagcgaccccttctgtgtccctggcgaagttccagcaatcagaaacggcacaatgagttagggtttaagatcttggtttagggttgggttgggggaaagggaaaggggagggggggtcaagaggcttagagggatggccgtgggaggcggcaacccgttgtagtgggggacatgagcaggcgggtttagtgctgcagtaaaccgaagtttgtagttaggaggtgacagtcggtgatggcggatcggtagtggggagcccaaaaggagataagatggcgggccatgagcacttgctgtcatcacctgcttaggaaagagaagtgcgagggaaggaggctagccatgggtgcatcgctgacgccattgacaactttaggccagctggcgaggctatgcggcggcgcaggcatcgcacgctaggaacgacgagagaggagaggagatgggtcacagctagaagtgtagtgcacgaatctcaaagcgataaaatggtccaaaatttacaagattcagcttttctatcaaaataccatatagtcattccctaaaatatactatatttaatgatgaagttgatgggattaattttgtgttacagatgttggtatgtttttttttgtaagttgcacattggtctacctatggttaccaaggtttcaccttggagaaccccctcaacaaagttttcgcttgggctagatataattaccttttgttgccctttggatcacatgtgcccttcatctcccactttttctttttcccatgcaaatctctggttgacggacaatatcttgactgatcctaacttggtgttggaggtatgtgcatcccatctcaatgaaggtgagggtgaggtaacaggatctgctcatcagtgggagtatatagaagccacggtggaagtcttccgccagcgacctctatggaggttcttcaggcttctagatgtaactagccaacccctgtgctccacccatggtttcaatgtagaatcaaattggtgttggggaatgttagggatgagaaaaactagagtgaaaaagagaaggatgaagaagtaggggtagcccaaattgcgaaagataaagtaactttagctagcccaaattaaaacctcgttaaagggataattcaagatgaaacattataatgtgaaatttactctttttctctataaacgttatctatctatctatctattatcttctattatatactaaaagtccattaaacttcctacaaacgctcctaagtcgccatgtgaaatcttataaacgctcctaagccgccacatggcactctaaaaaataaccgttgattttcattaaatttggttgacccattatttataaccattagatttattttttttttaaaaaaaaatcatatcctaaactcggccccaacaggcattacatacgtgcgttgtaagttacgtacgtattccccccttccttcgattccctatttctattttctattaattatttctcctatttttatgctttatttgttaaaaaaattaagtaactacgatatgtaaatcatataattgtttttttatccatcgatatcttttgattgtttacgaccaaattcacggttaaagactaaatttcactataattaaaagttgaaaagaaatatgttacatttcagctatattttttgacttttgcatgcatttcaaaaaattagaataaataataataataataataataataataataataataataataataataataataaggaaaaagtataaattaccccctgaactatcgtggtcgtccgaattacccccctaaaccacaaaaccggacatttcttcacccccaactatgcaaaccggacgaattacccccctcgacccaatccgcggtggttttggtctacgtggcatacgtgtggcagcccagtcagcattttatttttttttttaaatgtgggacccacctgtcatagactcatagtctttcgtctctctcactcatcctctctctcgcgcgcaggacaagcggcagcggcagcgcacacggcgggcggctgcccgggtcaagcgggagcggcggcgcccaccgtgggaggcggcccgggacggccggtgggcaggggcgggcgggcgggcggtcggagcgaacggcgcggaccggggcgctcatggcagtgcgatgaccggcgggggcaggtggg

SEQ ID NO: 15473 - DNA, 21984 bp, Oryza sativa
  unsure (1)..(21984): unsure at all n locations
gcgggacaaagggtcgcgatctcgtgagggtgagctaactccaaaaacccgtcctcagttcggattttcagttcaataatttaagctaaattgtattgtttgcgattttgaagacttttatctgggtatatgaatgtgcaagcatcattggcgatgaattacaagaaaaaaaaagttttataacatcataagacacaagaaacgacgcatcatatactatagcatggtatcggcgcgggacggcagcctcttgaagaagttgccggcggccgacggcatccggctccggaaccgcgggtggcggagcaggtacagcccggcgacgagcgccaccacccggggcggcgtggcgtacgccacgacggcggcggcgaggcaggccgccgtgaacaccgccgtcgccctcgggtccctccacgccagcagcgaccgcacccgctccccctgcgtcgccacgtcgctgaccaccgcctggatcctcccggccaccgtccgcagccggtcgtaccgcgcgcgcaccacgccgtcgggcctcgacgtcgggaacgtgtccgcctcctcgtcgaactcgtcggcgccggccgcctcggcgcacgacagccccgcgtccgcctgcggcgggcggcgcggccgccgccgatagctccaggcgccggccacggacgcgtagaggaacgcggtcggcaggatgagctccgggaagcaggcgaaggtgacgagcaggaggtgcgcgaggatcgtcgtcgcggggctcctccagtggcacacgtcggcgagccaccgcgccgcgccggcggcgccggagagcagcgccgtggcgcggaggaagttggccctgctccgccggatgctccacaggtgggagccggcgtcgagcatgtactccacgacctcccgccgcagcggcggctcggcgcggcccagccgcgccgccacgacgcccaccgcctgccgcctgaggccgtcgagctgcgcgacggcgaaggggtggacgtagtgcgccccggggaggagcggctcgccgtagaggcgcaagacgctggcgagggacaggcaggtgaggcgcacggcgaggcagacgtcgccgttcttgcgcaaccccgacgggtgcagcaccacgagccggtgcgcgttggtgtacaccctgtccatctccagcgtcgagaggcgtatcctcaccttgccgatcctctggtccttgccgccgccgccgccattgccgaggttgcagttgtcgaacacggcgagcgtgagcaccgtgcacgggtcgtagacctcccaggtgtactgctcgttccaccgcggggtggaggagtcgacgacggtgcgggtgcgcacccacttgtggccgtacttggcgacgcagtacgcgtcggtggtgccccggccgccgtcggcggcggtcttcatcggggggaggccctgcgcgccgaggacgccgacctcgagcacgccgatgggcgggcgccacagctgcctcgccgtggggcgcgtgtcgctggcgtacatggcgggctcgtccatgacgtggtaggcgccgtcgaggcacgcccggaggtgcacgcggccggcgaaggcgggctcctccggcgagtgtcgcggccggtgcacgaacggctccaggctgaaccactgcgactgcgtgtgcgtggccgcggccgcgccgcgccggtcgaggcgcctctcgaagagggtgagcggcagcacggcgcggctgacgatctcgtccttgcccgggtgcgccgcccgggcctcgatgacgagcaccgccggctcgtcgaacggctccgccacgacgaacaccagctcctcgttccacgatgggctcgtcgggcggcagcacggcttggtccggagcgtcacgccgccgacttgcaccttgacgacgacgaaggcctcgccgtgccgtcccttgtcgccgcctgcgccggcgacggcgcccgggacgacgtcctgcgcctcgagcacgcttatccggaggtaccacagcttcggcgtcacgtacaccttggaccgcgtgctctgcacggccgccacgccgtcgccgcctccgcgcaccgacgccgcgccggcgtgccacgcgtccgcgaacgcctcgtcggcctgcgtgccgacccacaccgcgagcatgacctctccctgcaccgccctgccgcctccgccgccgacgtcctcgaggcggtaccactgcggcgcgagcgggctgtccggcggcacgcgcacgggcgcctcgccgacatcgaacgcgacccttccaacgtagccgtctcgcgccaccgccgccacggcgtccttgtccctgacgaacacctcgagcaccgaggcctggacgcgctcccgcgagaaggcgaacacctggttccactccggcgccgccttccgctcgtggtgccgcgttgtgccccggtagttcccgagccgcacctccacgtacgggttgcacccgccgccgccggcgaccgtgctcgccgccgccgtgagcccgcgcgccctgacgacgcgcacgtacaggtagtgcatctgctccacgaggtcgtacgcgctcgccaccctctcgccggagccaacgcccatccaaccaccgccgccgccgccgccacccgccggccacgtctccctgacctgcggccgtgtcggtgtcgccattgcctccttggccatcgccggcggcgcctgtgcacggaacacgtacggacacgccatgacccggctcaccgtcgtctccggctcgccgtcagggcggttcaccggtcggcttttcccgtcaccggcaagggaagccatgcaaaggtggcgccatcagctagtacgacgagccaccacgcaatggttttttgtctttgctgtttctaagcaaaatctttgcagaagcttgaagctatcagtgagcccacaagagtacggcttactaaggtcaagtgtaaaatggaaaaggttggtgagtgagatcgagtgatcgcgccagtttcgatggattcggaattatgggggaataaagatgagatggtggggttacttttttttttgtgtgtgtttttgggtttgaataagaacaggagtcttggtgaagattcctgggatttttctcacgaaactgcatgtgtttgtgctgctctcctgtaacctgtcgagttatttagttttcagggtgatctgcattggaattcatgtctttttctttcatgtttcagaactaaaaggaaggtttatctgtagtatcacattttttttgtgataaatgagagtggaagaaattcgactttcatataatatcttaatagaattccatgtaatgatcaatgcattttttggattctatccttttgtcgaagtggaatcgtagaacagaatgtgatacgatgagataaaatgcaatagaaacaaggatagcgaacgggttacctactcctaagggtcaaagcaagccctttgattcaattctttattcttacattaaagaatgaatcaaatctccccaagtnnnnnnnnnnnnnnnnnnnnnnnnnnnnnnnnnnnnnnnnnnnnnnnnnnnnnnnctgaggaataagggggattcgacctcctagagttcaactcccgctctcaacccatgaacaatatgagtccgaagcttctttcgtaactcccggaatttcttcgtagtggctccgttccatgcctcatttcataggtaagcccagagtggctctatttcattctatttcacttcctagcacttcctatcatttaatatccatccctttggtctaattgacataagagatgtcatttatagtctatctctttctatatatggaaagtcaagaaattctcatcgaaacatcgagaaattgtgcatatagaaaactctaaagaaagaaaaaaaggagacccatgccatgattttcaaatcttttctacttagtagtctaagtttctcgatgaggataattaattcggtcgttgcggtcggactctattatgggtttctgaccacattctccatgggtccctcttagatcttctttctccaatcttggattagggaagaaggagatattcgcgactcctggtggtttcattatggggcagctcatgatcttcatatcgatctattatccacctctgcatctattctttcttagctaaacgggtggaagatccatctaatttggttatatcatggactcaaaaaacggatctgaatgtgattgaaatgcacgatcttcacaggtatcacttttcacgatacgtaaaaggtggaatagcgattttcgaaccatttcctataagagaaaggtttccattactttgagaaatggattctatatcaaactatagctattgcattaaagaagaaaagaaactaatagaagtcgaagacgcggaatggtagtgaatagagagaaagattcttctggttttcttgttcctgaaaatattctatctatctcctagacgccgtagagaattgagaattttcatgtctttcaattctcgtactcgtaattagaaagttacggaaggagatccatcattttgcaatgaaaactacataaaaaactctggacaattcgaaatcaagccaaacgtcttaatacatatgcaaaaaaattcattattggcccaccattgattagaagatttaacttgtatgaatcgctattggtttgatacgaataatggcagttgtttcagtatgttaaggatacagatatatccataattcatttagagttacttaatagcctatttcttataccatatctctatcccgtgaaattcttgagccgaaagatggatgcatatgctatgtttcattttgctaaatgatatcaattaaacggtgtatcaattccataaattggatatagcaataaataaatcagcaaaattcttttattttagatagaagaaacttttcttctatctaaaataaaagaatgtacccttctatccaaatccaatttgcatcgataaaataaatccaaattccagtagtagatgaataattgcaaatttttgtgtgtacgagattagaataacttcaaaataactgacataattttttatttttcctgatcagaaaaatacatgaaaaagaaaggaggtagaaaaatttttggatttatggttaaagaagaaaaagaagaaaactggggttctgttgaatttcaagtattcagtttcaccaataagatacggagacttgcttcacatttggaattacacaaaaaaagatttttcatcggaaagaggtctccgaagacttttgggaaaacgtcaacgtttgctggcttatttggcaaagaaaaatagagtacgttataagaaattaatcagtcagttggatattagggagcggtaatttcatcgttcgaattttttttcttattttattagtagtcttatagtagtcttagattttgcattttgatgagcctcgttttgaggaattcatggaataatccattttcatggaataatgaattaaggaataaaggatatgagtctaccgcttacaagaaaagatctcatgatagtcaatatgggccctcagcacccatcaatgcatggtgttcttcgactgatcgttactctcgatggtgaagatgttattgattgtgaatccatattaggctatttacacagaggaatggaaaaaatcgcggaaaaccgaactattatacaatacttaccttatgtaacacgttgggattatttagctactatgtttacagaagcaataacggtaaatgcaccagaattcttggagaatattcaaataccccaaagagccagctatattaggataattatgttagaattgagccgtatagcttctcacttgttatggcttggaccttttatggcagatctcggtgcgcagactccttttttatatatttttagagagagagaattaatatatgatctatttgaagctgctacaagtatgcgaatgatgcataattactttcgcatcggaggagttgctgccgatctgccttatggatggatcgataaatgtttagatttctgtgattattttttacgagttattgaatatcaacaacttattacacagaatcccatttttttggaacgagttgagggagttggttttattagcggagaagaagctgtaaattggggcttatcgggccccatgttacgagcttctggaatacaatgggatcttcgtaaagttgatctttacgagtcttacaatcaattcgattggaaagtccaatggcaaaaagaaggggattcattagcacgctatttagtacgaatcgatgaaatgagggaatcaatcaaaattattcaacaggctgtagaaaaaattcctgggggcccttatgagaatttagaagtccgacgctttaagaaagcaaagaattccgaagggaatgattttgaatatcgatttcttggtaaaaaaccttcacccaattttgaattgtcaaaacaagagctttatgcaagagtggaagccccaaaaggtgaattaggaatttatctggtaggagatgatagtcttttcccctggagatggaaaattcgtccacccggttttattaatttgcaaattcttcctcagctagtcaaaaaaaatgaaattggctgatatcatgacgatattaggtagtatagatatcattatgggagaagttgatcgttgaaataataatagacagggtacaggtagaagctatcaattctttttcgaacttggaattattaaaagaagtctatggactgatatggattctacccattttgaccctcttactgggaatcacaatagaagtactcgtaattgtgtggttagaaagagaaatattcgcatcgatacaacaacgtattggtcctgaatatgctggcccccgggactgcttcaagctatagcagatggaactaaactactttttaaagaggatatcttgccatcccgaggggatattcccttatttagcattggaccgtctatagcagccatatcaattttattaagttttttagttattcctttgggatatcgctttgttttagcggatcttagtattgttttatcgatttgttacttgtctctcccccttctgaataagtagtggagtgtacccattgtaccgagttgaggtgatattctgccaacagcatatcatgataacaacttggctggaaattgcaggatcattcagaacaaatatttggtaactctgaaaatggtgctcgcggttcgccgctgtttaagcctggcactgaaagtgtttgccgcttgattaaagctgtaattttgtgttctgaagttttaacatataaacccagaaaatatatggccatcatttttactgaattaggcacttaggcctcactttccttgtgcgtttcgttttaaaaaagaacgatcttacagtttttgtgccctgcagtattcagcaatgtacaactgttggtagctgacggtagtctcatgtcaatcttgctctccaaatatcgtagacaaacgtaagcaaaaactcttctctgaagccagaaatgtttctatcagctgtgataattatatgataaagacgaaggtgcacattgcgtacttgtttcgaaaaagcgaaagtgattcagaggcttttggcgcctggacctggtttttgctttaaccaaagaagctcctttttttttatctcgtttcatctttattctccccagttaccatttaactatattgaccaatggctatagaagtctaatatagcattataccatttaattatttttaattttcattgggcaaatacaaagatcaatgtagggtctactatagctcttcaagaactaaattttactttgtactattatgaaatcaagatatattttttgcctactgatttgtttatcctcctcgatatttcacccgatgttttgtttttgtttttgtttctcctttcactcattgctctggtttaagtatacatgctttatcaaaggtcatgttcccagtagtagagaaatagccaatgcactacattgacttatgtagcacatcataaggcagcactattatcactttagtgccaaatggccagcagatagggtctaccatgtgaatctgaacaaaatctaataacttcacagtcttcagattttacaaagattaggtaagattgatctgaacagctttgtttaccgagttttgctgcttttattctgttctcgtcttactttcaagttgttctgtggttactacatgagatatcaaatggattgtttttttataccagtacagttattatctttcgccatatgttttctgaagtcataaaaacaactgaacgatagatgcagccaggaagtcgggcaggttttgctcggtaagcaactatagccaactacacatgtgcagatgagtgacaggtagtaccaatcttcatttagtcaagtgaatggcagcaaaaactagggtgaaatgccttgcaagtttgatcaagctttgtcagccacagccactccagttttcctctctttttcggggacaccccagtcttcctcatggcagttttggtgcttcactattggcagcaggtattgtgcattcttgctatacttcaaaatattctgcaaggaacgccatacatcaagagtacagaaacacatatgacgacagtgtctgaattgcctagaacacatcatctttgtattcaagacaaagcggtacctttatagagtacatcagcttgtataacaatgaaacgcatgaattacacaaaggtctaaaaacatgcatacagtagtggttcgtgcaatattgcagcaaaaacaagtatttctacagagttcagttgttccttggtccactgcaactagtagtagaacacatggttctacaatagcataaaccactgccagtgacagcacagctgacacggtggcacgagctacagttcagttgttctactgcagaagaatgagccattgccattgacagcacacctggcacttccagctgttaatcctagaactaggtcctcgagcagagcaccatgcaatggtaagcctagaaggagaatagcagcagcacattgagcagtttaagttatcagatatggaagcagcaggcaagagggaagaagtctgagatggactttctccccttcccaactatgaagcagagcatacaccttaacgcatcgacatgagtgtgcgcctctggatggccctcttggaaggctgagcagccgccgccttcggagttctcttcaggtttctcctcaccatcttctctatctgctctattgagctggacagtttcttctccatatcatccagaaggactggatccatcggcttggacggggtaacaagtgatgtttcagatggcgaggagaaaatcttcagactgtccttggccaagctagatgcaggggtcgcaacaatttgagttgagttgatgccaggttcaacatcaagggagtcccgaacttcagtgcaatggggagtattctgctcaggtgtctggcttcgctgctgagcagcagcaatccttaagcggcttctctgaatagcctgaaagtcttaagtcagattagctgcaccagcaaggaaaaagcaaagtagactataacattcatgtgactaacgcaagtacagctgaaaaatatcagtactcatgtcatataaattcagattcactgaaagtctatacaaatgttaatttaaattttgcagtggttagatggtggatatgtgctttgagcttaactaagaaaggccaacatcatgcccagcaaatagtaattcagaatatatatatggaaatcggatcgactagaaaatacatcacttgacttgagcaatgctatagaaacacttcaatgttttccatacaggtaataacattgtggtatagtaagatgaagccgttttgactcaaaatggcagtatcaacatatgtacaacagtacacattaagaaattatcgacctaaagcatgagtgcaagaccacaggcgctcgacacaacaattgcccaaaggagggtataacggatgccttagaattcatttgaagagagaacaaggcctcataatactacaagatcaagaaactagaaaaataattcaagatcacaaactaagctactacatgcacatacgcaaagtaaagtatcatggacacttaataggcaccaggaaacaggaaaatgcattacagaatactatgttaattgttaaacatgaaacaaaccaacgtaatgttctcagacgatcaatgcgggtaaacggcaccagaagttgccttaaaattccaactagcactttttaactaaaatatcttgttatgagtaggttactataacaaattgcttcacatggccattggttaagacaaaaatcaccatatataacgacgcggtactaaaatcttaaatagcacaaaacaaacaattccagaatcaatgtagacaaaaaataaacagcgtatcacacatttattgcattttttccattttgcaactatgatcaagtccttaacagacaccatacccactgaattgaacataccttttccgcgaggcgattaaatcacacattcacaatgtcacatcatttatactgcatgatccatatcataatctgaaagaagctttcaatcacctttgcaatcgccgtgatgtcacgcaacggcgtcctcgggtaccaatcaggaagtgggcttctcctctttgtggctgtggccttcacagcccaaaccgggggcacgttctccttgttgttcgatggccgtatgaaccgccgagccaacggcttcccggggcccctcgccgcaagagcacccggcgaggccaccctcctgatgaagaacccgccaccgccggagagctcgccaagggccgtcctcttgctatccctcatctcaggcatattgctgtaatctgcaagtagcagaagaggcaccgatgggtaagaacacgccaaacgcatcaaaagatcagggaaatgggcacatattagcctcacatccttggtcttctctctgatccttacttctactcgtatgaatcctagctagagttccttctcctcctatcccccggaaatctgcaatagcaaaatccaaagtaaccatcgatgcagcaaaacaaagcgatgacgctacccaaaaccccccaagaatctgccatacttctcacttaccctcctcagcctcctgctcagattcaaaaacctcaccagatctgcaacgacagaggcaaacagacgcatcagaacacccagcaaacagttcatcaaaaaatggacaaaacaacggacccccaaatctcaaaaaaccactcaccatttgctcgcctcttcctctaatcctgccgcttcgaacccctccacgatggcgctatgacatccaacccgccgcaaaatctctgaagcggattgctcaaataggcgaagtggagaagagggagaaattggggaaaaattttgcggcggcgatgggcgggctcctctcgaaaaactcaaattttcgattcggcgaaaaacgtggcggagagccaaaatcaccggtccacggctcacccatgggccaagaccccccccccatccagacgtccgtttgtacgacgtggacggctgagatgagcccggtgcgtggacgcggtctatcccgagcgcgccatggacggcccatttagccgagtgggccttcggcccgcgcgtggcgtgaagccggccacgcgacgccaaatttgggtaattcggggggagtgaagggggtaatccgcaagatggccaccggattcgagcatggaggaggaggaggaggagcataaaattccccaacctggcaatcgcctggagccttcgaaccctagcggggtagccgccccggatcagccgccggcgccgcccatcgccgacgcagccgacgcgggcgcggccgccatggcgccgttcaggcgctgggcggacctgccgccggacctgctgtgccgcgtcggcgacaggctggacctcaagtgctacgccagcgcgcgcggggcgtgcacggcgtggcggtcggcgctgtcgccggcgtcgccggcgctcctcgtgctgtccgacgccaggatgtgcccctcggcggcgtccctcccgacgcggcggtgcttcgacctcgcggcgatactgacggggggcagatgcgtcgggtccagcaacgggtggctcgtcctgtccatcgcgctctacggcgggcagagcgcgttcgtgctcttcaaccccatcaccaccacggagatcgtcctcccgcccctgatctacgagagcaggtgggtctccaaggtcgtgttcgcgcccagccccgccaaggacgactacgccgccgccgccatctgcgacatcgacaggatcgcctacgtcaccgcgggcgccaggaggtgggccgtcctcgaccccgtccgcctcgtcaccggcgaccagctcaccgacgtcgtctaccacgacaaaggtaaggtctactgcctcacgaggtgcggagacgtgcacctgctccgcctccccgagcgccgtcgccggaaacccgccgatgagccagggccatcagaacaaccaccagaggcaccagtggtgccgcttcctgaatgcgcagttgcaattcgagctaggcgaacccaactccaccacaactttcgcatggtctgctatgaccatcttggaccaagggatcagatgatgccgatgaagctcactgtctgttcagagacactcatccctttcaattataggaggttcgcgatcggacctctcgaaccggacctaaatgcgccggcgacggtcgagccattgttgccagaggggaacctcccgtttgatcctgccaccagtttcgctccgccatacaacaccgtgtctgcttttaccaatgccaagaacattgtgctgtgtgagggcaacttgtaccagatctggaggaatgcaagctgcactgtgactttgcagctgcccggaggcggtcaccgtcgtgtatcggagaatgaaatcttggttctaaggtactacccccgtcgccagccgtgctgggatgctgtgacagacttggggggctactcagtgtttgttgggcggaacaatgccgtgtcgatgtatgctgagggtgtgcatggtctcaagggcaactgtgtgtactggattggtgggcgtggtagggatcagggcatggtgttcgacatggaaaccgggaggtctacgccttgctatcctttggttggtggcatgccagggcctttgcaaagcacgatctgctggttcttcttgagtgatatagtgaacgccagcaacaatagtggaggaaggagagtttatcagacacgatcaaggtcccgtgcggaacgtgcacaggatatggaagagtaatgcgtcgccagattgcttggtgacatagtgggtttcaccgatcacgatgatagaagtttgagcttatgtaccatagcaaaagtgtgatctgaacgtgcataagttgtggcagagctggtgtttcaaaactgcccgtgtagccgatagtttattgcgatttgtttgttttccaaatcaattttctctgtctagttgtgcttatgtaactcgtatcatccttatatatttgtgtaatgaaacaatcgctgtcatcttgttgagcttgtattcatcatattatgatggaataagaaaatggattctgaaatatattgttgctgtagacgttctgaattgtagcaccattagtttctctgaggttccttctgtactccaagctccggttgcagaataaacccacatttatttctcattattatactaagtggattccttctccaatgtcaatcagaatcccaaactatgtacaacaatgcaagtctgaaactctgaacatctcaattcccatcctagtttctgctcaagcacaacctgaagtcctgaggcagaagtaatctgcaacctggctcgacgagctgttccactcaaggttccacagcaactccggtgaacggcggcggtggcggcagagtctgcggcgaatgcagcagctgcagcgaccggacgacctcatccatggccggtctctggtcaggcatcaccgaggtgcagagcagggcgagctccagcgccgcctgcatcccctgctgcgccgcgtgggagacggcggcggcggggtcgagtatctgcgccgcgccgccggccacgttgacccgccgccgcacccaccggacgatgtccaccgagtcgtccgacgccggctgccccgccggcttcccggtgatcagctccaggaggatgacgccgaagctgtacacgtccatgaggtgcgttggtttcttggtgcagtttacctctggtttcagcaaaagagcaaacaacttcagtgggataagtgcgcagagagccagagttttatgaaatcttgagtgcaattctgctgtggaaatagctatcctaatgaaattctgcttctgggtgaaatgtataactgaaaacacaaacgagctgatgatgcctaagtaccaaaaatacttctgaagaattcgttcaaaaaaatacactccctctatttaagattataagtcgtcgtttcaactttggccaaaatcaaactgtttgaagtttgttactattttttatataaaacttagattaaatttgaagagtttgactttgacttataatctgaaacggatggcgtacttctgaagatcataactgcattatatccacactgtcctgaactggttgcatggactgaactgtatgaatgatacgcttacctggagcgatgtagcagctgtaattcagatcagaagccaacgaagatcgatacgccttctcgccaacgacacgatcgatcccaaatccggtaactctgggctcaaaatcatcacccagcaacacattgctcgacttgagatcgcgatgcagaaagcgaggagtgtaatcacggtgaaggtacaccaacccttctgctactccgatcgcgatcctcaacctgtcgttccaccccaccgcgaacttcggcgcgcgtatcagatcctgcaagctccccatcctcaggtgctcgtagatgacgctcacctcgccgccgccgccatgggagtcgtagcagaagcccagcaatctggcaatgttcttgtgccggatttttgcgaaagttttcatgtgattcttcactgctccgaatgtttggttgcttgagcatatgaatttcttgaccgcgatgttttgcccgtcttgcagctcgatcaggtagaccttgccgaatgctcccctgccaatggcgttcttgtcgcggagtgcggcgagcagctcgtcggcggtgatcttgatcgggtagaagagcaccagcttggcggcggcgtgcagcctcctgcagacggcgaacgctccgagagccagcagcagcagcacgccggtgacgaaggacgccacggttgcggccagcgcgaggcggtttctcgacggcggcgcggccggcgcgtcgcagccgccgtccgccggcaggccgcacaggccggggttgccctggaggaacacggcggggagggcgccggagaccagcgacggcgggacgcggccggtgaggtggttgtaggagacgttgagcagcgcgagcttgaggccctggagctcggccgggatggcgccggtgaggccgttgctggacacgtcaatgtacgtcagcaccggcaggccgccgagggacgccggtatcgggccggtgagcgcgttgcccgacagcgacagcgacaccagcctcctgcacctcgtgagctccgggatcgcgccggagagcgcgttgccggagacgttgatgatgctcatcgccggggagtcgcagagggtgtccggcaggccgccggcgagccggttcgcggaggcggtgaaccggtacatggtgcggaccatgccgatgctccggggtatctcgccggagatgctgttgttgtcgacctgcacctgctcgagccgggacgccgccgcggacagctcggggagccggccggagaagcggttgctctcggcgcggaccacccgcaagtccggcagcgaccagaggccggcggggagctcgccggtgaacccgttgccctgcacctggaacctctgcagcatcacgcacttgccgatctccttggggaacggcccggagaagccattctgcgagaggtcgagggacagcagcttccggaagttgtggccgaacgccggtggcagagctccggtgaggctgttcatggagaggtcaagaacctcaagctgctccagctggagaagtgtctcggggatcgcgccgccgaaccctgacccctgcaagaagagccacctgagtccggccatctcgccgagctccggcggcagctcggactccaggaactggttcttggacaggtcgaggaagtgcagcttcgtgaggttgcggaacagcgccgggtggagcacgccggagaggcggttgccgccgaggtcgagcacctggagcccccgcagcgcggcgaggccgggcggcacctgaccctcgatgtcgttgccgctgaggtcgagcgacgcgagggaggcgagcatggcgagctggtcggggagcggaccccagagccccgcggagctgaggttgagcgacacgagcaacgcgcaccgcgacagctgcagcgggacggtctggttgaaggtgttcgacgcgaggctgagcgccgccagccccggcacccggcacagcggctcggcggcgatgtccccggagagtccgaggccctgcagcgacaggccgaccgcgacgccgccgccgccgccgccggcggtgcaggtgacgtgcgaccagttgcagtacggcgtggagcgcgaccacgtcgacagggcaccggacgggtcgttcagggaggacctgaagctgagcagcagctcctgcggctgcaccggcatcgccgccaccgccggcgctgccgccgaggcggcgttcgacggcgtggcgaggagcaacacggctgagaagaggaggaggttggcggcggcggcggtggtcgccatggacggagcggaagtgcaaggcaagaaggcgtcaggagtgtcgtagcctagcccgtgctgcggctgctgctgctgctgctgctgctgagagtgttgactccgaagcgcaatgaatgacaagtcgctgcagggcttgaccactgtccggggcgcggatcccgcgccgtcgatggacagatcaacggttgtcgactctccggggcgtccggatgagtagaccgaccatgctgacaatggagaaaaataaaagagcaagtactccaatgtagtactatcatgctagtaagcattattcatgaacatgagagaagagaggagagaaaatgggatacgaattcctagccaactgtgccctactctctccgcttcaaaaaaaaaaaaaaaagaagggaattgacctctctaacaaatgtggacatacctattcagaggaggggtccaagatttgattttatgtacgtacgagatatgagctaagtattaatggtgtagtatatatttatattaaactatcgtatgaataggttattagattagttgtagattttttagagctataacagttggctatactataaagggaacttgctctaatgctattcccagtgcatgtttcataaagagttttaatctcattaaataagatgccaagtaagccaaattgatgatatatcatgaaattcaagaaggaataagtttcatctagatgaaacatggtttacctatgccttggaaacaggatgaaaccccactgtgactgaacatttcatcctctaccttggaaacgaaaatgaaaccccactgtgaccaaatagtttcataaaactattcaataattgagtgctatgaaaccaagaaataaaattgtgcattggagacatttgtttcattcatcaatccaaacgtctttagattacgtggcacttttgaaaaccacaaaataaaatcgaatggcctaagggtgtgtgttattttttttcttttccaacttctactttcctgtttttcacaatcatattttctaaactattaaacaatatttttaatatatatatataattgttttaaaaatcatattaatttatattttagttttcatagcctttactgtacttaattaatcataccgtacgttttactacagaggaaggtatccaacctttcagataaacaaagcctaaaaatattgaattgtcagctgcggcgtgtgcagggggttgtacaatgtggcaggctgctgtggtgtcggatgcactgacattttgcactgtgctccgcttggacttttggggtggagcaggaggcgcttttggaggttggagtggcgcccttgtcctgcgcatcgggggacgacgacacgatgtgcagtgcagtgcagttcaccaccagggagggagggagggagagatcgttcgttcgcgcaaaagacgtgatggcgtcacttccttggatggtttgtagttttgtactacagtactaggcacttgattgtgctgtaccatgtacgcccaggcgcccagttattttatccgcaatgcaaatatatgaattttacggggaatttattaaaggaaatgaaccaacccttatgaaaatcatgtactccccttcaatcattggtttagtttgctccaatgcattgtcaaacaaatcatatgagctgcaatcagtgcctgtgggaaaaagttaccttcaatcattgggcaaacctgacaggatttattgaaattagtaaaacaatgctccatccgtcttcaaatatatagatttttagtgtttgaaattagttttacaatatggactccttaactcctttagaacaaaggtaaacagaaattttgaaggatttgattcctaatttcctactccgtccgtcccataatataacaatctagtaccgaatatgacacttcatagtacaatgaatctggacatgtttcctatctaaattcgttgtaccataaagtgtctcatccggtcctaggtttttatattatgggacggagggagtatgtgattgctcggaacaaaggaatagctctcctaaatttctttgaaattcctagggaatgagttgtttcatacgaattttagtgggaggctctacggttctacctcatatattttttttcaagaatacgcgaaagatttgcgcatcttttgaatacctcatgtttttcacttccaatgacaagttcctatgatttaggtgagtgtcatccaaacaatagttttaaaactttcatgtgtttttaattcctataggattttcaataaacacaacattctattcccgagttcttctgtttccgtgtgttttgcattaatgtgttccaaagcagttctttaactttttcaccaactccctcatttcaaccaatcacactcattactcattcggtttcactttttaattatcataaaaaaactccaaagtacttgctttctctgtctcaaaataagttaacctagtacatgatatgatatattttagtattatgaatctagtacttgaatatatcatatctcgtattagattaacttattttgagacaaaatggtaaattttagaacggagagaatactacactgatatttgaaaccttaatggttaacaacactaaaattgttccagcaacaagtccaaacaaaagaagtacgagtactccgtataataaattatgagattggcagataacagcaggagggggacaatgagacgagggctaagacacagattcttgtcctttgtcctcaaatcatctgccttccatgagttgagtcaacgtgaaaaatccttttagatttgagctacccgtgagttttcgttgattccaagcaaaaattgggctattctttcagagtactactagtactgtttacaattcataatagcacaggtgaaatagccagaatttgtagcctgtacagtacaaaattgcctgatttgaaggcaatcatggagccaaaagatgcagcaggatagcattactagtactacaattttttcagatgatcacatcaatcaataaataaaatgcgccgggtgaataacctaccgataatattaaatgttgcggtgttcccatcatattctacaacctttactttcctttcttttttccctgatttttcaatccacaaacttcgcgtagccagcacagcatgagcgatggccggaaaaaagcacacaaaactggtcacagaacatggctcaaattcagttccaaaaaccagcctgttactaagctctgcaactaaataaatagtatttacgagaggaggaggaactatgagataacactaattctgaggtctttctgcgagtttcatcaggagcagtcaaatggtcgcaccaacgtcctgtttttgctcagcacgtgtgtaggtgaagctccgcacaactgggcttatcaactgattaccggtaggtataggtgtgctgtgaccaggttttgccgcatcgacagtatcagcattatcacgcttccattgtaagctccgagcaccacctctgagtggtagacgcccacgcatagcaccaggaaatgctggccttgggtatgcagttctagtgagtcttgaagggaatgttgatccccgagaaccacggggccagccagactgttgagacacttcgagagagttctttctaacaacctgcagtatacacaattaattgctgagatcatgaatgcatggcaacttggcaagccatgaagaggaactactgaaaaggatctttctgccaggaattacaacactgaaaaggttttgactgcaatggcaatgatttttttttattttacagtttaccaacaggtatctataaaagaagaaaatggtggtggcagtgaatctgccacccaccaactctgttgtattttttaccacctatgcttttatgtactttaattttataaaacagtacttctacatattgttaatatcttatttcatctctagaatttaagtttaccatgcaaagacatccacagggaatcagggatgatattgttccaaaaaccttacaaacttgttccaaaatatgttagcacatgcataattcatttgtatccgtagcgaagcgcgggtatttagctagtgatctaacgataaatacacaattcagctggcaatttgtgtgcagtgaagcagctcaactaatatattctcccatacaaataaaactatagcgagcttactagagcagctggatcttgcatagcgatccacaatatttaatagagttgtagagttttagtgcacaatagaaaggtcaacatggggttttaccttgagcatgcgcgacataaaagatgtgttgtcaagagttagggcttgttctgctgactctttgtgcaagaattcaatgtacgctgagctgaatggacaacacaaagaaaaaaaatgaggataatgtctaaaataactctgctgttcaggcttcagaatgaagagaagacttggaattcataccctgttggctgaccagcaatatcagtcacaataagagttttaagcacagctccaaacttattgaaatgacgggaaagagcatcttttgtagcagcaaaatgtacctataaacacgagaacaatcgttagtaaatagtaataaaggcagcttctcagcttcacaaatgaaatggtagtacgagacacttacattggaaagaaaaactgttctagaatcagtgccaccttctggctgacctgtactgcatgatccaacagctggaagggggcaagaggaggaaaatttctgagtcattgagggtgttgaaaaaaagccacagaatcaacatgtaaaataagtaaggttaggggtttaaaaagtctacacagtagagatgttttagatgatgactttcaattaaataaaggtgtctcataatcaaacatggtgttgcgtgctgatataaaagctcaatgcatcgtgtagctgtgataatcaacactcaagtgctacataccaagtg

SEQ ID NO: 15474 - DNA, 679 bp, Oryza sativa
ccaaatccagcaatgatgctgcaagacgtgttctagacttcatgcttggatggtattctttgtctcacacataatttcatcattatgagagtgaatattctaactatgaaatcccttctaggtttatggatcctctcattagaggagactacccactaagcatgagagaattggttggaaatcgcttgccagagttcagcaaagagcaatctgaaatggtcaagggtgcattcgattttattggactcaactactacgcttcaagctatgctgataaagtactatgccgtttgccctttcgacttgtccgttgctttgagggtgagagaccgaggtgaagcatatcttgactcccagcccgatgcagtaatcctggaaatcggcgctgatgaactgagagccgttgtcggttatgatgcggtgcggtagtccgtatctgcagaatatccccttgatgaatttgatggcgttgtcggccttgatttcccccgtgggtactgctttgatccacttagtgaatttgtctatcaccacgaataggaacctgtagccgccctgtcctcgtgggaatggcccgagtatattttacccccagcatcgagaacggccaagttaagagggatagtctggagcgcttgctcgggtagctttgtgtgcttactgtggaattgacaggctt

SEQ ID NO: 15475 - DNA, 24011 bp, Oryza sativa
acctttaaacatgtctttaacttgtgtttaatctgtgcttaaccgaataaacatgttttcataaattgcgaactgtcaatatgatctttactaaaattaaataattctagagtacttttgaccttttttgaaagattccacaaatagaattgctgatgagagttgaaacgttgttgcactgagtttctctatatgcaccaaaatgttgaatggaatatgaaaagtctaatgcaagcacttgcacaagactaactcagctagcttagcatgtggtagttctacatcagcgataatgggttaatttgattaagcacttgcgcattaaggtgttttttactataaaattgagtagatgggtgagcatttacaacaaaataacttatgtgatggaacgtcaaactttaagtgacttatagggttgcttttgtaatttttttctatattttaagatgaagagaataatctaaaattttcaaaatattaattaacacgtttctttctgattttctagcattccagagcgcttgccacgaacgaactatatctcacttgattctacccaacttttgagatgaaaattttcttttgtagaagcttccatgtagaaacgtagaaactttacaaaggcagtgtttagttccatgccgaattttttttttacatatatggacacacatttgaagtattaaacgtagactaattaacaaaacaaattatagattccgactgtaaactgcgagccgaatcttttgagcctaattaatccgtcattagcacatatgggttactgtagcacttatgactaatcatgacataatttggctcaaaagattagtctcgcaattttacagtcggactgtgcaattagtttttctttttgtccacatttgatgcttcatacatgtgtccaaatatttaatatgacggaaaagttatggctaatcactgtagtactgtagcactatgcaattagtgtagtacttatagttaatcatgaagtaattaggctcaaaagatttacagtcggactgtgcaattagtttttctttttgtccacatttgatgcttcatacatgtgtccaaacatttaatatgacggaaaagttaaaagtttaaagaaaaaagttggaatctatacacaaccaaagatagaattcaaaaaataagttaaaagaaataccgtatgaacttcttattggccctaaactgtcccaaacatgcaggcacgtgcgagggagaactagcttgttcgaggtgccctcgcgtacatctctcataatgcacaaatcggtggtgaaatatataggaaaagaagattctccaaaaaaaaaaagatcacgtatgtgattctctcaaaaaaaaaataggagtgcgattctctctttaaaaaaaataggaatgcgattctctaaaaagaaaaaaaaagaataggaatgcgatatgtttgtgctcgcgcgttccggcggtgttagcttcgatatttttcttaaggtacgggtgtgatttgtgccaaataaggttgcaatatactgtaactccatataggactagctagtttggtagcaagtcatattggattgttgtcacatccgcagaattgtgcaagaaattcagatttttcacgagaaatccagttagttgctctggttacatctaaacacagaaactgggaaacatccactgtactcgctttgagatgccgcgaattattaaaggcattgaaaaagatacgagtgatctcttcatttaatataatacgtaatatatctcacggattttaatttagactacactgtttaaatttatagaactagaatatattatttcacgtagtagattaacttattttaggagagagagtacataacttgacggtgttccatgcatcatatgcatcttgtggggattcagaactgcaagatagctatacagcctgaacccgaacaagttgtcagcggcaagagtacaacctgttggaattaatgaataggccttagcccactcgaagattaattctttggaaaatcacaaaagcccacctcatgggatggcatgcatgtggagtttagtaccaccttgcttattctaggagagggggacctccttaaaagggaggatgccctcctagccacttgaagcatgtgtggtggagagaagaggggaaacacacgcgcgcgctcgctcgcctcgcctggcagggcaggcggcgcgtgtgcacgacgtacgcgtcgaatggtccgaaaaattggctcctcacccttgcgcagatgcagcctccttttgcagttttgttttgctgcaaattcggattcgtttttgttttggaaacgttccgaaaaatccggtgcgtgcaaacggcgtggagtccggataagttacgcgcgacttatccggttcggttacgcgcagtagagatcgtgcgggcgccctgatcaagcgacccttctctatataaaccgacccgccgtcttcacgcaatatatgcgaaaatcaatctagggtttgcctcctactctgtactgcgccgtcgctcgtagactactccatcccgctcgtcggcgtgcaccagcgatcgggagagcaggtctccggaacctctgcctttgacgtcctgcaccgggagaaggcggcaataaggtttttgggaagcgcttcgcgcgactgctccctgttcgttcgcgacggctcgccttcctcttcgctcgcgtgtttcgtgccttcgtagacacctgcgaaaagttttgaccaagcagccggtcttttcgtcacctcggtacgtgttcaatatgttgcgcatatttgatctgttcatgttattctgcgtagtttacatgtgtagatctaatgatgcgttcatgctagttttcatctgtaatgtcatgatttatttatgtaataaattaaatcattatatgcccataatatcaacacaaccaagaaccaccaaaaatcattttcctatctctcttcgtgcacgcttaggtcattttcaacccaatgagtaggatagtgtccatagtattaaataagctgtcatttagaatgaaagatgatgtggcaaagtgaataaatgatgaaagagaatgaaaccatgtcttgcatgagatatggtttctacacaacatccaaaatatcatgtgagataagtagcattaaatttaaatatggaatagtggtgtttgtattagaagagtagtgcctagaactagtttcttgatgatatgaagtttattaaaactatgtttagtgtcttgggttaaaaatggccttagcacgagcatctacaacagttttttttcctgattactagtactcccacgtggccacgtcctaccccatcaccgccgacaagtccaaactgatatgcaagtccctatttaagttgagctgtctgtgttcatcagcccatcactctcttctgtctatgtaggtcatggcggttgcaggggcaatggtgatgtcaggtgctcttctccttctccacctcttagcttttacctgcgtcgcctgcaatggcggcagcgagctgccgccgatcagccggaggagcttccccaaggggttcatttttgggacgtcctcgtcgtcatatcaggttaggctttcgcttcattcttcctacaagaatttgggaataatttcataaaaactgccgctgaaactaaattatcgcaagaacatcagttggaacagaatgtgttcttttcaaattggaaaaaaaaaaggggttaatttcaagacagtataaatgaatagccccaccatgatgctttctattagtagtagaaagtaatatgaaccggtaatttcaattgatcgaagagttcggatttatttgtactactatcccagttaacagtagtagaaatatggagggatattattgtcaaaaagaaataagtgtggaggggtataatcatcatttagcagtgactaaaactttttttttctttttttagctttttcgatggaatatgagcaatgtcaacacaatggatgacgtcgtattaatctaaaaaggaaaacaaacataaataataaagttacccctaataatggtattaataaactactaatttatgcttgataacaaatactagtttagattatttttactggtagtataattcactagcaaatagcaccggagcatcgatcatgaatgaaacacatgaaaaaggagcagatgaagataaattgtgcaactagggtacctcatagatatcggtgaccagcaaatgatggcactgaaaaatgctcaagctgccctataagagtaagaataatgctcatatttgctggtagagaggaattcaagccctgatccaatacgtattcagtagtcaattcaactgtttcgtgattccttctcaactcatcacgatgtgctctgtttcaggtctgaaataaacctgacgaattgactgttgttttacacatgatgcagttcgagggtggcgcagtgttgggtggcagaggaccaagcatctgggacaccttcacacatcagtctccaggcatgttaactgtaaatggcaagaaaggaaaggcaatgagacattattttgaattgaaaatccgccaatttggcagacaaaatcactgacagaagcaatggcgatgtggcttgcgacagctaccatctctacaaggtattagcaattactcatagcatttttcaagttgctgtcatggccatttctaattgatcttttgtaaaggttttagtcaaatatacacaacatgtttgccagtctgcctctgccacgatctcttcaaactttaattctaagattctttaaaaggactaatttagtactcatcctgagggcctggccaccaaaaaatgcaggaagatgtgcgcagtatgaaggagatggggatggatgcatacagattctccatctcatggtcaagaattcttccaagtgcgtgaccatatcttttaggaaaaaaataatgatagatacaatgaactgtcatagacttaccaacagatagaggttatctaaatatgttttctcttttgttctcaagcacaatattttgcatttctttttcaatctccaaggtgatccaaccagggttaaaatctcactgacatggcagatggaagtctgagcggtggagtcaacagagaaggcatcagctactacaacaatttgatcaatgagctattatcgaaaggtatgcaagtctcgtcttcaccatttactttcaagttcagaatctagatgcagcttgtgacaaccattagctccattctttggtatgccagatttctttattcaagatgcaaaaataatcttatacatttgcaggggtgcaaccatttgttacccttttccactgggactcacctcaggcgttggaagataaatataaagggtttcttagccctaatatcatgtaagtcaacaattcttcagtacctttttttatcttttgaaaccgaattcttcggtaccttttgctgaccaggttaaataaacactaacttaaaaaaatatttggggcagtgttacctacttcagttataaatattgtcaacctcatcatgcacatcaattggattttttttagagtaccactgagtgaatgcgagccgtttattgtagtagatccaacagatcatatttgtttctactgcacctattagattgagtagtagtgtagtagaagggtattttagaaaaaaaaatacatggcattgatgtaaatacgtagttgttgaagggttccgtagttcatcgctattacccgaaatttcaatgtcaacagcttgtggagttctcttcccatttttgtcgcaaatactcactccttcctaaattgatcatcatacaatggaatctaaaatttctcaaattgatcaacatataaccgtatggacacggattttatcataatacaattaattcagtatgggagaatgtgtgcatgctagggtgtaattgacatgatgttttaatcaacacatgcattatggaagaacgtgtgcatagtgtcttgattgatgcaatttaaattatcattagtcttggtacataaacatatatgatgatcaatttgggatggagggagtattgtttactgcgatttgtggaaagggaagtcgggaggtgttttgctttgaacaggatttatcatttaaccgctgtttgcactgacaccagccctaatagtgctccattgtgatagtcttttcagctaaaacatctactgttacttgcaatcaaagaagtgctaaagttactgactgtgaagaactgttgcagaaatgactataaggaatacgctgaaacatgcttcaaagagtttggtgaccgggtgaaacattggatcaccttcaatgagccttggaccttctgctctatgggctatgcatctggcatcatggcaccaggccggtgttcatcctgggaggtgggaaaatgcagagttggagattcaggaagggagccttacactgcatgccatcaccaactacttgctcacgcagaaaccgttcggttgtacaaagagaaatatcagttcactgaaggaaatgtcaggcagttgcagttcatccgtgataataatttaaatcgaagatccgcaaagttaagtttcataatccaaaattatttattgcttggtattcaatttcagctggggcctggtggtggtagtagagtttatcagtagagacattagcggatcttacattgttatttttcattgtagtaaatttcacaaaaatacaagtacttcatacaaactatcataaaactatatatttaacatgttgtatcacaaagctataaatttagcaaagttatcacaaaactacatatttaaagccaagcattacaaaactacagctttaatattatcacaaaattacatattttagagtttaaatcccaagcactactattatgtttgagctataaaagttgtagttttacgattaaattggtgctaaacttgtaattttgtcataattttgttaccaaatctgtaaatatgtgatacttcatcttaataaatttagctctaaatatataattttgtttttttgaaatagttaaatatataattttgtgatacaccgtcttaaatatataattttgtgatagtttgatcaaaatatatgtagtgtgaaatttactcttcttattatgaactgtaatatggtaaaactcgatgaaacacacaccacaataccaaatagtcaatatggataagagaaatcctagaatcctaagaagaaaaataaaacatttggcccttaatcacaaggtcaggtatagaggtcaaaataggtaagagagatatttatttgtttattatgcaaggccctccagactcaaggggaaaacataatcctataaattctcacacaaaaacaaaacatcatgtcttaatctcgatgccctaatacagaggtctggatctattagttaggttggagatatatttatatactaaaaggggaacgctccggtgctttctacttgtaatattatactatgagtagaattaatcctgaccgtttattttaaagggtagattagtaatctcctagtacatattaggggtaattttggctggaggatgatttctctgtctcattcgcttaattgcatcaggcccgacgcaggaactgcatcttgcatgttacttatcgcgactcctcccggcaggtggcggcgcggcaaaaattgccggcagcgctttgtaatctctgtttggaccagacagcaatactatgcaatgtgcgactggttgctttccagcaggtactgaaacccatttcacgcaggcattcattagacaactgctagtctgctaccttgaaaactgaaaaattatgaactcgcgtaatagcagataaatctgtcgaaaagctgtttgcaagtaacgtgatggtgcatgcacataaataagtgttaaatcgatccattcaggaagatctaaacagccaaatttaacgtataagcagtagcactcacgatttctcttccatatccatactgtaattgctctgaagccatagacctgctagtagtcattccataagctgctggtcgggcgcgacgaccccagcccgtcccctgtccatgaccacagcgcgacagcgctgtcaccccgcttccgaattccgatagctactgagcgcgccgtcggggaggagggagccagctgcagcagtccgtgggcagatggattgataggggaacggatgcgtggtgaccgccgttatgtgcgaagttacaatattatccctccactccattttgcgatggactattatgtccttccacttttctactacccttaattgacgtggaagtataattagatcaggtacattagattaaaaattatcaacggcttagattaattctactaccagtagaaagcgccggagtctcgctcatactaaaaacaatgaaaggcctttagagtcgatatgaaaaaagaaaaaaaataaaagcaaaacattcaccattaatcttggcaaaagatcgccagttgagttattttcaaaattcaaacatatatcagtagccaacaacacagttatacgaggaagttgaaaccaacaaacatgtaaaatacaatttgcaaataagcattaatgtatatgatagctagctgcacaatttgtgcaggtaacttggctaaatggctagcaagttacttttttaactgcagcgctattttatatcatgcattatcatgaaacagattcctatcagatacatagacatgcgcatactctagcctaccgttatattcaaaacttctgcactttactacgcaataatatgttctaggccttataatttgaacatgaatgtagatatgcattagtagttagtattgtataagcgattgttgtggtgtatgatagtttgagtgctgaagctgagtctgtttgctagtagatcaaggctttagcttcagcactcgcaacatcacactccacacacctcacaatgaccaaatgcttatcaaatgcaggctttacaaaaggggaagattggaataattttaaatgcagactggtttgttccattgtcccaatccaaatccagcagtgatgctgcaagacgtgctctagacttcatgcttggatggtattctttgtctcacacataatttcattattatgagagtgaagattctaactatgaaatcccttctaggtttatggatcctctcattagaggagactacccactaagcatgagagaattggttggaaatcgcttgccagagttcagcaaagagcaatctggaatggtcaagggtgcattcgatttcattggactcaactactacacttcaagctatgctgataatgatcctccatcgcatggccataacaacagctataatactgatgcacatgctaagattactggtgagcaacattatctcatcatgaatatgtgataaatattggtttggatacatgtattgtgtagcttgtttttgctactatgtgctaaccttgtccaattatgctaggtagtcgaaacgggattcccatagggcctcaggtgacctactactttgttatccacagaacaaattcctagtaaatcaattgatcaaaggacatgattgaaaactcaacaaacaacatgtgtgtaggctgcttcgttttggtttcacatctaccctgaagggatctgtgaaatgttgctttatgttaaggagaactatggcaatcctaccatctacatcactgaaaatggtaagttccaacaaacatataggtcatacagtttctcagcatgtgtgcaaaccaatactactgtataacaccttctgattgttggttttttttcaatctagacaatagtgcacataggacttaatagtcttctcctagctatgtaaaaaaagggcattatcctcttctagaagtgaattaacattattgattctttctaaatacatcccaaggtgttgatgaagtcaataataagaccatgccgctcgaggaagccctgaaggatgataccaggatcgaatactatcacaagcaccttctcgccctgctaagtgctatgaggtcagaacatcaattcagacactcagctatcagtagacaacttaaagatggtactaacactgcattattccatatgcctccacagggatggagcaaacgtgaaggggtactttgcatggtctctgcttgacaactttgagtgggcagagggctacacagttcggtttgggataaactttgtggattacgatgacggaatgaagagataccccaagaactcggcccgttggttcaagaagttcctccagaaatcaaacagagatggaaacaaaaggttgaaaagagttgcatacaatgccttttctaattgaacatcgaaatagtatataagttttatgagttaagtacaatagatgaaattggttcgactaaattaataaatctcactctcctcttcttgcatgtttgcatctctctcttgcatgttacacaccttctatcaacatatttctcaaaagtcgaaactataactttatacttttattgattgatttttctttttagaatggtgtgtccataaccttagaatgccattactttgccccaaagcgatgttgttttttttttgtcttgctgagaggatgtgggattactgtatgttgaactcctcatcttatgatctcatccatgcgtggatttagcccaacaaagcccaaaagttctatctgcccacacgccaggttaagctagtttttgacgtgcgattgctgctgtaggggtggaaaaaaaaaagattaggagcttggttggcttggctcggctcgtaagccaaacaagtcaagcccaagcctcctatttagctcgttgttgaaatgagccaagcccgagctggctcacgagccgtttgttttggctcgcaagcctaggccatcatgtatttatatcgattattttatttttcatagagttattatttgttaattaaaaatttatcattaagatttttaaagaattgaatatataaacttatttaaattttatatgttgatgatttgatttttttaataattataaaatataaatgaataggtgttttaacaggaaggcttgcaagctagctcgagccaaaaaacgagccgagccgagcttaagttttagcttgtttctataactaagccgagctcaagtttttgaataagatgaacggccaaatatgtttaaaaaaatcaacggcgttaaatatttagtgacgatggagtattaggaatgtgattctctcttaaaaaaaattaggaatgcgacaggtttatgctcgcgcgtttcgggcggtaggagctttgatatctcttttgagataggtatggccgtgtgatttgtgccaagcaagattgcaataactccataattaatagtgctatcaggttggtagcaagtcacagatgccacgaattagaagcagtgaaaaagatacaggtacctaacttgatggtgttccatgcatcttgacttcttgagaagctagccatacggcctgaacctgaagaagttgctagcggcaagagcagaaccacgaatgtgcttcgtgcacgttatcagttatcacgagcatctaaagttgaatcgaccgctgtatcgagccaaagcaaaagttaaaatttaaatttttgaacttgattttaagatattttaacataatttctttttagcgttggtttttaagtcgttacgaacaaatatataaaagttttacctataaattattttttatttcctaacaagtcatattagtgaatatgggcaaccgatgaggctctaggactctctccgtttcaaaataggtccatttttcacccaaactactcataccaatacaaacaaaagaaactagaatacccctattttatctaatcttaatacaattatttcctactttattactcctaatgcaattatttcctcctttcacaaactctgttacaataattactcaaaatgaatttattttgagataaatgagagaaatcaaaaataaacttattatgggatggaaacagtgtactcccactgactactgatgggtgtgttgatagtgttttgtcagggtggtcaccactctgaaaaaccattatccccaccttgtccacaagtccaaacacatatcctgatatggtattaagcaagtccctatgtacgagaggctatatgttgggcaccgtttgtgttcatcagcccatcactcttttctgtctatgtaggtcatggcggttgcaggtgcaatggtgatgtcaggtggcgtgctccttctcctcttggctttcacctgcgccgcctacaatgacgccggcgagctgccgccgatcagccggagaagcttccccaaggggttcatctttgggacgtcctcgtcgtcatatcaggtcaggcatccaacctcatccttcctacaagaaatcgagaagaatttcataaaactgccaccgaaagtaaattctgcaaggacaacagtcggaacagactgttcttttcgaaggggaaacaaaagtacgaacagaatgtacaaatgaaacacatgaaaaaggaacaggttaagataaattgtgcaactagagtacctcattgatgtaggtaaccagaaaatgatggcactgaaaaatgctgaaatttctctaaagaataagaataatgctcatatttgcatgtagagagaaattccatgatccaatactgtattcagtagtcaatttaactgtttcctgattccttctcatctcatcacgatgtgctctgtttcagatctgaaacctgacaaattgactgctgtttcacacatgatgcagtttgagggtgccgcggcgaagggtggcagaggaccaagcatctgggacaccttcacacatcagtatccaggcatgctgactataaatggccagaaataaaaggtcattacattattttggattgacaattctctaatttggcagacaaaatcaccgacaagagcaacggggatggtgcttgcaatagctaccatctctacaaggtattggcaactagcattgactttagtactccctccattcctaaatgatcttcatatttcacctaagcagcaagaccaaggagcagttactatcccatctatccgtgcatgtcgcttcatcaattttgcatgccgcatgcaccagccaatcagctataatgcattaattccacgcatgcagcagctcccaacttaactctcacagagccaatgcatgcatgtagtgctgcttaatacgaagcaccattatcgtctacccatgatttctgctgcttcctaatgaaatacgaaggtcaaattgaaactttttacttttggtaatgcgaagatcatttaggaatggagggagtaagggttttaattaaatatacactccatgtttgccagtcttcctctgccacaatctcttaaaactttaattctcttctttaaaatgactaatttagtactcatcctgaggcctgagggcctgatcaccaaaaaaaattgcaggaagatgtgcgcattatgaaggagatgggaatggatgcatacaggttttccatctcgtggtcaagaattcttccaagtacatgactatatcttttagaaataaaatgataatacatccgtcccaaaatataagggattttgcccatataaatcccaaatattttgggatggaggtagtagatacaatgcactgtcatagatttactaacagacagcttatttaaagacattttctcttttgttctcaagcacaatattctgcatttctttttcaatctccaaggtgatcccaccagggttaaaatctccctgtcatggcagatggaagtctcagcggtggagtcaacagagaaggcatcaactactacaacaatttgatcaatgaactattatcaaaaggtatgcatgtctagtcttcactatttagtttcaagttcagtcactagatgcaacttgtgacaaccagatttctttattcaagatgcaaaataatcttatacatttgcagaggtccaaccatttgctaccctattccattttgatacacctcaggcactggaagataaatataaaggatttcttagccctaatatcatgtaagtcaacaattcttcagtaccttttgctgaccatgttaaataaacactaacttcaaaatactagggaccgtgctacctacttcagttaaaaatattgtcaacgtcatcatgcatatcaattagaatacccgaaatttcaatgccaacagcttttggagttctctttccgatttttgtcgcgaatattgtttactgctatttttggaaagggagtcaggacgggttttgctttggacaggatttaacccctgtttccactgacaccagcctcaatagtgctcccttgtgatagtcttttcagctactgttacttgcaatgaaaaaagtgctaacgttattgactgtaaagaactgttgcagaaatgactataaggactatgctgaaatatgcttcaaagagtttggtgaccgggtgaaacattggatcaccttcaatgagccttggaacttctgctctatgggctatgcatctggcaccatggcaccaggccggtgttcatcctgggagaagggaaaatgcagagttggagattcaggaagggagccttacactgcatgccatcaccaactacttgctcatgcagaaactgttcggctttataaagagaaatatcagttcactgaagaagctatcaggcagtcgccgttcatccgtgataataatttaaatcgaagatctgcaaagttaagttccataatccaaaattatttattgcttggcattcaatttcagctggggcctggtggtggtggtagagttttttcagtacagacattagcggatcttccattgttatttcttataattatctataatatagtaaaactcggaaaacgaaccccatagtcaatacggataaaagaggaatcctagaattctaacaagaaaagaaaaacatttggccattaatcactatgttaagtacagaggtcaaaataggtaagagagatatttatctgtttattatgcaagaccctctagcctcaagaaaaaaacagaaatcctatagactctcacatgaaaacagaaaatcatgtcttaatctcgatgcaccctgatacaaaggtctggatctgttgattaggtcaaagatatcagatatgttattttattatgtatatactaaaatacaatcaaaggcctttagagttgatatggaaaaaaaaaaagaaaacaatattaaaaagcaaaagcattcaccgcttatctcggcaaaacatcatcaattaagttaatttcacatcaccagttaagttattttcaaatacaaacacatatcaatatccaacaaaacagttgtacgaggaagttggatccaacaaacatgtaaaatttgcaggtaagcattaaagtttatgatagctagctgcaaaatttgtgctggtaacttggatgaaaggctagctagttactttgttaactgcaggactattttatatcctacatatcatgaaacagattcctatcatatacacagaaatgtgcatagagttatattcaaaacttctgcaattttctacacaacaatatgttctaggccttataatttaaacatggatgtaacagatatgcattagtagtcggtatcgttttaaggaacaacgaaaaccctaaccatgcatgcatattgagtgcttattttgtttacaaatcaatggacttggtttcagcttcagcactcacaccacacaatgaataacaagatgcatatcaaatgcaggctttacaaaaggggaggattggaataattttgaactcagagtggtttgttcctttctcccaatccaaatccagcaatgatgctgcaagacgtgttctagacttcatgcttggatggtattctttgtctcacacataatttcatcattatgagagtgaatattctaactatgaaatcccttctaggtttatggatcctctcattagaggagactacccactaagcatgagagaattggttggaaatcgcttgccagagttcagcaaagagcaatctgaaatggtcaagggtgcattcgattttattggactcaactactacgcttcaagctatgctgataatgatcctccatcatatggccataacaacagctataatactgattcccatgctaagattactggtgagcaacattatcatggagtggtgtacctgttttgtgcatatgaaccatggaattccaacatatggcaactgctcgacacaacatattaaaaaaacaaatagaatttggtcagctcacatcatagcctttgaggcattgtcaattgcacactttattttccctcgaaaaacatgccgactttatttgaaaatggcatgttacatgagcatcccagctttcctttcatgcatgaaatgaatgtggagtgcttcaatacagtataatggctatgattagtctggtaatgatatctgtttaatgtgtgtgaagacaaaataaaaaaaaacactatacattttcaaacatgggggtggcaccccggggtgctcaacattatctcatcatgaatatttgataattggtttggatgtgtagcttgtttttgccactgtgctaacatttcgcaactatgctaggtagtcgaaacgggattcccatagggcctcaggtgacctactactttgttatccacagaacaaattactagtaaatcaattgatcaggtgacatgattgaactctataaacaacatgtgtttaggctgcttcgttttggttttacatctaccctgaagggttgcgtgaattgttgcttcatattaaggaaaactatggcaatcctaccatctacatcactgaaaatggtaagttccaactaacatatggatcatacaatttctcactttctcagcatgtgtgcaaaccaatactactataacaccttctgatttgatttttttttcaatctagacaatagtgcacataggagttaggacttaatattcttctcctagctatgtaaaaaaaagggtattatcctcttttagaagtgatttaacattactgattctttctgcatacatctcaaggtgttgatgaaatcaataataagaccatgcgactcaaggaggccctgaaggatgatatcaggattgaatactatcacaagcaccttctcgccctgctaagtgctatgaggtcagaacatcaattcagacactcagctatcagtaaacaacttaagatgctactcggtaacagtgcgttattccatatgccttcacagggatggagcaaatgtgaaggggtacttcgcatggtctctgcttgacaactttgagtggtcagagggctacacagttcggtttgggataaactttgtggattacgataacggaatgaagagataccccaagaactcagcccgttggttcaagaagttcctccggaaatgaaacagagatggaaacaaaaggttgaaaatagttgcgcacactccctttttctcattgaacatcaaaatagtatataagctttatgagttaagtgccataaatgaaattagttcgtaaataaatctcactctcctcttcttgcatgtttgcatctactatctcttaactatatgtacatagctaagcaaaggataaataccgtatgggcatgtatgtttgtatccaagagggatgctctaatgaaagatggacatgagaagtagttcttcgcacttaaggattattacacaacgtatatgaaaaaaaaaatgtactccttgtggtaaaaggagaaatgtgcgttccataatgcctacaacgcactcggaattggctttttatacggcattaatcaagcagtggtatactggtagttcagatctatctgcaagtttgagcgatcagaaagaaatcggcacatgcagacggggtacttaccggatgctcaccctggggggatcgggaggctgccgctatggctgatgaggcgagccggtagcaaggtcgtcgctgctacctagcttgcagtgttgccgccttctccggtggggggaagggcaagagcgcggagggcggctggagtgcggggggcggagtgtgcggtggtagccatccatggattcggagcgtgggggcggaggcggagaggagggtgccggccgacggggcgctagcaatggcgccgccgcgggagcagagatcggcgagccggcgaccaccagatcacggctatgaagccatccagaatcgaacacgtatcgccgtataggtggtttttgatgttttttttttgttggggggggggggtgttaaaagaaaataatgctacaaataaggtgattaaaaataatatgaatcagtttactcaagtttgaaaattttcaataaaatttgttaaaatatgtactctgtataaaaatttatataatctcaatccttatttaggacaaaagttctaactcaacaaagtatgaagtttctgtgatcacacgatgaatgtgttgtcttttatgtgtgctcacttggctgttgtttttttttttttttgcttgaatggaatgaagacgaccatgataattttttttcttgatgatgataggcctgatgttatttgtgcacatcaaaacggatgtgttcatgtgaaaatgggttctagtctgcctaggcacacttagcaccctgtgagtaccccatagcaacaaccagagacatgccgttgcaggggaacatacgtttccaaataatcattagggtaagaccctattaaagtgaaggcatgctgatttatcttagacttggtaggtcagttagaatgttctctgatgtcatagagattagaatttagagatgataagcaattaggagattcgagagtgaatagatgtggaatacatgaagaaaggagtaagatgtagaagaaataggtaagggaagtaaattaaatttgagaagttgtttcaattagcctttgacccccaacatctataaaagaggtggttttgcatctgtttgccattttctatgtcctattagactcacagatcaactagagcataagaaatcccagcctcaagcaagaaaacacgagaaatatctaaaattggacttgggttcgcgaccgaaggtctgacaggccaaacactagcggtccaaccgctcaaaaattagtggtcatatcagcctcaatgtgaaggctctaatcttttctaaacttcacctaaatttgatatagtgttaaatttggctatcaatggttgcaataaactctatatcatggctaattagctggcaagtctgtattgaacaataccacaataaactactattttctacttaaatatatggtgttgttgacttttggtcatggtgttcgatcattcatctcattcaaattaaattttaatataaatatttaataatatagttcatgcttaaattacttactatgataaacaagttaaaaacaaatgatatttacatgtattttttacattagctacctctacacgcagaaacaaaagggttacactagcatgtacacttggacaatcccggctttgagaaagctaccattagaaacaaagagagatcagataaggcctttgtttagttggcaaaaaattttggatttggttatcacatcggatatatgggcacacatttgaagtattaaacgtagtctaataacaacaaattatagattccgcttgaaaactgcgagacgaatttattaagcctaattaatctgtcactagcaaatgtttactgtagcaccacattatcaaatcatggcacaattaggcttaaaagatctgtctcgcaattcacacgtaaaccgtgtaattgattattttttttctatatttaatactccatacatctctactacttaaaaaatccgtagtggtggtcttgattcctgacacagcagacgcatctgacagacacgcgcaatctcaaccatccgattgccatatcgaacggcgtcgatctcctccccatcacgcgatcgctcctctcctccttcccccaagccgcgtcgttcgccctcctctctgcgccgcctcctcgccccgcccccgcgtcgccttctccacgcccgccggccgcctctccagacgctccctcgccgccgccctcgcaaatctcctccgcgcgctctcatccctcccttaaccatcaccggccgctctcatctctcaccaggtcgtccaccagtccgcgacgatctctcccgccggcgtcactagcgacgccttcctcgccgatctcctccgcgccctcgccgcccccgatctccgcctgatcgcccgcctccacgcctcccccaatccgcgccgtcatatcaccgttgcccggagtctcatctagccgtcctcaatgggcaagcacgatggatcagcgtttggttctttttatggggtgtcatcctgcatgtgcagaaaagtaaaggtgaaacacatcaatcctaactgcattttcagtgtttagctctccttcgtggatttagtgttctgatagatggaagtgttgtttcagtttttagctctgtatttcgtgggtttagggttctaatgagtggaattcctcccgttgccacagagcaagcgggcctagatgatggagaaggagaaccggtttggacaggatcaatccaattacaaatgggcatgcaactactactgtgacatcacagggaagtgtatgcatctgtttaggttttctgattacaattttgattttacaaatgtttcagtactttgactcaatgtcctgcaaccaatcttgtattcaatccaatttaataatttacccaattgagtctaggatagtttaacaaatcaatcgggagttcaactatgaattgtttcgctgtttcaggtcttcagacttaactgaagtttcaatgtcgccgccagatcaccattgttttcggtgtttcggatctgactaataatttcttttgctgatcagacatggattgatggcctccacataaaaatgcatacaagtctaggctttatgtggagggctccatggatactaataactccaatgctaacatatcttctgaagaatgaggatgatgattttttgaaaggtaaggtatatttctgtctccttggctttccgagatatgctgtatggcacaatgaaaaacatctgattctttccgtcaatatttaattgacaaatatatgaatttcccctatttgttggactaatatgtgtggtacaatatttacaactgttagataaattcccaggtaacatatgagtgtagctttcataaagctcacttcagattgtttattttcaagatagctgaacgtctgaaccttcaactagactcaagtatgagtctgtagtaggtttcaaatgtgaaggttttactagactaggaagatctaattcctattttccagtattctgctttgattgctatctgtcttccaatgcaacagaaaagtgcctcaagccacaatgtgttttgtatatatatagctacaactttgatttgagacatcggagagtcatcatagtttgctcatttaccacactttataaatgtaaaatgtaaaagagtaaagtgcacatgcggttcttaaacttgtaggggtgttttatctaagtccctaaactctaaaaatgcagatccaaatcccagaatttgtcaaagtgtcgcctaggtctcattttgtcatagcccctctaagatcctatgtggtgttgacgtggtatgccacaagcacagacgtgacatggcatcatcttaactgacaaatgggaccgacttaaaattcattttccttttttcttcttttcttctcatttttctctctcttttttctttttttctcctttctctgtgacccgagcaccctgtgcagcggtggcctacaattgtagatagagaaaggagtataaagggaaaaaaagagaagaatgagaatgagaagaaggaaaagaaaaagaaaaaggaaaaggaaaatttttaagtgagtcccatttatcatttaatattatgtcacgtcacgtccgcgtggcatatgccacatcagcactatcttcaagtaagaaatggacaatattctttttttttgtctaaatacaaataataactagagtgacaatatacattttggttgttttgcagccttgtccagataatcaggaccacatgaagcgaaatggatggtttaagtcgagctaactttagatatttattattttgtgtatttgataggagtaacacatgtactttatagcaaagcttgttcctatatgatgttgtggatacatgttgattgatatttttctaatagctctttatcgttttttttagcttagctatatgttttatgtaccattgtcaaagcatctttgtatcactgttatttggttgtttcatttacaatattaattgtcaccgtagcgttagcacggacacactactagtatatccaaacattcgatttaatgggtgaaaattgtataacatgccggagttccgtgcatcttgtgaggattcagaacttcaagctagctcaagttcaaaatacaaacagagagagaatttcacgctagctttgcggctgtaccagaacctgaacaagttgcctgtggataaactcggcctttttttttctctctgcatgcaagagcaatattgcagtgggcatgtacaggtagtgccgttactctctccgtcctaaaaagacaatctaaaaattggatgagacgttttctagtacaataatatacagattcgttgcactagaaaatatcccatccaatactagattgattttttatgggagggagggacttaggaatatgtaggagtatgtgaaagggattgctaactactccctccgtcaaaaaaaaaaaggcaaaccctagtttccgtatccaacgtttgaccgttcgtcttatttaaaaaaattataaaaaaaattaaaaagataagtcacgcataaagcataaaatattaatcatgttttattatctaataacaatgaaaatactaattataaaaaaatttcatataatacggacagtcaaacgttggcacgttggcacagtaatctagggtttgcctttatttagaactgagggagtacacgcaacctgccagataacgcagcaaaaatgatatttttcgtgcccgtttaacacgagcatctactaacagaagtacaagatcatccatcgctatcatcaattctgcatactacctactccctcggttcaaaaaaaaccaaagcgtttgccatgaatctagaaaaaactatatccagaattatagcctatatggaaggtgtatacccttaagcaaaaattaaattaaccaattttctaaaaaaaatcagagggaattgtgacattcaatataccattgaatataatagcagtcacattatgatagaatcctcacacatctagtctcaccactctgcagtgacataattgctcccgtccacgcaagtccaaaaatgatgggtttctactttctactccttccgtcccataatataagggattttgagtttttcttgcactgtttgaccactcgtcttatttaaaaaatttatgcaaatataaaaaaacgaaaatttatgcttaaagtactttggataataaagcaagtcaaaaaaaataaataataattccaaagtttgttgaataagacgagtgataaagagtgcaaataaaaactcaaaatcatttattttatgggacggagggagcagtagataacgcaagttcctaacttcttatacatggtgacgctatatgctgtcgcttgtgctcagcaatccatcactctttcttttgcagaattgcaggtcaagcttcgttcagatggcggttgccggggcagtggcgatgtccggcggtattctcctcctcctcctcctcctcctc

SEQ ID NO: 15476 - DNA, 2282 bp, Oryza sativa
aaaaacctccgcgtcgctctcgcacgggcggctcgggggcgaaaaccctagctgcccgcgccgccactccgcctcctccacctcgccgcccccggagctcgccggcgggaaagctgccagcgagcagggaaggcggcggcgaggcacatcaactcgacggcctccacctcggcgcgacgaggacaggggaacgacgaagctctccgccgcggtcagaggcggagacggtggggctgcttggagaggcggtggatccggcttctttgaggccggatttggccctccgacgcctggatctggccggagcagctgctccggcgtggcggcgcgaggcagctggccggcctgggcatgttggcggcgtgaggtggctcggcggcgtgcggcctgcctgggcgtgaatacggcgcgagctgcggcggcggctcggcagcggctcggcagttgggaacggcggcggcgtagcctgcccgggcgcggagacggtgcgagcggcggcggctcggcggctaggaacggcggcggcgtggccggcccggagctacgggctgggagcgggcggcagcatggcgctggtgcggctgcccgggcgcagcggcggcgtgccgcggctcggctgtgcggccgcgagcagccccatggcgcggccagtcctcggctgccggggtgccgccgcgatgccctgcggccgggtgggtggcgtggcgtggccaggtggggcgcggcggccgggcaacaggggcgccggagccggaggggtagtagcttcaccggcgtcggcgtaggcctagaaggcagtgcaaagggagctggcagtggtggatcgtcttcctcgttaccggtcggcaccctcgccctttctggagctcctccccttctttgcggggagtttctgggttggattgaggcggcagcttgtcagcgggggaagcttaggttgccgaaactatggcacccagtcccgggttctccttctgccagatctagcaaggaggctggcgggtggtggaacagaggggtcctgggccagctctcagggatggtggttcgttggcggaagccatgtgccaccgatgtttagatggtggattcggattgggcaacggaccacagcggtagggggtttccgagcgaaagcttagcccaattctttgggccaacagtgactacgtcttcgggcgtggtaaccctcctgagggcattgttgaggtatccctcctaaggagctctgggtgaaaacattgtccagttctttggacggatgatgacggcgtctttcggcgtcgtgaccctcgtgagggcttcgttttagagtcttcgtgtcgtcgtggtgttgttggtccagtggcgatcggtctcacatagcgatggccggttcggtgcttggcttccctcactgtagcgtgtgtttgggcggttggcacatggttcagggcgtgtactctggtgcacatccttcctcaacagccagccgtcgatgtaaaacttttcttgtaaccttttcttcttatcttaattatattgaatgacctccttcggtcattccagcaaaaaaaaatctaaacatccaataagcattcagtggtcaattaactgtttcgggtctgaaacctgaagaatcggccgttgcttcacacatgcagtgcgagggtggagcagcagaggggggcagaggaccaagcatctgggacaccttcacatatcagcatccaggcatgtttaactgtaaatgacaagaatgaaaaagcaataaggcattattttgaattgaccattatctaatatggcagataaaatcgctgacaaaagcaacggggatgtggctgacaacacctaccatctctacaaggtattagcaattaccatttttaagtagccgtcctgggcattttttaacaggcattttgtaaggactttcaataaatatgcactccatgtttctgttagtttctttgtttctatcagataaaagatataccacatgtcagtctgcctatggcgcgatcgcttcagagatcaattctaagtttcattggaaggactagttcagtactcacatcctgaaaaattgcaggaagatgtgcacatgatgaaggagatgggaatggatgcatacaggttttccatctcatggtcaagaattcttccaagtgcgtgatacacctaatatatactataatgcactgtcacgcataacaaatatatagcttatctgaagatgttctcatttttcttcgaagtacaatattttgcatatctttttcaatctcccaggtgatccc

SEQ ID NO: 15477 - DNA, 48837 bp, Oryza sativa
aaaaatattgtccacgtcatcatgcatatcaattgaaatacccaatatttcaatgccaaaagcctttggagttcccttccccattttcttgtgaatattgtttactgtgatttgttgaaggacaagatttaacccttgttgcatcgacaccatccacattagtgttcccttcatatagtattttcagctaaaacatcctagtgttatttgccatgaaaaaagtgctaaagttactgactgtgaagaactattgcagaaatgactataaggactatgctgaaatctgcttcaaagagtttggtgaccgagtgaaacattggatcaccttcaatgagccttggatcttctgctctaaggcctatgcatctggcacctatgccccgggccggtgttcaccctgggagatgggaaaatgcagcgttggagattcaggaagggagccttacactgcatgccatcaccaactacttgcccacgcagaaactgttcggttgtacagagagaaatatcagttcactgaagaagttgtcaggcagtcgcagttcatccatgataatgatttacatcgaagatccgcaaagttaagtttcataatccaaaattacttattgcttggcattcactttcagccaggtcctggtggtagagtttgccagtacagacattaacctttactagtagtagttgataaggaaaaaaaggaaagaaattctagaattcacaaaaaaaacaataaaaattggcacttaatcccaatgtgttatgtgccctagttagagaggtcaaaataggtcagagaaaatatttatgtattatacaagaccttctcacataaaaacaaaacatcatgccttaatctcggtcctcctaatacaaaggtctggatctgttggttaggttaaagatatactcctattattttattattttcatgctaaattcaatgaaagactttagagttgataagaaaagcaataaattcataaaaagcaaaacatctcccattaagttatcttcaaattcaaacacatatcagtatccaacatcacaaatgtttctgatagctagctcacaatttctgcgggtaacttgactagctaattactttattaactgcagcgctaatttatatcctgcatattatgaaatggagacatgcatattctagtccagtgatatattcaaagcttctgcaatttactgctacatgataatacgttcaaggccttataatttgaacatgattgttatacatttgttgttaatattatttttagggaacacaaaacctttgaccatgcatgcagattgaatgcttagtagaatcaattctgtttttcaaatcaaaaggaacaacaaaatgcttgacaaatgcaggccttacaaaaggggaagattggaataattgtgaactcacagtggtatgttcccttctccccatccaaaaccaacaaggatgcagcaagacgtgttctagatttcgtgcttggatggtaaattctttgtcacacataatttcttcattaggagactgaaaattctaactatgaaatcctttctaggcttatggatcctctcattagaggggactaccccctaaacatgagagaattggttggaaatcgcttgccaaagttcaccaaagagcaatctgaaatggtcaagggtgcatttgatttcattggacttaattactactcttcaagctatgctgagaatgttcttccatcgtatggtcttaagaacagctacaatactgatttccacgctaggattaccggtgagtcaacatattctgggatcagtcaacttcttttgtgcgtttgaaccatgaaatataaacatatggcaatttttttggaattttggatacatgcattttgtagcttttttttttgctactaggtgctaaccttgcccaattatgctaggtagtcgaaacggtactctcattggtcctcaggtgacctacagctttgttacccacaaaacaaattattagtaaaagtgcaaaacaatgatcaggtgacatgattgaactctataaacaatatgtgtgtaggctgcttcatcttggcttcatatataccctcaagggctccgtgaattgttgctttatatcaaggaaaactacggcaatcctaccatctttattactgaaaatggtaagttcccacaaacatataggtcatacaatttctccgcatttgttcaaaccaacactactataacaccttctgattcttctttctattttcctattttctccccaatctagccagtaagtgcacataggacttgaatattttttcttctcctatctatgtgagagagagagagagagttctcctctagcttctaactaaaagtgtatgaatcttactgatcctttgtactcgtacatctcaaggtgttgatgaagtcaataacaagaccatgccactcaaggaggccctgaatgataatacgaggatagaatattatcacaagcaccttctcgccctgcgaaatgctatgaggtcagaacatcaattcagacactcagctatcagtagacaacttaaagatggtactaacactgcattattccatatgcctccacagggatggagcaaacgtgaaggggtactttgcatggtctctgcttgacaactttgagtgggcggatggctacacactccggtttgggctaaactttgtggattacgatgatgggatgaagagacaccccaagaattcagcccattggttcaagaagttcctccgagaaatgaaacagggatgaaaagagtcgcacgcattgccttcttttttttcattgaacatcgaaattgagtgtcacagatgaaatgagtttgagatgtgcttctttgtttaggctatacaagagtaaacttcacaaaactacacgttttgttgtccaagttacaataaaaccacacaaattattagaagcaacagatgacaagtgattcacattttctctaagaaaaagaaaaagggaattacgccagaaatgcacacggggtactggatggaggctcacctcacctggaacgaggagaggggggattgagttgactgtgttgtggctgatgaaggggacgacgagagtagggactagcaaaggcttggaatctcgcgctgcctcgtcatttcaatcgtctcccattgggccatcgctgctggagctggtgctgccgccttcctccgattgggggttgtaacttgtaaggatgcagagctgaccgatcaagcggatccacgctgcccgcccgagcagaccgaagtttggtcgggtggaatgtagtagccatctgtggccggagcgtggggacggagaggatggcgagagggcggcgctagccatggcgcgcggcggcgacggcggctggatcgtggaggactggagggcggaggctcgagagagctggccttttcctcgtctggtgtaatgggctcaatcggacgaatcttcgatcctgaaaaccggcccacctcaaaagcttttgtaagcccaacaaggggtgtggaataagttcactttgagtcccttaactatagctcaaatttgattcatacccttatccgcaataccggatatgttgaccacccctcaaaaaaaaacttttaaaagtggtgtaatttgactccctgaaacggttttagaggacgatttcgctaacgtggtgcgttgacttggtccaacctactaagtcatcatgtgaaacccacccataaagtgacttctcttcttttcctcccccctctccacccacccatcaaatcagtgccaccccctcatcccccttctgctccatgtcgggccaccgtcggggacgaggaagcgtggacgaggccatcgtcgcgccaccggtgagcctattgccctcctctcggatccaccggtgccccaggaagtggaggcaactgcgagacgttggcccgttatattattattattattattacttgatcagatgattgcatttggaatagtaaagaacatctcattatattattatttttttacttgatcagatgattgcatttggaatagtaaagaacatctcgttatattattatttttttagagaaaaatatcttttacccggtctctacatctaactagatatatatgtagccttcatccaaccagatatatgagccttttaaaattaggaacttagcctatcaaacatgaaacttagccctcaaatagctcaatctgaaattgacttctatggagattttaactcgggaccttgggatgctactcaaatcactgcaaccgttaggctacgtgccttttcacaatagtatatcggatgactaaactgaattggctgatgcgatgcgccgaactttctaactaacctggcctctatatagatattttacctggatcgaagtgattaatgaaatcttccagattcaaaaaacaacaggagtttgatttcttgatgatataatgggagtcaatcacaaggctccgcattcgttgaaaagaaaaatcagagagagagagagagagattttcgtcgataaatcaagtgacttgaactaagctagcccaggagtaagaagacatcggataaaccataacacggcagcataattctgatatattccgaaccaaacattgcctaggataaaccgaccgaatatgtgtcacgatcctgcccgacactaccaacaacaccgtgcaacattagagcaataatccggctaatccctagtaggatacgcgggtgggttacatgccaaaatcccgagcatccgatccgcatcccggcggcatatctctcctcgccgtccgacggctacgtcccctgcctcgcttccaggcagatcgagcacacgcacgtacgtacgcagctagtacgtacgtacgtccatcgatatcatcctgatcgtgtctcactcacacgcgcgcagattgaagcggttcgtgataccctaaggcgccggttttaatttgcccggtctaagatgcgagcccgatgctcgtaatatgccgtgattagtgatagttttgggggtagaaatggattcttcggtttggacactgccaatcgatcgagcacggtgacggttctatctttttttttttggctcgtctgtttgctttgcaaaggttatcttatctctcgatcggtgtcagctaatggtacgtaggacaattgttcatggggaggaagcaagatagtgttttttttttttgtgtgtgtgtgtacacatgtctgtcaaagcaagaatgggaaatatattaatggagaatgattacatggtgcgttacgggcatgttcatataacatggtaggagtatagaagtaagaagatgcatgatgctccgttcaaaaaaaagaagatgcacatgtacatcgagactatcaactaaattaatttattttattttttatgtttgtgtctttgtagctagagaggtctagtacgcgagcaaagatcctgtcttttgttctttgttcaggccatgcatcatcattttgtcgctacgtccacattcagtagtgtgtggtaggacgtacgtacatatacgagactacgactacgtcgtcgatctaacactagaataatataatcgtcacgatggttactaattggttaattaactgcttcggctgtacttctgatgctacgatgtcactttaatttactaccttactttaccgactcattatgcattcttcgtaggtgacgtttcatattatttttacttattttctatttttatctgtctttggccaataataagatgcctaaagcaaagtacccatcttgtttaatttcctttgtttaatactggaaattaataagcaactgtagctctcttttttaatcttaagcaacatagagttttttttaagactcaagttattaatatttattaaggatagagttcatgggaaataatttcagtgcagtgcatcgtccgggtagaaaatcttatagcaaaggaccatccttacataaggtaagggaaaatgaactgcgagaacaaccttgcaaatgaaaccatacatcagttactgctgcgacaataagttctcagttttctagctgagaactaacataactagtttgcaagcggtgccataatataataacataagacatgctttgaattattgatcgttgctcatatttgaaaaacctgggctttgtttgattagaattccatcaaacttgccaaattatacctttgtttagactgttggatatccactcccatcttcttcatttttttttcattttttatcaccatcctacaattaattaggtggtgaggttgatggagatgaagataaagttatgtcacataatataaaaaaaagtttgattaattgatttttaattattatagacttgaaagtgagtttatctgatgttctaaagcaacttctatataaaaagtttttacatgaaatataccgtttaattgtttgaaaaacgtgctaacggaaatcgagaaaaatatatatctttaattagaaaataacaccacctaagaaagaacaggatgtagaagaagatgaaaaactacggaggaaacttcaaatcggacgctcgattttgtaaaaaaaatcggatggaaaatgtttcagttgatcaccggtgaaacattaagttatacatggtgaaaaaaatcagctaatgaaacatttaaaaattatgtgaaacacaacaaagatacacgtggaaaacataatgctatcgcatataaaacattgagtgttatcggacggaaacatatgttttgtcttatcagaatataatcatgtgatatcctattataaagatttagttataattaacacaacggtatgatcagataaataatttatgagaaatatcatttcgaagatgtctaaatgcatgcatggatgaagcgaagagatgatagaagcaggtaattgtatgaattttgtgaaacacagtaaagacacgcattgaaacattgagttttaatgatttcaaacacatgtttttttctttcagcatgatataaatatgtgttaacttgttgtaaatgtttaattacaggagaaaaaaatttaaagtaaggagaaaggaagaagaaaaaaaactaatcagatgcaatcttgcttgcatgcgagtgtcagcaaatggtttttcttctctcattgggcgaccaagcctaagatcttccaaaagtataaaaaataagtactccctccatcataaattatagggcgtcatatttttaagtaaaatcaaactcagtaacttttaactaataattttactaatcatatatatgctaaatattatacatattatatcactagattcatattttaaaatattttatgtgatgctaattttatatttgttgggaatatagcatataataaattaatgattaaagtatattattgaagatcgtttctactctcactttcatctccaatattgatttcacccctactttttagagtttttgtttttgccctcactttttttaaccaaacaaactttttgcccatgttttagatggagaagttaacggtgttaactactacgtaaaaggacatttttaccctctaccatctctttcctttcttcttctttcctgctacggaaaagggtttttccgtgcggtcaaaaaaaatttcgcgtgcagatgaatgatttttgcatgcaggtgacgcccccgcacgtgaaaattggattttttttccatgcttatatcgcccacacggaaaaataaaaaaccgaaaaaaataaaattcacaaattacccaaaccctaaccctagatctgctgctccccgccgccggatccaggcgggggactgtcgccgccgccagatccgggcgaagggcagccgccaccgccggatccttgcgtggggagggcggcgccgctcctggccgccgccgccgacgtcggcggcggccgcatgatgtggggagggtggcgctgttcccggccgcctcctcgtcgtcgtcgtcggcggcggcgccgctcacggctgctgcctcctcctcctcgatgtcggtggtggccaccgcgctacctccgccagcagccgcgacgggcgcctcctcgtgggcgcacggtgacggcgccgctcccggcagccgtctcctcattggcatcgtcatcgacggcggccaccgcgatgcctccggcagcagccgcaccagcctcttgcgcctcggtcgccagcagcccggccgccgcctcatcggcagcggcggcggcgagcgggcgcctcccgcctacgcgcttagagaaagcaaaggagaggagagttgaaaggcaaagagagagagaagtgtttcgctcagagagagagaggagtgaatattaaaaggagaaaggtagagagagtaggtgaaaattttgaagtgtatgggagggaatagcattttgaaaggtgtgtttcagttaagacgttcgcctgcggaaataaactcatttttacgtgcggttcactaaagaggaccgcgatttttccgtacggtcctcttaaatggaccgcatgggaaaatgagccgatttttccgtgcggaccgagttaccgtccgcacgcaattcaaaagggtccctgttcaggaaaatcatttgcatagtagtgtcaccaaacagtgctacctgccatcggcaggccgtaaggcggtgcaacggtggctacagcgtccaggttgtcgtgatgcaggcgccgaggcgcggggccactgtggacagacggcggcgtacgacaagcggcccggccatcggtgctgctcgccgcccctccccttgttctcttttcttcttttcctcctcctttcccgatgtcttcgtctgccatttgtgggcgacggggctcatcgggacggtgtcggcgcggccgtggggaagcatagtgttgccatggaacggcgacacggccttgtgtgggcatggcaggcgggcagcgggccggcgaacttgatgcgacttcttcggcgcgacagacgctgctccccttttttttggttttcttattgtttgctattgatgtatcacagcttggccgccgctcgccgccgcctacgcctgttctgctcgccggcgggaagagctgcgccctagcccgctcgctgccgccgtcgccgccgcctggaaaagttgatttgtgggcgagaaaagaaaaaggaaagtgttagatatttcctagtggtaaagaggtaaaacacaaattcgaatttttttcctttatttctctattttttttactgccataaacccgtcccactaactttcatccaaatcagaggtaaactcctcttttggttaaaaaaaagaggaaaaaacgaaaaacctaaaaagtagggataaaatcaatattaaaaataaaagtgagggctaaaaaaatatatatgttatactcacggaggaaacagaataagatcgacccaaaaatatactcctttttggagtaatttgtaacggagggagcagtatattttccaaaaactaccgtgacctttccccaagtcgacccaaaaggccaaaacccacgggcgcggaggccggccggcggagaccacaacggcacaacccctcgaccgcccggtaaatcccgtggcttacgaagaatatgcgcgcccatcgcctaggcggtaacaatggaggagcggcgcgcgacgtcgccgtcgcggcacagcttttgtcgcgacgcccttggccgccgcgggggggaatctgggggcggcctcgtatatatataccgtagcccgctgaggtcaccgctccaacgccacggcctcaaccgggagtggagactggagaggtggaggtggaggtggaggtgggaagctgccacttggcgccagcgcgccgctgcccacgctcggatcggaggtatggattccccttccccactcgctgcgtgatgaaccgatgaaccgtagtacttgatgatatgcctgatttgcttcggcattgtgccgcttctctgttagctgggagtttgtggcgtgtcgtttaactgaagtagagatgtgatgatgatctgaggtgagcgccattttttttttttggctaactctgtttgttctattcagtgaatatgagctctcttttttgtcccctttttatcattctgcttctatgggtcgcggagcgttcttggttggtgcagtgcaactgcaatgtcagtatgcatgccatagtaatgtgatggtgggatgtaatgctcctctgcttgctcgagctctttcttggttgtctatctatcttggatgatttgatcaatgtactacttattatctgctgatagtacccggggtccatttgcgctagtattgaacttcttcttctcttataatttgctgaaatcgcgagattatcgcttaggtttatcaatcagaacattatcatgtttatgcttcggttcgttcggtactggcacatgtcaaataagcggaaattctgctactttttcggcttaccatgaatggcacccaacatagcgtggttgttttgtcatgttgaactagtacaaatttttgcaccttaatatttgctttccgtgcatatccaattaacctgcccatcaaacttcttttcagatagctattattggggaaaaatattttcccagcttcttttatagtgactagactgtttatacatgcctgcgtaattgcttccttttgatgagctagtacattatagaccttgattttgttttgatggtacgggttggttattggtgtccatataatgaaattgcaacttgcgaccactccatgatagttacctggtcattccttgttggttaataagctattatttcaaatatgaatgttcatcctacttgtcatattatagacatttgtcacaattcaagtgaggaagaaattctgtaattttctatgggctagttgctgcgttaactacaataatggggctgacatcctgaggttatagtgttcgattaccaagttctaatttattaagaggaatgcaagtcaacatgcatgcctagcccatttacttttaatgagtagtgtaacttctgttgcagaagtactaatgacagctttctatataaatttcacaggttgatttatcaaggacaacaattcgtcagaaatggacccaaagagatcaatagatgatcaattttctaagttgcatccaagtttaccagttgatactagaattggcatagtgggagcaggaccaagtggcttatcagcagcctatgcactagctaagctaggttaccgcaatgtaactttgtttgagaaatgccatactgtttcagggatgtgtgagtccattgacattgaaggtgaggaaactactcagcaaaattatacagtcatcattttgtgcacacttttagttatcagcaacattcgtatgtaggacgaatatatgatttgggaggacaagttatagcagcaaacagtgcccctgttataactcaccttgcagaggaactagggtctgatttcgaagagatggatacacacaaactctccctgattgacagccaaacaggaaatattcgagatcttgaagtagctgaggactatgtatccatggtatctctgacgctaaaattacaggtgagttgttctagaataaaatttaaatttgaggtaactggataataagcatctaattatttataatattctctctatttcttgcatgcgtgttattcaataattcttacaggatgaagcaaataagtcaggccgagctggacttcatgctctcagtggattggcatccgacccgacccatgaatttttgaagcaaaatggaataaattcaatgccaaaatctgtagcatatggttacaccgcttcgggctatggttttgttcaagacatgccctatgctttcattcaggagtttactagaacctctatggctggtaaaatccggcgtttcaagcatggttacatgagcatgtgggagagattaagtaaatcattaccatttgaagttttttgtgacacgcaagttctgaatgtcaagcgcaacagttgtggtgcaaatgtaaccatcaagaacaacaatggtgaaaaacaagttttggagttcgacaaaattatactatcaggtgctgttgctttcaagaacagcaaaacatatcgatcctctagtcttactggtgagcatattttaaattcagtttggctggcattgaagctatagtatttcagttgccttattagtatgtatgatcttttgttcagatggagaaagtgaagtggtggaactaaacaatcttgaaagagaactattcagtaaagtacagactatcgactactatactactgttgttaagatcaatggattcgagcacataccaaagggattttactactttggagaattcatggaggatccaacaacaataggacaccctgtggcaatgcaaagattctttgctgacacaaacattttcttgttttggtcttatggaaattcagcagacatcaagggttcatttgtggctaaatgtgtgactgatgtcgtgagttctatgggaggcaatgttcagaaagtaattttgcaacggcggttcaagtatttccctcatgtcagcagtaaaggtatatatgttaataatatttctcctgttgcaaggtcttcttttttctcgtgataacattggtaatttcctgcattgcagacatgaaagatggattctatgagaggttggagtcccagttacaaggttttcagaacacttactatgttggaggtttgctagcatttgagcttaccgaaagaaacgcttcgtactccatcatggctgtttgtaagcactttgccattgatggtgagggagaactgactccttatgtcaaggtgagcaagaaataatggcgtaatatatctcaattattaattccaccttcatcaaatttcttagagaaattgtgcatatatttttccatacttgcagagattattccctttgtcccataatagaaatccatcacctcctagagatcttggtgagcttgaaggtgttgaatttcctgaccttccctcccttgatggatatttgcaatactggggaactcataaagtcactgagaagaatgttatctatacttggatcaatgaagaaggaaagctcatgaatcgaagaacctaccaggagcttcatgggaatgcatcttacgttgcacaaaaacttttaacaagcacaaaacctgttatcaagcctggtgatagagttctgcttattcacctccctggtttggagtttattgatgcattctttgggtgtattagagcaggagttataccagtccctgtattgccccctgatccaatgcaaagtggtggacaagctcttcttaaagtcgagaacatctctaagatgtgcaatgctgtggctattctatccacctcttcgtaccatgctgctgtacgagcaggttatatcaagaacatgtcactttagcaaagagagttcagaaatgctcagcacagtggcctgacatcccatggattcataccgactcatggataaagaactaccggcgaagctcagacagcttcaactcagacactgttttatttaccaaaccccagccaagtgacttgtgctttctacagttcacttcaggttccactggtgatgccaagggggtgatgataactcatgaaggacttatccacaacgtgaagactatgaaaaagcgttatagaagtacttcaaaaactgtccttgtcagttggcttccacagtatcatgacatgggtcttataggaggtcttttcactgctcttgtaagtggaggaacttctgttctattttcaccaatgatatttatcagaaacccccttctgtggttgcaaacgatcaatgactaccatggaacccatagtgcaggtccaaattttgcatttgaactcgtgataagaaggcttgaggctgagaagaacaaagtatatgacctctcatcaatggtcttcctcatgattgcggcagagccagtaaggcaaaaaactgtcagaaggttcatagagttaactcaaccttttggcctttctgaaggtgtcctcgcacctggatatggtctggctgagaactgtgtctatgttacctgtgccttcggtgaatgcaagccagttttcatagactggcaaggaagagtatgttgttggtttgttgagcaagatgatacagacactctcatcagaatgttgatcctgactctctaactgagcaccaagaagatggtgttgaaggtgagatatggattagcagtcctagttctggagtaggttattggggcaattcggaaatgagccagagaacttttttcaatcagcttaagaaccaccccaacaagaagttcacaagaaccggtgatttgggacggaccatcgatggtaacctttttattacaggaaggatcaaagatctcatcattgtcgctggtagaaatatttattctgcggatgtagagaagactgtggaaagttcttctgaggtcctccgaccaggctgttgtgctgtggtcggtatcccagaggaagttctggctcagaaaggcatctcaattccagattcttctgatcaggttggacttgttgtgattgcagaggttagagagggtaaggcagtctctaaagaggttgttaacaacatcaaagcacgtgtggtggaggagcatggtgtagctgttgcatctgtgaagcttatcaagcctagaaccatatgcaagacaacatctgggaagatacgaagatttgaatgcatgaggcagtttgttgacaatactcttagtttggctaagggcaaccatgtatctaagaaaaagggtctttttcggtctctgacaacaggaactggcatggagtcaaagaggtccctcttgaggcaaactgttgacctcaccattagccattggcccaaaagccaagttaaaaactccaatgaaataactgagtttctgacacaaatagtgtcagagcacactggcatttcaaaggataaaatttctctaactgacagtctaccttcgtatggttttgattctattgcagtggtacgagcagcccagaagctctcagattttcttggtgttcctgttggggccattgacatctttacagcaagctgcatttcggagcttgcaagcttcttggagaatttggtgcataagtcacaaacacagttggcaccttggcccaaaagcaaagtgaaaaactccaaggtgattatcgagtttctgacaaagattgtatcagatcaaacagggattccaaaggataaaatttctccgatggatagcctaccttcatatggttttgattcaattgcggtggtccaagcagcacagaaactctccgattttctcggtgtacctgttggagccattgacatatttacagctggttgcatttctgagctagctaccttcttggagaatttggcgcataagtcacagtcacagttggcacctggtgcatcttgctatattgaggatgagactcaagtggatcccatggatgccattagtccagaattcagtgttttgggtacgggcatcctgcaactgctggctcttacttatgtctgttttgtgctgctactcccagcatatcttgctagttcgacatacatgagcattttctctacagtcagtctggtcagatcaccattgctgagctatcttagttctttggttatggcacctattgtgtggatcttttatatctcgctcacttctttatcactgtctatcttggggaagtccttcctacagccaaattatgttctgatccctgatgtttcaatatggtcagttgactttgtgaaatggtgggcactaaacaaagcacaagcattagctgcaaagatgctagctgtgcatctaaagggcacaattttcttaaattattggttcaagatgcaaggagctcggattggttcatctgttgtcatcgacacagtagacataaccgatccatccctgttgacggttgcagatggtgcagttcttgcagaaggcgctcttgttcagggccatgaagtctgtaatgaagtgctgagttttaggcctatctggattggctgtgaggcttcgattggtccttatgcggtgcttcagaagggaactgttgtggaagatggagctgttgttccaccattgcagaagactggggctgggaaatcaacacgtcggactagcagaacttctgtaagcataaaggtaactaaagtatgtagacttcataatctacttcggtgtaataaaactatgatttgttatggtatacaacgatagtttgttccttcctgaccagaaacgtatagttgattatttctagacattgaatatagtaagctacagacttataattacaccataggccatttgaatttccttgtggtctttaacatggatgaagctgccaccaaagaacttccctacctttttacatttagtgaaaatattttttgagattcaggaagggacatatattttatcagggaaccataagcaaatcatttatgtacaagtggtcaagcagaaaaatcatataaattaaacaagatgaagggtttgtttggattgaagtcaatcttttggcaacttcaatagtattgtatagatatttggtccgataccaaatttttcccacactagtgcaaattctactcttaacaaatttggtagtgccgaaatttaccaatgttttggcacttccagtattttggtaagacaaaaaaatggcttcaaaccaaactagcccaaactcttttctgcatggtgcatagtgtctgcgtgtgtgcattttcattcgacagtggggtatatatctaactgccttcaaagttctcgattgcttctgcagaacatgtttgttcatggccatatttatataatgttattcgaatacaaaccgagtattttttctttgcagaaagaagcagccaaagcaaacatgatacttgaacacctcgttagcatctacgcagttggcatcctgggtgctctgtccggtgcaatcgtctacacactatacactcacttgtccggcaaagcggcttcgcctctgcatttctcctttgcatgcattgctggtgcgttccactggttaccagctgccatcactgcctatgctgttattgtccaggagacacccacaagtgcactgtcatttgctctcttcactgccttcgccgacctgagctatggtgtcatcctcagtattctcaccagtataaccagcagagcccttgctgcaaagcctggaaccaagcagaatggcattgcgagtttgatccaccggcgcataaccatctctgctcatgtcaggtttgccaagatgctatctggaacagaagccttctgcgtgtacctgaggcttctcggagcaaagattggcaggcattgctctatccgagccatcaatccggtggcgaatcctgagctgatcagcgtcggtgatggcgtccatctaggtgacttctgcaatattgttccagggttctactccaaggggggattcaccagtgcagagattaaggtccaggagaacaccgtggttggcagtggcagcttgctcctccctggctgtgtcctccaggagaatgtcatcctcggcgcgctctccgtcgcgccggagaacgctgttctccggcgtggcggcgtctacgtcgggtcacagtctccggccatggtgaagaacaccttgcttgacgaggatgaacggatcgaagagatggatcaggcatacaagaagattgttggcaacctcgcggcgaacttggccatcaccaccatgaacgtcaagtcgaggtacttccaccgcatcggcgtgagcggccgcggcgtcctgaggatgtacgaggagataccgtcgtttccccggcacaagatcttcgcctccggcaagtccttcccggtgatcgtccgccacagcaacagcctgagcgccgacgacgacgcgaggctcgacgcccgcggcgccgcggtgcggatcctctcggacaacgacggcgaggcgcctctcctcgacctcacactcaagagcggcaaggcgttctacgcgcgcaccatcgccgacttcgccacctggctggtctgcggcctgccggcgagggaggagcaggtcaagcgctcgccgcacatccgcgacgccgtctggggctctctccggagcaccgactcgtacaccgtgctccactactactccaacatatgccggctgctgcggttcgacgacggcagggagatgtacgccaagttcaagctccgtcctgctgatccagacgtccccgaggactccggcaaggtggtgccgaggggcatcctgccgccggagaccggcgcgatccccagggacgaggatgacacgcgccctctgctcttcctcgccgacgacttccgccggagagtgggctcaccggacggggtgcgctacgtgttccagctgcagctcagggaggtgcccaccgacgccgccgcccgcgacgtcgccctcgactgcacccggccgtgggacgaggccgagttcccttacatcgacgtcggcgaggtcagcatcggccgcaacctcccgacggaggagacggagaagctcgagttcaacccgttcctccggtgccccgaggtggacgtcatcccggcgacgtcgtgcgcgcagagcgcgtccatcgaccacggccgctcgctggtctacgagatatgccagcgcctgcggaacggcgagccgctgcccgcgtcgtggcgagctttcctggagcagtcggacaccaagatcgacctgtcaggatgcccggtcgctgccgccgcgacacccacaaggtctaacgccggcgacgccacgaaggtgacgctggccaggacgtggtaccaggcgctctgggccacgctgtgccagccgctgctgcaaacgctggtgccgtactctgtcctgggcctcgtcatcttcctcccgctcaggggcctcctcgccgtcgccgcggccacccgcttcccgctctactggctcctcccggcgttctgggccgcgtcgggcgtcgccgccatggccacgtgcgcggcggcgaagtgggcgctggtcggcagcagggtcgacggcgacacggtgcacatctggtcgccggccgtgttcctggacacggtctggcaggccgtgcgcgccgccacggcggagtacttcgccgagctgacgcccgggtcggcgccgttcgcggcgtggatgcgggtgatgggcgcctccgtgtcccccggcgacggcgtgtacgtggactccatgggcgcgctgctgaacccggagatggtgcgcctggagcgcggcgccgccgtcgggcgggacgcgctgctgttcggccacgtgtacgagggcgaggccgggaaggtgaagttcggcgccgtgtccgtcggggaggacgggttcgtcggcagccgcgccgtggccatgcccagcgtcacggtggacgacggcggctgcctcgccgcgctcgggctggccatgaagggggagacggtgaagcacagcatgtaagcaggacgatgacgaggaggcatgcatgcatgcatgatcagttgctgtgctgcttttactcttctttttcacttctttgaacttgttttatatacgtacgcgaattaggatcttggtgatcataatatggtagtactcctatgatcaataagtgaccgttggaagaagaaataaatgatcggtataatttgcctgcatatttgtaacgggttagatggaattatacggaatataatgaaacaaataaatcgaccaccatcgtggtcagcatatatatctgaacagcattagcattagcattagcagcagcagcagcatataagcaagatcggcacctgcgtcgctgtctcggtgatggtctttttccctgtttaaacttcaaaattttgtgatgtctttgtctgccatacggaaaaagggatatatggggatcgtttcgagtccatgaccatgttggtgatcgtttccaaaccaaacaaagctttccacactgttggcgaaaaggttgaggatactattatgaattttaaaccgatctcctgctaccgtccaaagcaaagagagaaaaaaaaggaggcaggcaatggcaaacctgtaaatacggagcggtatcgtgcaacgactctgacagcctcaacaacacccagccttcccctgcaccagctggccctgacgtcagcaaccggcagcgccgccgccaaaggatggaatcccaggcccagcaagccacaaccactgcacgtgggccccaccccctcatctctctccctctgcaccggggccccaccgcatcagcgctcgccaccaccgaggcaacgtgtccctttcgcgacactcgagtacgcgagaccgtacggcgtgaggcacctgcgctgcactgcagtactgcacctcccccccccccccccctgcaaaggttggaaggagcagaaaaggaaagaaaagcctcttctactactagtcttcttcacctttttttcctgtgcgtcttcccgttgctgcgcgtacacgattgaggcgcgggcgcgcggctagactctggatggctcatcctcattgggccgtcaagccgtgctgctgcttctgctgctgctgcctcctcgtcgccgccgtgctcgccgtcgccgtctttctggccatgtcgccgcccgccgccgccgccgccgccgcattggtgtcacaaccaggtaggttcaaaaagtgcggggtcttttctgtaacgtgagttcttgacgacgcggctttttgtagcggcggcggcggcattgcaacgggccgagacgacggcgaccatgtacaccgcgaaggagttgcgggagaagcaggacgtgaccaaggtcggtctgagctcaaaaaaaggtggctcttttcatggctttcttgccctgttcgatcgatctcatggtggtgtagggtttcttgatttggggggttgcagggcgcggaggaggacgtgaccacgacgacgacgacgacggggttcggcgcggagtcggagagggaggtgcccaccgggccggacccgatccaccaccacggccgggggcccaggcggcagtcaccgtgagtgcgaatcccccgtcgccgtcgccgggttaacgaatcgggcgtgaacccagaatcccatgagacgcgatggtctatgaaagaaagattgtgctcttcaattcgttttgctgaatctgtgatgcacttggggattttattcagattcatttcttgctgtagggaacacagtagtatgtctgaagaactaggcagctagcttaccaccattatctttgttttttgcataccaaactaaggaaaaaaaatacgattcataagttctccctaagttcttcttcctaaggaatctttgcatgcttccggatagttcctctttactctctcttcttgtattgtgatggatttgagttttgaacagggagcttgttcctgttcaagtattctgtatgttgatgcatgattgattgttcaagttgaggaaagaagcagcaaaactttttgttcctttttctgttcatggaaggatgaaaactgcagctttgttctgttgtgtgcaatgaaaagagttcatgtctagtcttctgatatgtgctggccctttttgaggcctggagcagcagcttggtccaatgtgcatatatctcggctcagaagtgcacaagacttgattcgaaattctacctggttgctgctacttgctggagtagcaagcatgcttgcctgttgtaatgcctttcttgttgtactccactttttaatttggtgcaacaagtcatacaatactatcatgttcaacctttcataatcgtataatgcaactccactgcacaagagaatatggttgtgtgtttatataattcagaaaatgggcattttgtgttagctatgagtgaactgagtatcagtgaggtgtgagggtacgtttcttatgttgtttgatctatgtatgtggttagaaccattttcaggttcccttcaaaattaagattttcagaacaacttatctataaactatgtaatccgtagcttttgatgtactgcgatttgcaatattgcaatgatcaaggtagagagcatctgaagttgatgtagaacgttatatttagttgacacaatgacagtatgaattaccttctgttccatgacattgcaattcatgtcgactacctggtttgatttccagcaatggatccaaaagctcgcattcttgtgatttacttgaaatgattgtagttgacgtattgcagttcaccgtttgctgacggtgtacagcttacacaaatcactgagagagcatgttggaaacaaacacgcagtagaaatgtttaatgatcagagcagaattcaagtatttttagccaaaaatgggggaaataaatgaagcatacaacgaccaagtactcctactagtacagaaataggtacagtttgactcctttaaatgtaggtcctatctgattcgtatctcttaaccacaataccagatatcttaaccccctaaccattaaaacgatgcaatttaatttctatcgacgggtgatacccgtagaccggatatagagagtattagggtacgctggtacaagggtctacgtaatacgacatcaagcagacaaaagacgaagattatactggttcaggccccttgataggtaatagccctaatccagttgatgtgagattatatgatggaaaacacaggttacaaagggaacaatggaactcgatggatccgacgagatcgtagtcgagttggttcgactagatcctcggcgatttggctcctgcaggctccgacttcgtaggctgtgggggttgtattggctctgagattcgatgccttaggtcctctccggggggtcccttttatatcgcagatcaggcggtttcccagtagaactcggagacatcagaccttacacgatacattgacgacccagtcttgtccgagtagaactctttctatccgtaaactccgtgaaggatttccttaatgtatgcagagagtatccatatgcgcgtgggtatgccataccgatatgcgacgtatatcgaagggtagagggtgtacctaacccgtaaccctgacagtagcccccgacttctgcttaaatgaactcgtgtaaccattcgcgacttctcgtgtctaaggctgttgtcgttcccggtgtgaggaccgtagagacaggacgtagtcgagaacaccatgtgaagcccaacggtcacgagtgaatttaactgaagtccaaaaaactgccgcgcgtaacggacccagaaatttccggcggccatctctctcctttccttggaattcgcaccgtcggtagtgcgtctatttaaatggaattttggggatccattttgaatgtccgcctattgtgaaagagaacattcccgcctgcaagcgttctttgtcttctccgctcccacaagaaaccctagctcgtcaacctccaccctttctccggcgatctccgatcggcgatggatctcggcaaatcatcctccaccagcgcgtcgctgaagaagcttcaggaggacggcgcccttcctggtcgtggaaccatggaaagggaagcaggaggtactgaaccccagcccgtcttaggtcgcatggttgcgatcgaggactacgttctctgcggttttctccctccaccttccgaatttcttctcttggttttgaacttctatggtctttctttgctccatctgaaccccgattctatagccttccttagtatttttttacatctttgtgaggcctacattggggtagagccctttctcgatctcttccgcttctactacgagttgcgttggatgtaatccaacagggtatcaggatgcgttggattccgacttcgggatggcctgaagtcgcgttatatccccttccagtgtccctcctctcgcagcaaatggcggacgaggtggttctatcttcagatagaagattcggaccctgtcttcgttgttcctgaggaacaaccagacaagattttgtcttggaccgcaaaaccccctttgaccccttctcttcagttgtttatcgatgtcgtcgtcgatctccgagtgcgaggtttgtcggggtatgaagtcgctgctaacttcattggtagacggatccagccgctccaggctcgggcccacccagcctttgactattctggaccagaggacgcgacccgggtttctcctcgggatatctttctcgcatttatcccgatatgcttgtgtgcgcgttcctcctggctcatcgaaacttggttctcgattcacaggtctgagcagcgaagctatgggacgtcgtgtcagctaggtgatgatcagtggcccgacgacggcgagtgatgtccccgttcccctttgcgaaaagggggcggccgaacgcgatgccgccatcaatgtaagtgtactcagtagtcattccgcgtttttcttccgagatcgctttgtgactttatgaagcgtaggctcttcctctgactgacatcatcgggctgctcgtggaccatcaggtggaggcgtcactgaaagagaaagtcgccaaggaggcatccgatgctgctgcgctgctgctaccacaagtggtggcaatgttcccacaaaggagaggaagttctcctctgtaagcggacatcgtcgcaaggcatctgtcccctcggtaagctatcctgttgtctgatcatacagccagaacaatttcgccttacttcgcatcaaccgttctccaggcctcggacgcgtctcccccgcctccatgacgacaacaacttgtgacacttggcgagaagtaagtggatgaatttaagttttcgcgattttgttcgagcgttgtctgagccatggctgtctcatagggcggcgcgggtgaaggcagtgcaggacgagtccagagggacttccggcgcgtctcccgctgtagcctcgacggatgtcgtgcttgcgcccgggagccgcgaggtgacaccaagcggcccagccagcgatcccgcggctggtcgtggtccaccggctgccgtcctcacctgggaggagctccaggtcgagatggggcgtctcctcaaagctggtgctcgcggcattggtcgcgagatttccgaggcgaggtcggcagcggcgtcggcaaacgagcgtgccgaccggctggcacatgagctggcggaagctcgtgaagacctcaagaagatgagggaattggtggccggcaacgagcgacaacggcagaggctcgagcaccgcatgtcggagctcgggaacaatttgtcggaaatccgtggctcgttgcgggtcacctacactggtctgcaccagctcgtcggggagtgcggcattaagtctaccatcccggcgaatctcgatgatttcttgctgacatcttctctagcggagctggcggcggcgatggaggagattccctccaagcatgcggtcaagatcggagaggagacgtccaacgggatctacaccggggcgtgccacgtccttgcgtgtgtgaggctggcgcatcctgaactcgatctgcgcgagatcttggatcagggggcggctagcgatacgcgtaaggaggtgatggaagaagtcaacgatctgggggaatctgttctcccaggttttgaagagtaggatctcttgtatcccttagacatgctgtgtaaaactttaatagatttcaaccgcctttgtgcgtgcagtcattatcctagctttctcttgcattttgatcttgagtactctttgtcccttgtagagatgttgatgacgaggatgtccagcagcgcgggcagcctgagtcaccggcgatcattccggctctcgcgtttgaaccacatgcgtcgctagacaatatagactagatcctagctacgaggacggagacggcgacgacttctttaggttagtggtccccttgtcccttttttgctcctccgactagatcggccgtgttctcgaaagagaagtgaagcttgactaagttattcccacattgaacagatcttgagggtgctcttgctgggcaagatcgtcgtatccaatattggaagacgaagtttgaagtagcggaactcgagaggacaatgctggcagtaaagaaggagcaagctgtggaaacgctccgaggtcgtgaggtgtggttcaactcgtacttgaagagttgctacacatccatggccaaggtctgtagagagctccgagtaccccgtggggatcccgaagagttggcggccggatatatctcgtggctgaacggggcctgtgctcagcttgaaggcgtcggcaagcgcatcgacgaagccttgaagcaggagtgtcgtcgatcgagccgatatgccggagggcacgtgttggcctgcatacgagaccatcgcccgcgactggacctcgattttctccgtgaaggttttgctcgttctcggaggactccggcggagatagaccacctggcgaagtcgatggtgtcgttggcggagaaggtcttacaatctatggactggcgttggccttcttggtagtctttgtatcctgcgattgtcatcttagggaaaagtgtaatatagccttagacttgtaaaaattgtaaggagtattttgtgaaatggaaaagaaatctatcttaacagatctttcttactctggatatcgtgtgtcagagtgtgttctcagttcacgactttagtcggtcgtttgagtcgcacactctccctagcccccagccttgtcgtcggagaaattttctcggaggataaggctcttggacctttggcctgccttggttgaataagcactgatcctagcccccagccatgaagttggaaagttagtttccgattacacggcttggttaatacgtacggcgagaactcttacacgaccaggtcttacatggtctttcgtctctacaggatctgacaaggccttatcggctctgggcgtccccagccgaagatcccttaggttcctcggaggccttgtcaagacggcgtaaagggacatgaggataggtttcaacgctaggtgtcatctgggtaagggatcatcgggcaagaacactttgattgtaatatggacctaggaataggctttattgatgttgtaaggtgtcttacaggtatggatgatattgactcatacatagaatttacgtagttggtcaatgtttcaacaatttgccaactcgcgaccatcaccatctgcaattttgaatgcgcctggccgcaagacttgtgtgatcatgtaaggtccttcccatttgggtgagagcttgtttcgccctgcttggctttgaacccgtcggaggacgtagtcgccgatcgaaagtatgcgtgctcggatgcgcttctcgtggtaacggcggagggcctgttggtaattggctgctcggacggcaactcgttcgcgatgttcctcgagtagattcacatcgacgtttcgctgctcctcctgatcctcgttggaatacttctgtactcgtgtactctgatgtcgtagctcgctagggagcatggcctcggagccgtacacgaggaagaagggtgtttccttgctagacgttgttggtgtggtgcgtacggcccatagtactgatgggagttcttcgaccaattttttatcatgtgacatgagcctgtcgtagacgtgggttttgatcccttgtagtactatgccgtttgccctttcgacttgtccgttgctttgagggtgagagaccgaggtgaagcatatcttgactcccagcccgatgcagtaatcctggaaatcggcgctgatgaactgagagccgttgtcggttatgatgcggtgcggtagtccgtatctgcagaatatccccttgatgaatttgatggcgttgtcggccttgatttcccccgtgggtactgctttgatccacttagtgaatttgtctatcaccacgaataggaacctgtagccgccctgtcctcgtgggaatggcccgagtatatcttacccccagcacgagaacggccaagtaagagggatagtctggagcgcttgcgcgggtagctttgtgtgcttactgtggaattgacaggcttcacatcgctggaccatgtcgcatgcatctttgagggcggttggcaaaaaaaacccttgtcgaaaagctttcctgaccaatgtccgaccagtggcgtgtgacccacagatgccttcatgtatatcaaggaggaggtgtttgccatcatcggacgagacgcatttgagaagtaccccgtttggcgctttcttgtatagatcgttgccgaccatacagtagatttttgctttacgggttattttctcggcctctatatcgtcctcgggcaactcctcgctgttgataaatttgattagtgggatgcgccagtcatctatggtcttgatatcggcaacgacgtgttctgcctttgtggcctccgagctaatgtcgggggcggctgggctaacttcgccgctaacctcttttactaatggcttcgtcaggatgtctagaaaagtgccgggctcgagcggttctcgtctggacgcacgtcgtgctagttcatctggctcgatgttgtccttgcggtagacgtgtcggacctcgatcccatcgaaccttttctctagcttcctgacttctgcgagatacttggataactcggggttagagcatttataatctttgtgcacgtggttcgcgactagctcggagtcccctttcatgattagtcgcttaaccccaagtgcagctgcagctcttatcccggcgagtagtccctcgtattcggctgtgttattggtcgccctgaagttgaggtggattgcgtgcttgaattgatctccggaaggagacgtcaagataaatcctgctcctgctccttggctgttgagtgcaccatcgaacgccattgtccatgtttcgttgtcgatttggttgtctgatttgttatcgggcatagtccaatcggctactgtcggtgacaagggaccgggggtatcttgactagaggtttggggcagctgcagtcacccacgtggcctgaccccctcgggggggtcgggcccgagggtgatgtggccgcccctccctctgtctccccgaggggtcaggccgctcccgtttcggccccaagggctggggcgccccgaccccctgtgggtttggcgccacgtgtgtgggttaggtgagcacagcggcgctcacctaaccgcgtttattgcgggttggacgagcgccccacgccgcatttaatgcagcgcagcacactcgttcggtccgtgacaggtcacagtgtgtgaccggtcacagaccggtcagatcgtgggttaggtggcaacaggcggcctttcgcacgcctcgccccgtcccgtcggaatgatgagagcctctaggcactcgtccctagccggagccggcgtgctgactcctggagttagcacgtcagtcccggctagattcataccaggcttcatcgcaaccattacaaggaagtcattttatgaagaagggctgacgtgtggcatgctaaactgacgcgtggtagacaagaatgaccggtttgtgactggtctgacgccggtcacgtcatcggcagacaaccgtgctcccacgttgcgcctgcttccggcggagtggaggtaggtatggcccatcccatcagagggtcattcggacaacagccatggcaaatctccgcccattaatgagggagtaacagggagatccccgatgtcaggcgagtgatgacgctgggcctcactcaaagacaagctgtgatttagcttccaggcgaaggcgcaagccagttttttcttttttgggaagatagggtgagtccccacccaaaagaagagtaggtagaagtggtgcatgtgggatccccttgagatataaaaggaggaccttgcccacttaagaaggggggagctcgggaaagaggggggagaagacctgagctcgtagaggagagaaagaggaagagggtttctagagtttgaactctcttgctctccagctctttgtaactccttcatacacagatccaccagaacacaggagtagggtattacgcttctcagcggcccgaacctgtctacatcgcccgtgtcttgcgcatttgctctctcgcgaaacattccacagatcgagtgcttagaacctcacctagcgcccccggccgaaccggcaaaggggggcccgcgcggtctcccggtgaggagccccacgctccgtcatctggcgcgccaggtagggggcgcgtgtgtttttctaagccctcgtcctctttcgtgtgcgccaagcttctcccgctcagcccaatggccgaacgggcagtggcgcacaacctctctccgagcgctagcggtgacgacggggagcagaacccgcgccgtcgagctcgtactccaccgcccccctctcgccgaagtcttaggcgggaggaggcgctcgagggggtcgaaagatccgcgacttcgccgcccacgagcgatgaagaaggacggcgagacggagagcgtcgcctcctcgtctacggcgatggcagcacgccccagggcgcgctccaagctgcgggcgcgctcttgcgtcacccgcccgtcgtccccgatccagagactccagcccgacgttggctggatgacgtggccgacttggtcatgacggcgcagcagcgcctaggcgccggtgggcggtcctccgctgccaaggtctctggcgctgctaccgccggctccgtgtcgtcgaggcggagggcgcggcgagcggcggccgttacccgccgttcgtctgccattccctcgtcaatgcctccgacccaagaagatgtgcgtagggggccggatgcccgcctcagtatcgagcgccggcgcaatggtcgtcgtgctgcccacgcaacagaaggcgcttcctcgtccggagcgccacttcggttcgggcgcgggggccagccccccgtgcccccgcttggtggtgtcggctgttgagcctttgtggcgagccttcggaacgtccgttggcccccaaggttccggcccaccatcaccgaaaaatatgacggaagcgtcaaccccgccgagtttctccaggtctacacgaccgggatcgaggccgccgggggtgacgacagggtcatggcgaatttcttccccatggccctgaagggacaggcgcggggttggctaatgaacttgccgcccgcgtcggtccactcttgggaggatttgtgccagcagttcaccatgaacttccaaggcacatatccgcgcccagttgaagaagcggacttgcatgcggtacagcgaagggacgatgagtctcttcgctcgtacattcagcggttctgtcaagtccgcaacaccataccatgcatccccgcacacgcggtaatctacgcgttcagggggggcgtgcggcacaaccgcatgctcgaaaagatcgcctccaaggagccccagaccaccgcagagctttttcagctcgcggaccgtgtggctcgcaaggaggaggcctggacctggaactccaccggttccggtgtggcagcttcggccgcccccggatccgccgctcggtcagggcggcgggacaggaggaggaaaaagaggtcggcccattccgacgacgagggtcacgtcctcgccgtcgagggcgcttcgcgggccacccgaaaggggaggcctgcgagcgacaaaaaggaggccggcgctcccagcagggagcgcccgaccggcaagtggtgcgccgtgcacaacacctccctccatgacctcgcggactgccgcgcggtcaaaagtttggctgagcggacgaggaagtgggaggaggagaggaggcaggaacgccgtgagggcaaggccccggcggctccctccggcaaccggcgaagtgaggccaagcagaaggcccccgccgaggacatcgacgatggcgacgatgacctagggttccaggagcctggggccactatcgccatcgtcgatgggggagcgtgcgctcacgcttctcgtcagagcctcaaggccatgaagcgagagcttctggcagcggcccctacccatgaggcgacgcggcgggcgcggtggtcggaggttgccctcaccttcgaccagaccgaccacccgccgtgcgttgcccggggaggacagatcgcgatggtggtttcccccaccgtttgcaacgtgaagttggggcgtgtcctcatagacgggggtgcagccctcaacatcctttcccccgcagcctttgacgccatcaaggccccggggatggtgcttcggccgtcccagccgattatcggtgtgacgccggggcacacttggccgctaggtcatatcgacctcccggtcaccttcggtggatccgccaacttccgcacggagcgggtgaacttcgatgtggcggacctcagtctgccctacaacgcggtcctggggaggcccgcgttggtgaagttcatgacggcggtccactacacctacctccagatgaagatgccgggccccggtggccccatctctgtccatggcaacctcaaagtcgcgcttgcttgtatggagcagcgcgcggaccacctcgccgccgcgtccaagcccgagggtggcaacgagaggctcagtacctccgtcctagccgccccgaggcagcggatgatcacgtgcgacgaggtcccggtcaaggaggttgccctgggcgacggcccgtccaagaccacacgaatcggtggtcttctggacggcaaataggaagacgcgcttgtctccttcctgtgggcaaacgccgacgtcttcgcctggagaccggcggacatgcccggggtcctcagggaggtgattgagcaccgtctcgccgtgcggccgggcgcaaggccggtccggcagaaagtgcggcggcaggccccggaacgtcaagccttcatccgcgaggaggtggcgcgacttctggaggccggattcatccgagaggttatccatccggagtggctggcgaacccggtcgtcgttcccaaggcgaacggcaagcttcggatgtgcatcgactacaccgaccttaacaaggcatgtcctaaggacccttaccccctgccacgcatagatcagattgtcgactccaccgcggggtgcgaccttttgtgttttctagatgcatactctggttatcatcagattcgcatggctagggaggatgaggaaaaaactgctttcattacccccataggaacttattgttatacgacaatgcctttcgggttaaagaatgcgggtcctacttttcaacgtactactcgaatttctttgggtagccagataggacgcaatgttgaggcctatgttgatgacttggttgtgaagacgcgcaaccaagagaccttactctcagatctagcggaaacttttgaaagtctccgctccgcccgcataaagctgaaccccgataagtgcgtgttcggcgtgcctgtgggcaagcttctcgggttcttggtctctgcccgaggcatcgaggccaaccccgagaagatacgagctatagagcggatgcgcccccccagcaagcttagggatgtgcagtgcgtcaccggctgcatggcgccctaagtcggttcatattgaggctgggagagaaggcactgcccctatttaagctcctcaaacgctccgggccgtttacctggacggaggaggctgagcgggccctcactcagttgaaggcgtacctcagttctcccccagtcctggtcgccccggagccagatgagccgttgctactctaccttgcggcaaccccgcaggtggtcagcgcggcgttggtcgtggagcgcgacgaggacaaccctcactccgcgcatccccaccctgcgtcgactcgacccgggagagagcaggcaggagaggcccccgagccgaacggcggcccgaggcccccgacggcctgagctggccctccgcctgcttgtccgacggtgccaggcgcccccgacccccaggatggccccggggccactgcgggaaggccgcgcctgtcgccctctgaccccgaggtcgtcgacacagaagccgagtgcgccccgcgtggcctctcggacgaagagcgccctggagatgcggcccctggcgaagaggatcggccccgccgaaaggtgcagcggcccgtctacttcgttagtgaggccctccgggacgccaagacccgataccctcaggcccagaagatgctttacgctattctgatggcttcgaggaagttgcgccattatttccaggctcatcgggtcacggtggtcacgtcttaccccctcggccaaatcttgcataaccgagagggtactggacgggtggtgaaatgggcaatcgaactctctgaattcgatttgcgctttgaaccacgccacgcgatcaagagccaggccctcgccgactttgtggcggagtggaccccagcccctgagcccatctccgtccccgaggccagctcgggcccctcgcagctgcctcacaccgcctactgggtgatgcagttcgacggctccctatctcttcagggcgccggtgcgggggtcacgttgacctcgccaagcggagacgtcctcagatacctggtccgcctcgactttcgggcgaccaacaatatggcggagtatgagggactccttgcgggactcagagtggcagctggactggggatccgccgcctcctggtgttaggcgactcccagttggtcgttaaccaggtctgtaaggagtaccgatgctctgacccgcagatggacgcttacgtgcgccaggtgcggcgtatggagcgccatttcgacgggatagagcttcggcacgtgcccagacgggataacgcggtcgccgacgaactctcaaggctcgcttcctcgcgagcccagaccccaccgggcgcctttgaagaaaggcttgcccagccgtcggcgcgacccgaccccctaggggagacggacgcgcctgaacggcccccgaggcccgtcggagtccaggcctcgggacccgaggggagcgctcccagttcccctagattgattgcttggatcactgaaatccaggcgtacctcgcagataagactctacccgaggaccgcgaagggagtgaacgcgtccagcgcatctccaagcgctacgtgctggtggaagggaccctctatcggcgcgcggctaacggagtcctcctgaagtgcattcctcgggaacaaggtgtcgagcttcttgccgatatccatgaaggcgagtgcggagcccactccgcctcacgcaccttggttggcaaggcctttcgccagggtttctattggccgacggctctcaacgatgcggttgacctggtccggcggtgcagggcgtgccagttccacgccaagcaaacccatcagccggcccaggccctgcagaccatacctctttcgtggccgtttgctgtctgggggctcgatatcctgggtccgttcaggcgggccccgggcgggttcgagtatctgtatgtcgctgtcgacaagttcactaagtggcccgaggcttatccggtcatcaagatcgataagcactccgcgcttaaattcatcaggggcatcactgctcggtttggggtgcctaaccgtatcattacagataacggcacccagttcactagttgatgaggacatcaacaccatcgatacatccacgtccccccatgtacagcatgatggtcctattacccgcgctcgtgcacgttaactaaattatcaggtgagttctttcttgagttcatattcctcgtctttataccccggagatgcgtgcactcgtgttttactcaggaacgatggagaggatccaaagggaagaggattcgcgcggggtggattcagactgcagggcagcgccaacttctgacggccgccacgacttcatgcgaactccgatttgggcgtgcaagtacttcacggaaagcttatcaagtctactttcaaatggatccagccacatgtccatatctattctggagcggccgcaattgtcattttactcccgactattttctgtcgatggtgctgcgtcacctcttttggcccaatgggctgtgtatccaagttgggcccattaggggcgcgtcctagggttggagcacgaccctatggtcgttcttccccctctttttatacctctagtcaccgccaagaacaggcgggttttgatgatagagatagcttcttgctaccagctcgcagcgcgcgtgttggctaaaccgcccgtctgcctgtaatcggaaccccaccatattgagtttgatagtgaaactttcatctttatctagcaatttcagtgcttgtcctacttgttcttgcttgttcttcgattgcttgcaggacgagtgccctcgtggccgggttgacgcgcaccacaagttcgcggcgaccattggagacggtgtatcggttgctaaggcgcagcgtctttggacagttgtagtcgggccgtgaacgtcgtcttcatctaatcgagttatcccttacctctcatcgaaagatcgggccacaaaccctagcgggttcgcatcaggtggtatcagagcgtggttcatcggtgagagaatttacccttcccttcgtcattaattttttttcctatagcccagaaaagaccaaaaaaaatagtagattagttttcccgtgatcctatagaccattgtgactttttactagtactgcttagttaaggcttgttgagttttcgattgcatcggttgtgttaatttgctggtcttagtgttaagcgattagagtttcgagttcttgccaccaccgcacatcgccaccttcatcaattttgccgtcatcaccaccgtcaccaccatcgcagtcacccaccaaatcactttctatttgtatttgatctgctgccgatagcttttgtgagttgccttgtatcctgccgccactagaaaggaaatagaaccctgattcgagtgaccttccttaaaacagtcatatctttttcatacggactcgaaattaggcttataatatatccacggacatctacaaaaaaagttacatccgggttcggcaaatttaaaatcgccaaattcctcttgcaaaattctgtttttgtggcgagaagcttcgggacctattcgcatagaactttgaaaaaaattctacaagcttcatactttgtccgtttgagataagattttctgtggttggttctagtgtgctcctggttgtgaaaaaaatatcaaaagaaaaaaaaagttgtgtctctctcctcagcactagagagagcaagcaaaaaaaaaaaaggatccagcgagcacaccccaccattccccctttgtcaccaccttccaccaccggttcttgttttcgttgctgtttgggtttgtgttttgtggcgtcctttgtggttaggctcgcgtctctacttcaactagcctaggaccagcactgtacactatacccttgagcgattattcaatttgctttggctaacgtggtttctagttttctcttgagcattgctttcagcccaccaacagctccactacaaacccgactacagcttgacaggtcttgttgctacagcaccgatacacctcgttccacggttgctaacttgtgggttgctgtccccctcctgtgggcaaggtaagaactggtaagagcttgtgagacaagctgcgagtgaagtgagagtgagcgtcttgcaaaagctacatcccaatagttgtgtagggtttacattacatcctccattgttttgttgtccttcatttctaaaccatggcaggtctagaggataaagatgaggagggtgcatctcattccccacgcaccaaaggcatcatccaatactttacaaggcaagtgaagcagcacacagaaggacttgatacagatttgcaggtgacaaatgagaagattggacaattggagtccacgcagatctccaccaacactaagcttacagggctggagatagcggtcgcccgcattgacactagccttgctgctcttgtgaggcattttgatgctctcaatgctggaggcaatggtgggggtaatgatgatgacattgacggagagtacgtcgaggataatttggaggatgaatatattgctgacactgaacaagatgatcgagatgctcgagatcgtcgacggctacacaacaatcgacgaggtatgggtggtcgccgccgacgcgaggtacgcaacaatgatgatgctttttctaaaattaaatttaaaattcctccttttgatggaaaatatgatcctgatgcgtacctctcttgggagattgctgttgaccaaaaatttgcatgccatgagtttcctgagaacactagagttagagctgctacgagtgagttcaccgattttgcttcggtttggtggatagaacatggcaagaaaaatcctaataacatgccacaaacttgggatgctttgaaacgggtcatgcgggctagatttgttccttcttactatgcacgtgacttgctgaataggttgcaacaattgagacagggtgcgaaaagtgtagaggaatattatcaggagttacaaatgggcttgcttcgttgtaatttagaggaaactgaggacgctgccatggctagatttttgggtgggttaaaccgcgagatttatgacatcgtagactataaagattacactaatatgacccgattgtttcatcttgcttgtaaggctgaaagggaagtgcagggacgacgtgctagtgccaaggctaatttttctgcaggtaaaacttcatcatggcagacacgcaccactcctccggccggccgtactacttctccatcttccacacccacaaccagtcgagcagcacctcctccatctggtgacaagtcagcgataaaggctgctcagccagcaccgagtgcttcttcaatggcatccacaggccgaatgagagatgttcagtgccaccgttgcaagggctttgggcatgtgcagcgtgactgccctagcaagcgagttttggtagtaaaaaacgatggtgagtactcctctgctagtgatttcgatgatgatacacttgctttgcttgcggctgaccatgcagataatgagccaccggaagagcacattggggctgcatttgcggatcactatgagagcctcattgtgcagcgtgtccttagcgcacaaatggagaaggcggagcaaaatcagcgacacacgttgttccaaacaaagtgtgtcgtcaaagagcgttgttgccgcatgatcattgatggaggtagctgcaacaacttggctagcagcgagatggtggagaagcttgcacttagcaccaaaccgcacccacatccatactacatccaatggctgaacaacagtggtaaggcgaaggtaacaaatttggtgcacattaattttgcaattggaaattaccatgatgttgttgaatgtgatgttttgcccatgcaagcttgtaatattctgctaggtagaccatggcaatttgatagggattctatgcatcatggtaggtcaaaccagtactcttttctgtaccatgataagaaaattgtgttgcatcccatgtctcctgaagatattttgcgtgatgatgttgctaaggctgccaaatccaaatgtgagagtgataaaaaagcccaatctgatggcaagaaacctgagacaatcaatttgaaacccagatgcttacttgctactaaatctgatattaatgagttgattgcatcaccttcagttgcctatgctttggtatgcaaagatgctttgatttcacttcacgatatgtagcattctttgccccctgctgttgctaacattttgcaggagtactctgatgtgtttcccaaggaagtgccaccggggctgccaccggtgcgcggcattgagcatcaaatcgacttgatcccaggtgcttccctaccgaatcgtgcgccataccgaaccaaccctgaggaaaccaaggagattcagcgtcaagttcatgagttgcttgataaagggtatgtacgcgagtctcttagtccatgtgcggttccggtaattttggtaccaaagaaagatggttcatggcgtatgtgtgttgattgtagagctattaataacattaccattcgatatcgtcatcctattcctaggttagatgatatgcttgatgaattgagtggctctattgtgttctccaaagttgatttgcgtagtggttaccaccagattcgtatgaagttgggtgatgaatggaaaacagcatttaaaacaaagtttgggttgtatgagtggttagtgatgccttttggtttaactaatgcacccagcactttcatgaggttgatgaatgaggttttgcgtcctttcattggaaaatttgtggtggtctactttgatgatatcttgatttacagcaagtctatgggtgaacattttaaacatttacgtgctgtttttaatgctcttcgtgatgcacgtttatttggtaaccttgagaagtgcaccttttgcacagatcgagtttcttttcttggctatgttgtaactccgcaggggattgaggttgatcaagccaaggttgaggcaattcagagttggccgactcctaaaacggtctcacaagtgcggagctttctaggactcgcggggttctatcgccgctttgtgcaggatttcagcaccattgctgcaccattgaatgcgcttacaaagaagggagtgcctttcacttggggcacatcacaagagaacgccttccacatgttgaaagataagttgactcatgcacctctcctccaacttcccgattttaataagacttttgaacttgaatgtgatgctagtgggattggattgggtggtgttttgctacaagaaggaaaacctgttgcatattttagtgaaaagttgactgggcctgttctgaattattctacttatgataaggaattgtatgctcttgtgcgaactttagaaacatggcagcattatttgtggcccaaggaatttgtcatacattctgatcatgagtctttgaagcatattcgtagtcaagggaagctgaaccgtagacatgctaaatgggttgaatttattgaatcttttccttatgttatcaaacacaagaaagggaaggagaacatcattgctgatgctttgtctaggagatacactttgttgacacaacttgactacaagatttttggcctggaaacaatcaaagaccaatatgcgcatgatgctgattttaatgatgtgttgctgcattgtaaggatggaagaacatggaacaaattcgtcatcaatgatgggtttgttttcagagctaacaagctatgcattccagctagctccgttcgcctgttgttgttgcaggaagcgcatggaggcggtttgatgggacattttggcgccaagaagacacatgacatccttgctagtcatttcttttagccacagatgcgaagagatgttggcaggttcgttgctcgctgcgctacatgtcaaaaggctaagtcacgcttacatccacatggtttgtatatgcctcttcctgttcctactgttccttgggaagatatttcaatggactttgtgttaggattgcctaggaccaagagggggcgtgatagcatttttgtggttgtggatagattttctaaaatggcacatttcataccatgtcataaaactgatgatgcttctcatatcgctgatttgttctttcgagaaattgttcgcttgcatggtgtgccaaacacaattgtttctgatcgtgacacaaaatttcttagccatttttggagaactttgtgggctaaattggggactaaacttttgttttctactacttgtcatccccaaactgatggacaaactgaagtggtgaatagaaccttgtctactatgcttagggctgttttgaagaaaaatatcaagatgtgggaagaatgcttgcctcatattgaatttgcttataatcgttccttgcattctactacaaaaatgtgcccttttcagattgtgtatggtttgttgcctcgtgctccaattgatttgatgcctttaccatcttctgaaaaactgaattttgatgctaagcaacgtgctgagttgatgttaaaactgcatgagacaactaaagaaaacatagagcgcatgaatgctaagtataagtttgctggtgacaaaggtagaagggaattgaattttgaacctggagatttggtttggttgcatttgcgaaaagaacgatttcctgatttgagaaagtctaaattgatgcctagagctgatggaccatttaaagtgttagcaaagattaatgagaatgcatataagattgatttgcctgcagattttggggttagttccacatttaacgttgcagatttgaagccgtatttgggagaagaagatgagcttgagtcgaggacgactcaaatgcaagaaggggaggatgatgaggacatcaacaccatcgatacatccacgtccccccatgtacagcatgatggtcctattacccgcgctcgtgcatgttaactaaattatcaggtgagttctttcttgagttcatattcctcgtctttataccccggagatgcgtgcactcgtgttttactcaggaacgatggagaggatccaaagggaagagaattcgcgcggggtggattcggactgcagggcagcgccaacttctgacggccgccacgacttcatgcgaactccgatttgggcgtgcaagtacttcacggaaagcttatcaagtctctttcaaatggatccagccacatgtccatatctgttctggagcggccgcaattgtcattttactcccgactattttctgtcgatggtgctgcgtcacctcttttggcccaatgggctgtgtatccaagttgggcccattaggggcgcgtcctagggttggagcatgaccctatggtcgttcttccccctctttttatacctctagtcaccgccaagaacaggcgggttttgatgatagagatagcttcttgctaccagctcgcagcgcgcgtgttggctaaaccgcccgtctgcctgtaatcggaaccccaccatattgagtttgatagtgaaactttcatctttatctagcaatttcagtgcttgtcctacttgttcttgcttgttcttcgattgcttgcaggacgagtgccctcgtggccgggttgacgcgcaccacaagttcgcggcgaccattggagacggtgtatcggttgctaaggcgcagcgtctttggacagttgtagtcgggccgtgaacgtcgtcttcatctaatcgagttatcccttacctctcatcgaaagatcgggccacaaaccctagcgggttcgcatcactagtgagctcttcggtgactactgcgaagacatgggcatcaagctctgcttcgcctcccccgcccaccccagaagcaatggccaagtggagcgcgccaacgcggaaatcctcaagggcctcaaaaccaaaaccttcaacatcctcaagaagcacggcgactcgtggatcgaggagttgccagcggtgctttgggcgaaccgaaccacgccaagccgagcaaccggggaaacgcctttcttcctcgtctacggcgcggaggcggttctcccatccgagctcaccctgaggtcccctcgggccaccatgtactgcgaggctgatcaagatcagcttcgcagagatgacctcgactacttggaagaacgaaggcggcgcgcggcccttcgagccgcgcgctaacagcagagcctgtggcgctaccatcagcgtcacatccgggcccgatcactctgcgtcgacgacctcgtcctacgccgtgtccaaacgcgtgctggactgagcaagctctcaccaatgtgggagggtccgtatcgagtgatcggcgtcccccggccgggctccgttcggctggccacgggcgacggcacagagctgcctaatccatggaacatcgaacaccttcatcgcttctacccctagtgggggtcgggtgtcaggtctcgggctcgggccaaccccgcgcccccccgggcgtgcagggttggccgggggctaccacatgcatatccttatcttttttctcttccgtatttcagtaaaagcattttcgatttcctgaggattgtgtctgtgccatcgtttccttttgaagaatcttggcttgaattagcacgctcgtgcccgaccctgccctcggtggcccgggccggctaaaatcgccaaacggggcccagaaccgagccgtgccccggggcgtggtgaactccgggggggaatcggcaaaggaccacaatcgggtcatccataaccctcggtcaccacgctcccggcctggccagtctcgacacgcggatctccctaggcactagccccgacccgcgccacttgaggttgggacctgggcacgaccctcgttcaagccaagacacagaaggaccgcggcacggaccatcctcgtctcatacacacaacaaacttaactgacgcagaaatttcctctttacttgattacagattaaatcagtctatacaagaagggggcccgaaggcctcggaagaagaaggaaaagttattaagattggcgggggcctgggggctcactccgacgcccccgggccgtcggcctcgtcgtcgctgtcgtccgcgccgtcgtcaccgccctcctcgtcggagtcgagcgcgaacgcgagtcgaggggccgtaccctcgaagctgtggacgatgtggtcggcggcgtcccggaccctcgcacgtgcgccatcctcggttccgggagggaactcttccagcgctgcccacggggagaagtcagggtccctggcctggtagcttgccagtgcgagctccaccgccccccgggcgaggtccctcgaggatgacttgatcgcctcctcgagctcctcggggagccgctggagggtcccggccatctctgagaggcgctgggcgatgcccccctggttggcggcgtatttcgcggtccgcccgccccagaggcccgcctgccgcccggcacggtctagacgggaaacggcgtcccgaagcatgccaagccctacctcgcccgccaagcggagggcttcgacctccccggcggacgagtccagcgcgccctgcagctcggtgatggtgtgttcggcggctgcgaggcgggcggctaggtcgccgtcgcccgcggccgccccgccgctgcgcgctctcgcgtctagctccttcgcccgcgcctcgaattcagcggcccgctgatccagtgcggccctctcggcgcgggcgccttccagattgaggcgcgcctgctcctcccaccgctgcgccgcggcctcggcctcctcgagagctcgctcccactcagtgagctcgtcctcgcggaggcggagtgcggactcctcttcggcgcaggcagcctcgtgcgccgccagcgttgcctcccggatggcgacggcggcctcgtgacccgccagttccctctccttcgtgtccagggcgcgggcgcggtcctccagcaccgtggcgcgagcctcaagggcctcttcgcgctgccgggacgcgtcgagcttcttctctagctccgccgcccggctcccgtattggaggcagaggtcgtcccgcgccacgttgaacacggcggtggcgatgagggcagtctcccgctcctcctccacctccctggcgatctccgccaggtccctacgacgggcctcgagctctgaggcgtgccggcggtgtgccttgcggcccgcctccaccatggcttccaccgagcgccgcccctcttcgacgcgcgcccacgccgcatcgacctccgcccgctctgcctgcaggacctccatctgggcgcttaacccgtccaacaccgtggtgttcgcagcggccaaggcctgcaggaggggttctgcgctcagtggggcagcggaaggcagagaggagagccgcctcggtgtgggcgccgcgcggctcggcccgccgatggacgtgccggactcgggggcgttccccgaggctggctcgccccaagcatcgcccgaggggtcgggcccgagcggcgcgcccgcggcctcgtcgtgggcggcctcggaagtcgtcgtcgcctcgggcggagtcgggtcgggggcttggcaggccgcccggcgtacggacggactcctcggcccggcggagtctggcctcctcccaagcggcttcctcagcctggcgagcccggacggcctcctgggcagcttcttcggcttcccggaggcggtctgcggcttctcgccggtcagctccccgcctccgggcctccgcggtcgccgtctcctcggcctcagaccggccggacttggaatggcgggaagggcgcgacgggatctcgctgaggcagaagaaaaaccagaagacgaaaaacgggtgagtgaaaacttgccttgggagatgggagaatgaatacggccgcagtgggcgcggggacgaacctgcgaggaggtcggctaaacgaccaccttgagggggagatgaggtttccccggcatggttcggtcccccccatcttgcggagccgcttcttttttcgctccccctcgggctgcgacgtcggcacagcaccctccgggcgcctgctgctggcacgcaccgccccgccccctcggggaggagatggggagggggtatcctcctgtttcctcttcccccgggcgtcggcagggcggctgccccccgggcccccgtcacggggcccagaagcacgaccccctcccggggtagattgttcccccctgcggctcccgcccgcgccatcgtggcctcgaggagcccactcccctgacgccccgaccgcctgcatgatggtcaggatgttggcgcgctctggatcgctgcagagggggaggacaccttgggggatgagggatgcctccacggagctgagattcagcacccgttggatcaccatcttgaagtcttcagggacccagtcccatttgaccccctggtgggtcctcatgtagtcctcgaacccggtgtactcccaggcgccccgggcgcgccgctggagcggcgcgatccggcgacgaaggtaatcgccgtacaccatggcccccgtgagcccctgggatcgcaaaccagccaggcggtcaagaacggcgtcgtagccgtctcccagatctaccggcgcccgccagctggaggcctgcgccgggggctggctcggaagtcggaggcgcgcttcgtcggcgagaggggtgtagaaccagtcgctcttccagtcgtcccacttcttgcgaaggacgcagggaatgtagcggttcagcaccggcccccgcggctagaagtagcagccaccgactaccgacggtggcgacaccggctgtacggtgaagaaccaccggaacagccggagagatgggcgcaccccgatgaacatctcgcataggtgcgcgaagatggccaacgtcattaccgcgttgggggtgaggtgcgccatctggagattataaagctccagaacatccatgaagaaagaagagaatggcgggaccagccctgccattgtgaaggaaaggaagaatacggaccgccccgggtagtgtggtgccgggcgtccctcacccagtgcgaccacctcccggccggtggcagattccggcatgaatcggcgcggcagcccggcctgcctctcgctcacgatgcgagaaggtggcagcacgctaccgtcgagcggtgcggagccccgtgccatgacgccggcggaggaggggcttgagagcgagtgagtgcggcgaaggtagggcacaggaaacgagaagttagaacgcaagcggcgaaggcaaggggaataatggcgagaggaaggaaacgaatctcttcctcggcgtctttatacccttaccaacgctatgcccggctcctcgcttcccgcgcccactatctcgccccctcgtttctcgcgcccactcctccaataatcccgctcgcccgtttgcggcgcacgaggcggatgtgcggccgtggcagtcgagatggcacatatcgtgcgcgcgttaactacgctcgccgaccgatgcaccatcatcacatctccaggcgaaacgaaccggctcgtcccaattcgcgcgctactcaagtaatgtagcggtcttgaagaaagccgctcattattatcggtcagtttttcccttgccgatgtgcgcgatttgcgaccactggattcctacccgcctgtagagaccggccccacctgtcaccaggcctaaggagtggcgtcatgcccgagcgctttcctcgaggagggcgatcgccctggcataacgccgggggctactgtcggtgacaagggaccgggggtatcttgactagaggtttggggcagctgcagtcacccacgtggcctgaccccctcgggggggtcgggcccgagggtgatgtggccgcccctccctctgtctccccgaggggtcgggccgctcccgtttcggccccaagggctggggtgccccgaccccctgtgggtttggcgccatgtgtgtggattaggtgagcacagcggcgctcacctaaccgcgtttattgcgggttagacgagcgccccacgccgcatttaatgcagcgcagcacactcgttcggtccgtgacaggtcacagtgtgtgaccggtcacagaccggtcagatcgcgggttaggtggcaacaggcggccttttgcacgcctcgccccgtcccgtcggaatgatgagagcctctaggcactcgtccctagccggagccgtcgtgctgactcctggagttagcacgtcagtcccggcatattcataccaggcttcatcgcaac

SEQ ID NO: 15478 - DNA, 14556 bp, Oryza sativa
cgacctgcaggcatgcaagcttattacattgtatagtggctacatattggttcttaacgaaatcagcatagcttatggtgtattggcccctgcctttgtgtgattatataactcaacaaattgtttgtcattttacttgcttagaaggtagagggttggagatatatcacttcttgtttccaataaattataagcgaatgttatttgacggaatcccatccccacaatattaacaaatattaacaggtggcatatagctcccaagtccccaccaccggtgccactatctgccgcaactcccaaagtccccatcaccatgctgtttagggtggaaaataacatctgagatctcgtttgtttagagatacatatatgtgcgggcgtgccagtgtacctaaatacacaatgtaaacaaaacatagggaacatgctctttattaatcttaaatgatcataaatacaaattcccaatgtaatatatatgtatgcgcgctccataatctgtcattggacagatctgacttgtgcgatatggtctcctgattcctggggcctcgagaagctcccagttaattacctccgtaggtctaggcctgcaagagaacctccgattaagctgcttgtggtcgtctcgtcgtctccgcttcacgttctccatgcatggttgtgatgatgatgtagatgtgtgtgtgtgtgtgtaagcgccggcagcgatccatggcctcgtcggtccgtgcgctggtgttggtcgcccaccctccgtcgtctagcctcgtcggtcttgaacaacgtgtcgacgtagattgttggtgaagacatgcatggagttgcatagcttgaacgacttgacgtcacagcagttgcgtcgagattagattagagaagaatcagggaggaattattgaagatggttgatatagacggcggccggatttaatcaaagctcggcatctcatttgggacaaataagaaaaaccaacaggacttcttcagcccacgcattggtttgtgcatggcactgtagcagcgatgacatgtcatcctccaattggttggccacgttgccacaataatttacttaatcaacatgcattagctagcttgttgccatccaacagcactggctcaccgtcctcccgtcgtccttcctctgtactgcagccatacttgcctccatcgtcatccgctggtttcgacgctatgcgtgatgcttgacctccggcatgagaactgatagaagtcttggcagtcggcggcagctccggcgatcctcggcgcgctccggcagggcggcttcccgacgacctcctccatggttagcccgctccagtgcggtgaagcttgcaaatcaaggatgtctggtatctcggcgaggtcgcagcttcgggtagatgcatcaccagcggcttgaattagcagcgtcgagtctagggacaagtagcactacgtcggcttgaacagacgccggcatcgatgaggcttctgtgacgcgtagatgaatcggccaccgcaagttccccggcgacgacgatacgcgcagatggatccctatgcatggatttgtgcgtgctgtagatgaaagaaaacgaaacaatcttgctagcttttacctggactagccatcaagctcctctcctgcgcttgctgatgatcggatcaccgcgcgtgccctctcctgccggacgccgggactccggccgaagtcgctcgccgccgccggtgcgtgtcgtcgatggatggatcgccgatgagagttgatggatggatgtgttgatgctggatgggtagatgcgttgatgatgggtggcttgtggatgctagatgcgttggtgaatgaatgtgtggatgagttcgtgaatgcccctagctgccgaggggtcgacgccttatataggggtctgaggtctgtgctcgccacgtccgcacgccgtttcctccgcgtcaagttcgttgtagataaggcttgatcgatcaatttgttatttgttcatatccttctttgattttatctcttagcttctcctagcgtcaaatatctgatttgtaattcgctttgtttctctactgctgggccacagtccggtgataagcgcctcgccagcgctcgcgcgaagtaactaactagatcaagtttgttatagagataaaatcaattggtttgttggttatctcttaattcatctggttttatctcttccgcatattaacttctgaaatcttggcgcgtaggcagctaccgtcttcggccatgggccgagcccatgattaatcactcggatatgcataggttgcttaatcacccaggcatgcacacacatacgaccgtctactgtagtacatgcatgcatgcacgtgattgcctcaccagccaatcttcacacggctagttattggttaattatacatgcacatatactaatccaagtatatatattcccagctgcctgtgcatgcatttatttgcgtgtatatacatggccgagcattgtgtagaaatgataagctagccaacttacaaactgcttgtttgctttgtccatcatgagtaagtcttgtgtacacatataatcgccaaaataccatcaaacacatgccccccaccaagtaaattttgatcgtggagcgagcgaaattaacttggtgtcgtgtcggctcatgcgatacatgtccggtagagtttagtcatgcgacgaaaggactcccatgttgaagcttatctccggccgtgcgttgaaagaaaaacaaagctagaccgtcatcggccaggactccaaatccttggcagttacgagtaatttggatgaagcctatatattgctggtcatgcctgtgcatcgattatgcaatatggcgcctcaggtgtttaactccatcgcaggtatatatccattgtcgattctttagccaccggaattaggatgcttcttgatcatcctgtactttttcatcaggcaaccatcttgagagggccagggaagacggagtatccagggttgcaggcgagcgtggcgccagcgaccggggcggcggagagcgtgtcccacgagacgggcggagaacgggggacaggcgagtaacatgagacaggcgctcggcaggagatagacacactgtcgaagataagcgcccgggaggatccggcggcaagcaacagaaggagaccaagggtgacgacccttcccagcatatcacgaagatcccggtccatagagatgatcgaggaggatacaaacgccacggcgagtcaatcgaattcctgcgtgactggcgtcataagaaggagagaactgctcgtcctaacagacttccattgccgaaatcttctaaaaagggtctgcgtattgaagattctccacaccccgagctggaccgcaccatgcgtgagaagcgaggaaaaaaccccgtagtttatgagagggtatcatccacggagtcttcaagcgatgatcgtcgccgccgccgccgctctgtggttcccgacacggagcttgatgctgtccagttgagtgactcctcctcctcttcttcttcttctgatggcactagcaaggtatccgtgtttccccaattctttttttttctcttaaaattctttgtcatagtggtttgataacctgtctcttagaacatacttgcaactcaggatactatagagcaggcaactgcattgggtggacttaaagctactgcctcttccgatgttgctccggtacctattgacgatgtaccttcagttgtgccggctgctaatgctcctgtccgctcttctccggtgatgccggcggctgatgccgcttcagctccgggatcctcgactcaaaagcatcaagaaggtaaggatgattagactcctaatagaggtcatattctcctttgctttctcttgatgtattttcttctttctttgctttttctgagaaaagtgtactatacccattgtagaaacttcaggcaatccatccgacacagcttgccagatgaacgagttgatggagaagacgtcccgttaccttgctgagttccggacgggcggtcgctatctccaacttaactctgtgagttcggcgaaacgtgtgctttctcatgagaaaatgatttcaaatgctattccaaattaacctaccaaaaccaaagtgtgaaaaatgattcaggtgtttcttcggaatatccctccaaaaaagggtttatatctttttgctgcttgtaaaaagagaactattttcaaaagtgagctttagagactataacaaaacccacctcaaatagttttactggaatttcgttatacagattacaaactaaaagatttctttcaagttttgttttcaaagttcttcaaaaacaaatcccttccaaagtaagctgtgatgagattcaattttagttacagtctaaagtttttcttgaggactggattgcagaaactgtgcttaaagcgtaccatccaaaaataaattatttcaaaagcttacgaaatcgttaaaccaattttctatgaaacattgctatttgaataaaacagatctcattctacatattagcaggggtgggcccactagtgattcaaggatattcagatgtatacccaagatttttggacaaaaaatacgtatatgtactctatacttcatatatgtattcaaaaaattaaagaagctttaaactactcatcttgggccttgtttcaccatttattctcggaataagttcaccagagatccccaacttaacaacgagattttttgaggtcccttaaccacaaaaccagaaatgtgtacccctaaactctctcaaaccgtttaccggaggtccctcggcagtatttttgcccagttttgctgacgtggcatcctagtcaacaaaaaaaatttaaaaagtacgtgggacccacaagtcagctctcttcttcagtgaggcggccgggcagatgagggcgtggcgacaggcggcggtgcgggcacagcggcgtgcggggaagaagcgggagaggggagaggaggcgggcgcggcgtcgggcggcatggagcgagcgcgccagcggtggcgggagagggggagagaggcggctgggacggcgggagtggcgggcagggcagcgggcgagagtggcagcggagcggcggcgctcgtcatgctccagctcttcaccaccggcgttgtcgtcgtgttggttgacctccacgagcgtggtaggcggagtagtggtgggcggagggcggcgagcgattacgatggagcggggggcttggtcggcgagcgggggggagggggggcgcaagtgtggcggcggagcagcggcaagcggtcgacggcgacctcttcgctgatgcggagcgccaccccttctcccgccggcctcatctccgcccttgaagacaaggttgataggctcctcgtcgtcgtcgccgtccccgggtgggagcggcggcgtggggggctcgtaatcgtcgtcgtcgggcagggcggcattggcgcccttcttggcttcttgccggagaggagagagagctggccgagcttcactcgcgagcttgtcggcggcaatggcgtccctccgcgcacgagagaagaaaggccaaaagcccgtgaacgcatgcatgcatgcagtagagagaaaaagaccaaagcaaaagcagcttgtgattgatttgcaggctacacgggttgaaagtgacaagatcgatcgatcgaatatatatgtatatattcatgaatgaatgcatactctaggcctcgcccacggcgacgacgatgggggagagccgatgacgacggcggccacggcaagcggctgctccgcccgcagcctccgctccgccgccgcgctccgctgcctccgctccgccgccggacggccgcgccgcgtagcctcgcccacagcgacgacgacggtggagagccgacgacgagggcggccacggcgcgcggctgctccgcccgcagcctccgctccgccgccgcgctccgctgcctccgctccgccgccggacggccgcgccgcgtcgcctcgcccacggcgacgacgacggtggagagccgacgacgagggcggccacggtgcgcggctgctccgcccgcagcctccgctccgccgccgcgctccgctgcctccgctccgccgccgaacggccgcgccgtgtagcctcgctcacggcaacgacgacggtggagagccgaagacgacggcggctacggcgcgcggctgctccgcccgcagcctgaaggaggagaggagagagaaaagaaaagaaaagagaagaggagagaaggagatgaaaagagaagaaaaaaaaaagatgtgcagctgacatgtgagtcccacgtatttttttaatttatttttgctgactaggatgccacatcagcaaaaccgggcaaaaatactgctgagagacgtctggtgaacggtttgagtgagtttaggggtaaacatttctggttttgtggttaagtaaccttaaaaaatctcgctgttaagttgagggacctctggtgaacttattcatttattctctattaggcccaaatttcccactcccctccccctttcatctcagcccgtactcagtttgggccgcaactcagcccatttttcctccccggctaacccaaatccccaaaccggccaaccctagacctagaggaatgagggggagaggggttggagcggggaggcgggcggcggtggccggcgattcgcggctttcacacggcgtgtggcggtggcgactgcggcgcggctcgtcggcgcgggcgtggcttggcgccagtgcggcaggaggcggcacgtcggcggcagctgcggcgtgcgcgtcggcggctggaggcggcgcgtcggcggctgcggcgtgcagttgccgacctgccgccgagatcagacaccgaccccgatcacgaccagaggtaggagcaggaccggtgggcgcgctagtccaccgaccactccttcagcatcaatgaccgcgaggagctccgtttcgtcctccttccccagctttcccacctcctctcttcctttctctcttgccaattgccaattggacataaggatctctcggtagagctaaacagaggaaacctgttgtgtggtgaaatggatctatgactgggaaggaaaacaaattgtcagggggaaattagtggccgattgacactggctaaaataataaatcttcggtttagacctcttggcatcactgtcacggtcacctgtgaattgcattcttatcttcatacttgcaatgaagattttaggagtgggaactactttctccgttccacaatgtaagttattctagcattttccacatttatattgatgttaatgaatctagtctgctagaatgacttacattgtgaaacggagggagtacaattcattgatttagtatacttgcttgcttgcttagtttgtagaattgtagttgcctagttaagtatctgagtagtggtctagtggacactgcacaatagttcatagtttataccatattatcatatttgtttaattttcataacttatgattaattttatgttatatacgctatatattataattattagtgtgttatactacacaagctattttttaggcttttaggcgtatgaacattttttttacctcttcccagtttgaatacacaagttcaaaaagctgggcccgccactacatattagctggtctacgttagaaaaggacgcactcacacgagacaaagatattggagaaggaatctcaaatgttcctagctatggactgctaacatatccccaacagatacattgcacacgaaataatattatgaagggataacatatctgacttttttcttgtattgtttagtcaaatgcatttatcctctcatgaacaataagctcagatatcttgctacctcgtcatcacctatttgtttcgacatttatttttttttttttttgatatagaggtacaatgatgagcatctaatctactgacgtggaagattttattttgtaagaaataggggtattttttgcttaatatatcttccatacatcagcccaatctgtacaatatagatttcaccaaaggtcagcactagatatatcaaacaaaagactcgtatctctacaaaattctcgtgtcagaaccaatagcaataaccagacataaaataggaataactcagagataagcagccatttcagctgacttaacacagtttttccgataccctctgctagtggaagctcatgcacaacttttgcaaaacctgttaggagatttgaacatctatactaatataaaaaaaaggagttgtacccctccaatcctactagccaaatcactcggattaatccctaccgtccatccgcgtgcacgaattcaccaccgcatatactaatataaaaaggaggggttgtacccctccaatcctactagccaaatcactcggattaatccctaccgtccatccgcgcgcacgaatttaccaccgcacgattccacacgcaaacttcgctcctcctccacacgcgaagacttcgctcctcctcctccacgcgtggacttcgcttctcctcctgcatgtagcgccgccgcatcctcgccgtcgccggagctcctccccgcgcgtactgccaccgcatcctcgccggagccgctgcccacgccgacatcttctgctgccgccgccagatccggcttcttccctaccgttgcggccggatccgacctcggccccatccgccgccgccgccgaggtcggcccctcccgtccctgccgccggagtacatccatgtttccctcctcgctgtcgtccacaggctccgccaatgcaatggcctctaccttccctcgaccaccgtcttctggacaaaaaacattctttaagacctgtcaatatgaaaagtacttgccattgatgttctcattttttacaaccaccaaactataacagacaatgagaacccagaaacgacttaacataattttctgttctctgcactacgtcactaatgtgcacacataattaaataaacaacttgaagcaacttgttggagtcccaattaataagtgcggaactcactaccgatttcatatatatgcagcatttccgatcccttccttgctcatggcaaatctcatatactactcattgctcatcattcttcctttcctactcctgattaatttctacaaagctatgttcagctcccgcaagcaagccggacggcttccaccgtgcccatggcagctccctatcatgggtagtatacaccatttgatcggtgatctcccacaccgctccttacatgatctatcacgacggtatgggcctgtcatgttactcaagtttggacaggtaccattcattattgtttcttccccggaggctgccaaggatatcatgaagactcatgacagcatatttgcgatgagaccgcaaagcgagataatgaagatcattacaaagagaggacaggggcttgtgttcgcgccctatgatgatcaatggaggcagctccgtaagatctgcatccgtgagctcttgtgtgccaagcgtgtccagtccttctgcgccatccgggaagaggaggctgcacgccttgtgaagtccatatcaagtgatcaagcacatctagtgaacctcagtaagaagcttgccgactatgctaccgacgcagctattcgcatcatcactggtactaggtttgagaatcaagaggttcgcgacaaattccagtactaccaagatgagggtgttcatcttgcggcaagcttctgcacagccaacctatgcccatctctccagcttggaaacactctgagccgaactgctcgcaaagcagagatatatcgggaggggatgtttgcattcataggtgggattattgatgaacaccaggagaggagagcacaagatatgtatcataaggaagacttgatagatgtactcctaaggatccagcaggaaggctctcttgagtccccagttagcatggaaacaatcaagttcttaatttttgtaagatttttgccattagctacagcaaaactacatgagttttctcctcatttttctaacctaatgttttttttccaaattcaattttaggatattttggctgggggaagtgagacagtgacaacagtattacagtgggctatgacagaactaatgaggaatccaacagtgatgtccaaggcgcaagacgaagttagggaggttttcaagtggaaaaagatggtaagtaatgatgatataaataaactcacttacctgcagtttgttattaaggagactgtacggttacataccccggggccacttttcatgagggagtgccaggagcaatgtcaagtgatgggctatgacgtgccaaagggtacaaaatttctactaaatctgtggtcgatctcaagagatccgaaatattgggatgatccagaaacattcaaacctgagagattcgagaatgatgcaagagatttcaaaggaaatgactttgaattcattccatttggtgctgggagaaggatgtgccctggtatgttgtttgggctcgccaatattgagctggctcttgcaaaccttttattttattttgactggagtcttcccgacggagttctacccagtgaattggacatgacagaaaactttggagttactgtccggaagaaggaagatctcttgttgcatgcttctctatatgcacaactttcttgctgattatttccatggtgaataattcaatggttgtaattttaatgatttattattttgtcagtatcctcattgtttgaggctttgatgttgtggttttctttagcagaatatacatctgctgcatatagtatgtttaaaaactaatatctgcaacagttcccatccgtccaaaatataagcatctttagtttagtttttttatggagattaaagtgaagtgaaaaaattacaatacatttaattaaaatacacacatatcattattataaagcccatctataacaggtcaaaagataaggacaagatttccttatagcctccacaaggagtatattcgactcggagaaacattcttaattaaaatggtcagtgtgttaggataaggacaagatctctttgtttgaagattgcactttgcaacagccgacacaccttgtggagtatttttcagatctttctcccagtcatttgtgatgttcatatgatgactttagactgaaattagagtgcccagatggtattattgaagcccctcaatgagaagtgataaaggaatggaaatgcgtttttgtttataatacttgacttgcagcaaccatggacgactgcagctcccataatgtgtttttattaaaatatttgatttgacttgcagcaaacattcacaaaactgcagtttaattgactgcaaaagaggcaaacctaaaccaagtgggagtccatctagttaatttggactacttaggtgaagtccttcatgtttgccgcaaattttatgggtagcctgttaatgtgtacatggacaggataaacttcctgtttttctaccatgtgacccatttgtacaaaacaagcattatgatggttttcataggactcattcattactaaagtacatgcatgcgccatgtcctcagggtatcgcaagtagagtggaaaattcaccacaaaaaatgattttcgatcacagttgattgggagtagatttatctcgtttttagcgcgcaagcttcccgaactactaaacggtacgttgtttgtaaaaattttctatatggaagttgttttaaaaatcatatatattatccaccttttacatttgaaataattaatactcaactaatcatgagctaatgtctcagctcattttgcgtagcttctgatcaatcttcttgttttcccttctctcaaacaatctattaaaactatacaggtggtttatgaggaacccatgcagtacgccaggtgccgtgtcaccgtttgcatgtgaaaatagccctactttcatcatctcgggtgactgcatccaaaaatattttggaagctgagaagcataagtcaactgcctagaaaatattttgaaaggttcttgtgttaagtcaagtctgtcgcatgtgccaacgatttccacgagcaatcgaattatgtttcgaccggcggcacattcccatccatagaaatacatcttccttttgttagatccagtcgcccaaagtgcccatgcaaatacattttagaagtctctagaaactgttggacaaaagtctattttacacacccaaactattttattggatcgcttaatccttcaaactattctcttgctcattttaacctgtaaagtattaaaatagttcactttagtcatttattctttgtttctgtttgtatgcttgtatttaacttgattttttttaagaatattactgaaaccattatcaaatttataagatattttaaatttttttatgactatttgctcgaaattataaacctcagtatttaaatcagtcatagtgcttttcgacttatgtaaatagtgattgaaaaattctaataaacattaataggtatgttgtaatgcatctatctatcctaccaaattttggtgcaaaatactatttagagagaataaattaagagaaatatgctggcggtaaggtgaaccctttttaataattggaggtgtacaatgcttaaacaatcatgtgtgttccagcaaaattattccgggagtacaatgaaatttttttctaacctttcgatgtgatgatttggttgtatgcaaactcatacattgaaacttacaaacaaaactcaattattgcttgcgtagtgtgtttctccatatttttttctatacctgctctgcttctacaggtagcttacaagatggaaacagggggtcctagctaattagattggatggagtacacgcatgctcacatgctattttatacagatgttgttttcccagactgcacactggagttatttatacatgtgatgaagtctttatttatcatgattcataactacgattgttaattaggcattagaatacaaaatttctacgtcgtcgtaatggaatatgctgtttgtcaagttgttgagacgtcttatttcgtacaaatagctcgatagtaagcaggttgttactggctttaatatcctaatgttgcaaaacaaaaaaaacagagtacacacaaacatcacgagtgtttcactaacctcatcaattgtacatgtacgctaaataaattggccgtctatttcacatgttaatttaataacaatttcatatttcacggacttctgttgttattcagtcacgtaaataaattggccgtctatttcacatctgattaagactttgggttgaaattgttacgcaagcaattcgatcaatatcatatactggaaccatatgtcaccggttcaaactatgacgggcgcgcaaataaatgctagtagcatcttgcgagcacacattgatccttattttatttttatcacaagtttaattaattagtagcgggcattagttagaagagtgattgatgcccaggttgaatatattggctctcagtactctactctaaacaactattttaactcaacataaaaaaaaaaaactacatccacggatagaatgataccttccacacgctagctaggtattcgcgttagtcaattggccggtagaaaattcattattccataacgataagctgacactagtgagaaaattattatcttaaatatcactaatagtagcctaattaaggctattaatacataggctaacgactactttctcgagtatatgcacgagtatcaattatcaaactttacaaaagagtaaaatgaatggtatacacattctcaaacttggacctatgtgtcatctacgtcaacttgtaaaataccactactacagaaacccagattggtgccggttggaaacaagccataggtaccgaatttcccaacaggcaccccgcagacggtacgatgaccaaagtcatcggtgccggtttagaaccgacacctataacaaatataggtgccgattgtggggtttcaaaccggcacctaagatgttttcacgagccaaaaaaaccggctcaatgcatcggcttgattcgagccaatgcatcgagcaacttccaatcacccaaatccgagaaaacatccatcaacattcctgtaccaagattccataacacatttctcacgatctcaccgtccatccaacaacaacaaagacgggcagtggtgtataatttaataaaaacaacaccacatttcttgccgcatccaacaacacattaaacaacaacaacaaaatcaaaaaccaacaaggaacactgttgtggaggcagccactgcatctttgtggaagcctccggccacgcccggcctccaccacagccaacgtcccctgtgcccagcctcctcgaccaccacccccggatctggcctcccccaagcgccagtggggaggggcgatgccggatttggccgtccctgagcgccggtggcgatggggcatgccgga

SEQ ID NO: 15479 - DNA, 12170 bp, Oryza sativa
aggtggtgggacgaagaggaggagggacggtgccggtggccttcccacgcctctgccgcctccgccgggccgttgcccggcagccgccgaggtccgccgcctcccctctggctacatcaggcagacgggagggcgctatcaccgctgctgccgcctccaccgggccactgccaccgccactctgccggccgccgcctagaccggtgagagagaacgagcgagatagagaggcgagagagagacggaaagaacgagagagagagacggagaggataaggacggatctgatgcgcgcgttgtattgtaaggccggcgctcgatcggctcggcttggtagagatgcaggttctagggtgggccccgtgccaactagtccgatgggatgggttctaaaagatgccagttttttttttacaaccggcctctatatctgacaggagtaaaaggtgctggtaccttttaggtgacaaaggtgccagttcttgctcgttttggcgtgtgggcgggctggtgggcgggaatggcactgtaggggctggtttttaccactttcagtacctatagttccgacttatattagtgtttctgtagtagtgtacatatatgggactaatcttgatttaatgtatcacgtaaggtccaaaatgcaattgacagctcaatgctaatttggccatccacaatggaataaaatcgcattcagcggcgccctctgctatagcatgaccaagatcagctcagtccgctagtgtgcttgttcaagaggagacaaagaaaccgcgtttacagcggtggatctcgtcggtgatatgatgtcctcggagcaaggatggatgacctgatagcacgagggtgataccacacgttgtatcgcccatctcagctccaagtagctcacaggttgcagtgatttgagtagcactctaaggtcctgtgttcaaatctccatagaagcaaattttagattgggttatttatgggctaaattccctatttgctagttcctagtttaataaggctgcatatatccggttggatatagagccggtaaaagaaatacccatctaaaaaaagagattttctaaggtgcttgggatataggagagccgttgatttcttataatctaaaaaaaatatcggctccaagtaccttcttttgttgtcctccgggtaccccctttgccccctctttcacgagcgtgatgggagtcgatctggaggcataatgtagtggaggggcttaaatacaaaattctcatcaacgtagatggccacatcaccgtcagagctacatcatctacatttgaaatcttgggtgataaaccaagattaattatctatatgtgtagttcacaaattcaaaaacctagatgacaccctaatctaaatttatgtcctgctcatgtattttactcataatagaaaaagtcccagggttttgcaacccgattgcataaaaattttgagctccaccgagatgaacgaatttcgaaaaatttggacaaagttgatcaaatagtaaccatatgaaccaaatccagacgaaatgggagttaaatgttgtctcggagctcaccgtagttgatgaaattctctgaatttccactattaggaatactatttttagtgacataaatggtcttcgcaggcgaacggccggtctgcctttacacaaagacctgtgaaatcttccatttttgcaggcggccggccggtccatctaggaagatgaatcttcgcaggcggacaacctaagctgtccgcctacgaaaatatttcttgccatgctgacagagtcagaacatatcacctacgaaaatatgattacgctgcttgcaaaaatacgtagttcgggtttcatttgagtaggatggccgccggagaaaatattcgagccaaaatataaattttcatgtcaaatttattaatattaatttttaatcaataatgatgcaattaattaattcatcaatacataaatacatccaacagctaacaaggatataatacacatatgtttgatgcactaattacagtactattggccatcatgtgttggccatacaataatatttacaatactatcatttctaactatattgttaattacacaagcacgtagttccacttccaaatggatttgtattctccgttcatcgctaagctaccttcggggtcgaagaaaaatccatctttatgacaacactcacggtagatgaagtggtagaggtcccactgtatgtttctaatgccttcgtagtgaaagctagttcgacgttcgattgtagacaactgcatacatgaaagcacgagaatataatacaatatcaatttgatatgcgcattccactattagagttatacgttcagtcaagagacttacatcctctttattggtcctatacctcccattaaccctatgaaattcgcatatgtactatccgtaaaggacactgcctttaggttgcttgtaatacttcattataacacacatatagaaggaattagttatacattgcaggaaaaagaatttaaatagagaagtgtgcagagtagtaccggccaatatatatgtatgcacttgcaacttctcactcgtttgcggttgttccctgcactttactttgtagtagttgtacgcactgtacgtataggatttatgattcatattaatgaacagaatgtaataattatgaacattgcattagtacacatgcatagatcagaatcacttacattcttaggaattgttctgtacgtcatatgatcataatcgagggggtgaataactgtaatggtcacataccgttaggtgtcacctagaaagaattatcttcggaggcagaactcttaagtggttcacctggaaatatcctcaatctttcccctgctggacctcttaaagctccgtctataaagatgtatctttccaggtggcaccttatatcgtctgtctaggaagattaatcttcgcagacggacggccatctcaccccacattttcttcacctgggaaaactgtaacacctcgtcggcaatagttttgccagtagtatccagagttcagacatttcaaagcgaatcccaaatccctattctgtaccatactttggagtaggtgtgttggcgttttgcagatatcgatggtaccattgattaatttaactaacgacctgtttgtagcataatttggctaatagtttgttttatttgggtaagccagattatttagtttagctgtcatgatttggagtggttggtttgagagccaattaattgtgtgcgcggctggctagggagggttagcatttatcatggaatggaaatattatggattagctgagcttaaccatagtcaaggaaggtttttgcgttaataagtactatttgcattagcatgcagatagagatcagagaggtgaagactcgtgcagctggttgcaagtggagattaatttgctatagtcgacaagcttctggccgggctgatgatcacatacatgcaggcgagcagaaatttgccgtgctctcgcttggctgttttgtgcggctgcgtatttgcacgaaggttggagcagtggcgttggtttggagatgatgaggcgtgattagcgcgtacggctgttaggaagataagagatagatagattttctattttatcagttagtttccttttcggttggaccatggtatctgtatatatacaggtctacggtcgattgaagaaaccccgatcacaatttatcaatctactatttttctcgttctttacttttcctgttttttctattttgcttttatggctgagttctagcaaccctagaatttggtttatctttgccgttttgcgttgaaaaacggtcgtgcttctccacgaaagcgaggaggttatcctttgctagtttgctcggaaactagtcgttcgtcgtcacgtaagtacgatatttatcttctttactaatttgcttgtaaattagtcgtgtgattccgcgaaagtgaattaatctcgaaatcggtttcactagccgattttgatatatcgattttggcgactctattgtttacaccgcaaatcgttaggtgatcttgtgttggccacgaaaaagcgtcgacatattttggcgactccactggggacgagaatttcgggcatattaatttgacggaaatcaatcctgtaccatcgatctatttggctgtagttcggccgaatattttgatctactatttggtttttgtcgtagaatctttcggccataatctatctgctattcttctcatgcgcgcgctgacggttatctgatcaatctgacgcggttggtcattgccgtgctggagcggtggagccacgccgatctggaattctgctagccgcccagtcaccgcttgagataaagtgtacgctaatctagaaacacaacagcagcacacttgcattaacagaagggaagaaagaagccatcaggtcagtgcttgtctgcgttttattttgataaaatttggttgatgtacagatcaattgcacaaaaaaaaaagacttgctggaaaatacatggagtcatacaggagtgctacaccgctgcctcattacgtcaattgcgaggtacaatctgcaaatactttgcctgttccttcaaattattttgctagtacagtgaattctcatataaatattgctagacctatttttaatggacatattgcatttggtagtgattattcaaataattattcgagctctttgaattacgaaaataatatgtcactgcctatgcaaagtacttcacatactttaaattttagtaatgctagcaatatacaatatgtacacacaccttttaattcatcggcaattatttcaccacctgtcactacaccactaactatgccgatgaatgacatgtatagttatggcaattatcctactaattctattaatacattacatgccatgtcaaatactgctaaatcagagattacttctcatgctcatgttcatgcttatggttcaccttatacagtgtctagtagttataattcggcttcatgtgatgttaatgattatggccgaattagtgaaaattcagcaagcaagcatttacctccatataattccacaacatatagtttgtcccctgcacagccacagagtttcggcatcgagcatattccattgccgaaaccaagtgttaataattttcaacaaaatgggtcatttgtgcagtcgacaacgcataaagccgaagacacgcatagaacaaatgataccaaattagcaagttcggttggggggcaatttgtggatgattttagttccaagatagataaccttattgaagaaatatatagagatgtggaggagaaaatgaatgcatatatcttaagcaagggatcaaaaccaatttttaatcaacaatggaagctgataaatttagatttatcggctaatgaaaaggaggtagctatgcttgatttctctggaaacataggaccttttgttttgccagctgaatttcgtgctaaggaagatgatgaacatcttgacgatggagcacgaaatcatgacgacaaggtgaaaatattggagagccatcaaagaacgaacctagacatcgctcaggtgaaaaaattagaatgcttctccaacaaatcagatcaggtaaagtctgcaggtaatgtagttatttcccaatttgatcatttatctgaaaatcatacctgcatcagtaatatcatcatgaataactccaagggatcgattggggaggttaatgttcttattggcaatagtaaagtgcttagattttccatatcatctttgccaaagtttatgtctacatggtttgcttataataaatctagagctagaagcacaaaactaaaattggaaaatattaatgaggttgatgctaatatagtggatagttctaaatcaatggataagggaaatataagcaattatgtagccgaatgggttgatggaaaatctgaaccatttgtttgcttagctttaaaaccatctccgcagatgtgtcggttaaaggaaaagaagtatacttttgattggactatgtgcgatcatatttttgatgatttgctaaaaaatggttatattaaattgcttgatcactatgtcatgcaaccgcttccagatttaaaagaatgaatttattgtaagtggcacaattcatccgatcattgtactagtgattgtaatatttttcgtcagaaaatacaatcggctattaatgaaggctgattgcgttttgcaactccaagaaagtcatatgccaaggatgaccgttttgataaaagaaatcggtctaggtggtctagtaggaagtcttcggcacaggcggaaggtagttcaacaaggaagcaaatctgggtgccgaagtctagaggtcaagaaaagagcttagctgctggtgcacatgtgagtgtacaaaatgcttcagttcagaaaaaggctattgaacctggggggcatgcgcgtatacaacagttaggaaatgtacaccatatgaatatgaagcgagaggcatcttcggcagagttagtaacaagtcagaatccgccgaagagctcggggggcaatggcagccaactgagacactcacatggcttgtcaaattggcgaaagaagcagctccacaagctaagtgcagaaaagctgagggagagaggtatggcatgggttcttaaagcaagtgttcaggtacagaatgaaacagatgttaaagttggagtgggggcaaaaaatgagaagggagttaagaggtgtgcgccaaatcaacggtttgcatctaatcatcaggttctttcgccaccatattatacatattcttcacctatgccaccgatacctatgtcatggaatcaattctcaggtatgcatgtttatccctcatggttttattcttatccttggatatcatatgggtctttatattatggagggattttaccgtatagttttacacattgactattagttgtaggtgttgttatcacttttagagaccgaaatatttaggtgctagaaataaccgtgattttttataactctttagaaattatttcggtcgtatatagtttgtgtgagttggcaaggagctggtgctgttttaattttactaagtaatattgcttatgacacatcggtccctatcagtccatttagagcatgcttgcactttagaccgagtagatgctctattattcggtttggaaagtttagtcgatgttggtgtgagggatgtagcttttgatgatttacttttaatagtccgatagagtaataggaagttttagtgtttcggtggactgttaaatagttatttcgaccaatgtttagatttaattaaattgctagatgtcttaattgtccatcatatggctgacttgaggtgtgttttatagtggataaaccggctataattagcagtgtttgttcggataataaatctatgcaagccggtttgtttaatggtgaaggtactgtggtgcatcatgtgtgtggtggtagcaatgtgttaatgttatgtttcacggcggcgttcctgatggtctatatttttatttggctggggtcacgcatgctgcagttgatggtagtagtgttcatatacaaactgctggctggtcggttgagcacagaaaaggccgagcagggtttagaagattcggtacggaggtcatcagggacaaccgagtcaataggaaagtttaagccaagtgattggagggatccattcgttgattatgtaaaaacccgagttaaatgagagatagaaaagttcggcgacaagttttaagatatgctttattggatgatgaattatattgccgagctataagatgagttatttttaacagtatcgaagtttagatgtgttatttttaagatattttgaatctaagaaatgttaagaatcaagctaattcggttaggtggacattagggacaaccgaattagtggtgaaatttgtactacatgagaaatatttgaaaggttattatcattatgtactacaggaaacttgattgtctcaaaacgagtacttatttgagtatcgttttaagaggacgactgtggatgggcttagaactgataccatgtgtggagtatcgttttgagaggacaactgtggatgggctcaggaccgataccgtgtgtggagtatcgttctgagatgacggttgtggtttaggttggttagttttatggtgttttcggtaaagcaaaagttacacgttctacttataccgaaaacaggggggcatgtgtttgtagcataatttggctaatagtttgttttatttgggtaagccagattatttagtttagctgtcatgatttggagtggttggtttgagagccgattaaatgtgtgcgcgcggctggctagggagggttagcatttatcatggaatggaaatattatggattagctgatcttaaccatagtcaaggaaggtttttgcgttaataagtactatttgcattagcatgcagatagagatcagagaggtgaagactcatgcagctggttgcaagtggagattaatttgctatagtcgacaagcttctggccgggctgatgatcacatacatgcaggcgagcagaaatttgccgtgctctcgcttggctgttttgtgcggctgcgtatttgcacgaaggttggagcagtggcgttggtttggagatgatgaggcgtgattagcgcgtacggctgttaggaagataagagatagatagattttctattttatcagttagtttccttttcggttggaccatggtatctgtatatatacaggtctacggtcgattgaagaaaccccgatcacaatttatcaatctactatttttcttattctttacttttcctgttcttttctattttgctttcatggctgagttctagcaaccctagaatttggtttatctttgccgttttgcgttgaaaaacggtcgtgcttctccacgaatgcgaggaggttatcatttgctagttttctcggaaactagtcgttcgtcgtcacataagtacgatatttatcctctttgctaatttgcttgtaaattagtcgtgtgattccacgaaagtgaattaatctcgaaatcggtttcactagccgattttgatatatcgattttggcgactctattgtttacaccgtaaatagttaggtgatcttgtgttggccacgaaaaagcgtcgacacgaccatcgagcgttaatctatatccataataatgccgaggttgaaaaaaaaaagtcatgtagtccaaaacagacgtgccacagctagttttgtagttgcgatgctctcacgccttctccctccgctccggcgaggcgttggcgtctgcgggggatgcttcctcgccggcgcctccttatcacagctgtatgccgccacaacgacggaatgcacgcagtgctcctgcatccaccgcctctggtggtggagcctccaactactccggcgatggggttctacccggccgcgacgacgacactgtccacggctgcgcagtgcgttcttgtcgtcggaggcattcttctcgctcgagccacagtccgccaggagcacggtcagaggccgctgcggttgccatcgggaagcggtcgtcgccagctccggttgtcgtctaacgtgcccgccgggaatcagctccggcgacggcagttacgtcgtgaagatcgtgcccgccattacgtctggggtcacggcgattctgcccacttgctcggcggcggcgccattgcaattccagacgtcttcctcgtcggcggccttgatgaaagatgcatcaaaccggcacagtgccatccatcggctagctaagccatcctaaacaagtttgtttaatgctagttttgttcttaatttggctctggtggtactactttggaatacagtagctgtctgtgtcattcaataaaggctgtgtttagttcacgtcaaaattgaaagtttggttgaaattaaaacgatgtgacggaaaagttggaagtttacgtgtgtagaaaagttttgatgtgatggaaaagttcgaagtttgaagaaatattttggaactaaacaaggcgaaaggctagatttcacaaaactacaacagttgtatcaaaactatcattttgctgaaatttgtaggtaggagtttcagtaaattgctacaacaaaaattcattttatcatagaattatagactctatttaccttaaaggtcatatcccacttatcaggcacacatgtaatacattcatccttcggacccatcatttcacttattcatggaataagtcaaacggcatatttgcaaacgaaaataatttataaataaaacttatatatatatatatatatatatatatatatatatatatatgttcttagcgatctaaaagcaaaggctgaaaaataaacttctatgaaaaaaccttaaaatcagctccaaatttaatgttgaaaattcaaagtttagccgataagcataagcataagcaaaaatatgagatcttttatcagttagactcacatgtcaaccaccgctgtgggtgaaaagttacgattttctgactcaattgtttgctattgttctagttttgtgaaaatagtagcacttaacagtgaaatttggtaagcctcgaagtcatcattagtctatagtcagtatcagcttcagagtcctggaattagccgatgggaattatcaaggtgcaaatagtcggattcttaccatatctagaatagaccgagttcaagggagatgcagcatgacagtttatctattaattaggaatagtacattagtttcctgttatctttaggaaagtgtgtttagtgtctgatatgcactttatgttttccatttatccttaggaaagtttctttcttgtataaggacaagtatctatccataggtataaatatgtacatccgaggtcattgaaaattatctctcgatcaatacaactactctcggcgcatcaccaccctctttttcgaggtttttagttatcatcggcggaacatcgcacctgacgcagggctgcattggctttcgatcactacaacaaatctgggcttctatgacgattacctgatgacagaacacatatctgtcataaacagaggctgtttatgacgactgttcacaggatgacaactgtttatgatcaaaccgtgtatctgtcataatcatcgtcacaatatactctgcatgggctctgtgacgatagcacgatgacaatagtggatcgtcataaaatatagaacaattatattttttaaaaacaaaaaaaatcttgttatactacattgctcctagaccataaatcatttgtcctaggtgtactcttcttgtctacttcaattctagtctctcattttaggattttaggattgaagtcatctctagtctcattttatgaatgaaaaaaaatcaaaattatggcgtttcattttatgattgaatgaaaaaactaaaaaaaaacaaactaaaatggctataagttggtttgaacctgcattactacaagaaatatgaccttctgtgaagaattcctcgtaacatcggagttatttgttattagcacattccattttatgacaattaattagtatgagatggggaggcttagtgacaaaaacatttgctttaaaaatcatggccaaaaatatttttttaatattctacgtggtctaaattattctttgaaatttttcgtgaattttcggaggtcaataactaattttaataccacaaagttcatttaacctattaaaataaatggaaaaaaattaaaattcctctctctatccttgggcctttttcggcccaagtattactctccctctctcagcccgcagactccctctccctcctcctccctctatgggccgccggcccagcccttttaatcctccctcgccgagaagtccattttagctccctcctctgaattcaaataactttttgcgtaataaatgatttcagataaaaaagttatcaacaacaaaattgtataaattatcaagatttacaacttttattttgttcattttactatataactttgtttcaataatttgaatttgaatttcaaattatgacaaattcaaacaacattttcaaatactaaatgatttca

SEQ ID NO: 15480 - DNA, 6302 bp, Oryza sativa
ttaaataaaacttttaaaatataaaaaactataaatgttaccctacaaatggtaattgcacataaaaaatagtacaaactaatatgcaaaatgttgagtgcaattgttcatcaatttgcgatatgatcacacatcgccttacataccaccattacataactactaacttcttagatgcttacatgcgactcaacaatcattaccctttaacatttttttcccacaccgtccatgcgcatgtaaggcttcacggtcttctgagtagatgtctcgacattcttaatcttctgtacaaactgactataaagtgtcatactatcgtattgattgtaatcttcgacatcttcaaccccatccactcccaatatcttttgtttcccgggtagcactatatctttcttcaaatttgaagggactttcacataaaacacttgtgccacgcgattggcgagtacccaagggtcatccttgtgacccacactcgccaggtcaacaacaataagaccgaacttatcaacattgaccccgttcgggtatttttgccactggcacttaaatatggggaattgcattgtgtgcccatagtcgatttcccatatttcttcaataaacccgaagtatgattgtttttccctggcttcatcaattgcctccacacggacaccgatgttttgcgtacaggttttattatctcgggctcttgtactaaacgagtatccattaatgtcatatccttgccaagaatttactgtagttgatggaccacaagccaccgtttcatagttatttcatctgtagtttgtcccttaggtaagtctaggtctctcaaccaatctatgaagagacgcttgggttctttcattatccactccggggtgcgacccttattgttagctcgtattagctcgatatgttgatcgatgtaaggctcaacgatagcaaactgatgaaggacactgaagtgagcttcttggaatgatttgtgatcatgggtgacgaatctcttctttcctatcgttcccctaccactcaatctgccctcgtgtcggggcacaggtactccaattgcatatccatctttgaggtaatcgatacagcactcgacaacctctccagtactataaccctcaaccattgatccctctggatgtgcacgatttcggacgtaacccttcaaaaccgccatgtaacgctcgtatgaccacatttgatgtaggtacagtgggccaagcgcaaccatctgcggcactatgtgaacaatgaggtgctccatcatatcaaaaaatgacggagggaaacacatctcaagttggcactgtgtctcatgtgcgaatgtacggagatttcctaactcttcgagactaatgaccttctgtgacactgcgttgaaaagtagcactaccttgtgatagcaacctttaaatactctggttttatggcccttattgtaattgcaagaaacacggtgagcaagacatgacaatcgtgtgaattataaccagataccgacaaatatttcatttaaactagtcgactgatgtttgacaagaaacctatgggcactctgacatcacggagtgacttgcaaaatgacttcttctcctcaggtgtcagtgtgaaacaggccggtggaagatatactttgccattcttctctccttcttgagggtgtaactcttccctgattcccatctcgactatgtccatccttgattgcagaccatctttagtcttcttcggcatgtctaacaatgttccaactatgttatcaaacacattcttctctagatgcatgacgtctatggcatgccgaacctccagatctttccagtacgggaggtacttaaagaatatggaatgctttttgaatggggaagggagtttatcatctgacttcgaactatcatcttgcttcttactatcccacatagtcttctcgggtttcttgcgctttgtcccctttgatggtttcttagtcacatttccaaattcgcaaacaattttctgtcattgcacacactttttcccccgatgtaggttttggtgcaggatcaatctcttcagtgccctcgaactccgccttcatcttgcggtacttgtgatttgtgcgtaggaaccgccggtgccgcatgtacacaagcttgttggaacccgggagataccaatagtatgttccattcaagcagatcacacatcctgttttacctttaatttgacctgaaactgaaaacattgctggataatcgttaatggtcacgaagatgatggccttcatcgtgaagtattcccttaagtactcgtcccacactttcaatccctctttccataaatcagcaatatcttccaacaatggttcaagaaatacgtcaatatcaataccagattgacggggtccctgtatgaggatccagagtagtacgtattttcgcttttgacaaagccaggtaggaagattatacatggtgacagcactggccaagtactatgtgagctgctcatgtctccaaaaggattaactccatcaatactcagggcaaatctaatgttccgtgggtctttagcaaactctctatactgagcatcaaagtttatccactgacgagcatctgccgggtgtcgaatcatcccatccttcttgtgcccttcttcatgccagcacattagttccgcatctcttgggtttgagtatatccgtttaatgcggtctttgacaggaaggtaccacatcacaagctgcgggatttttctctgtcttccctcagttgtgtcagacggttctaggccagtattgctattcgatttgtactggctagcattgcatgttggacattcatcaaaagaagcgtactctttcctgtacagtatgcagtgattaacgcacacatgaatcttttccacaccaagtgaaaggggacatatgagtttcttcgcttgatatgtgctggatggtagtgagttaggcctcaggagcattttctgcagaagttctaacagactgtcgaaactggtatcagaccatccatgtttcgcctttaacctcataagttcaagaactgaccgtagtgttgtgaactcactgtcacagccctttgactcatcgtacaaaacttccttagctgccttctgtaaagctctagccgaccccatcagcacctcgggttctgcatgacgtaacatttcctctaggtcgattttgtcctcaacagaaccatcgtcatgcaccatgtcttcaacttgtgtcggaactacattttcaggcccgtccacttgttcttcgccatgacgtgtccatatttcatacttgtccataaatccacgagttactaagcgctccttcactttaaaagcatcgtcgaagtcccaggctatttcattcttacagtcagcacatggacaaattatcttcctcatattgttcttctcagcgtgtgccttggcaatagcaataaatttagacacttcgtttctatatggagacaaaaacctcggccaatgatacatccattcccgactttccatatctctaaaaaatgaacataaattatttgcacaattaaaaccaaatttgtagggtttattgaaaaaacttatcgctattaaaaactaattaactaaaggttatttgtaaattaataaaaaaacaaagtttatttcaatttttttacacagacatgccaaattagtatattagaaaaatctaacaaaatcatatcatcggcatattactgatggaccctaagttcctctcgacactcaagactgttgttggcccgatctttcggtgagttatgataactacgatttggaagaaacgttgacaatccgactacaaccgtacgagacgttgtgttgcgccttagcgatcgatacacctctccgtgggttattgatcttgtcggtgcagatcaaccctattcctacaagcaaatcgaagaaacaagcaagaacaagataaaagcaatctgatattgcaaataggaattttatacaaatgataagttggggttccgaagaacaagcagacggacggtctagccgacacgcgcgctgcaagcaagtagcaattgctaaactttaatctatcaaaacccgagaaaccctgaaggggtacctagctacttataggatgtgggagaatgatcaagagggtcctagggtcatgctccactagcttggggcgcaccccacatgggccccacttgggccggggtcccaaacaaagttacaagcccataggcccattattcctgtgattctggccacacgagatggaattcggagaagaagctggatccgttggaaagagggttccgagaactttccatcaagtactcacgggccgaaaacggaggtcgtatgcagattcggcggccatttgaagtcagcagtgtagcaggtggccgaatcggattccagcacttggaggacttgatccttatatctccttgttcatccatgatgtgagcaatggttgtatccgtagtagccatggtaacatgcttaaaatcagcgcagttagtattaacaacaggaatagcatgttcattcactagttgtggcatggatataagtgaagcattatcgcacaactattctttatgacaaggaacagcaagtaaatcaacttgtgacaaaggcaactcagcaattgattctactaatggttgctctactatagcatgaaaagtggacaagtgtagctcaccttgagaatactcaccttcatttctctcagcaccatttaatttaccttgcgaactttctttagacatcgcaggtgcttcatcctctttcttctcaagtataccattctccttttcttggatgtgctgatcttcctgcaaaacgttagtaacaggggagacaaaagattgctcctccaatgtttgcacatcatcattacataagtatattggggattcagaaataggagataaatcacattggtcatgcatcctcgcctttgatatgatctgactctcaatgctacgagcaagcatgaataggtgcccaatatgattatatgtcacattatcaagcaaaacctgaatttcagaattaagcccattgaaaaatctacgcattgtattttcattgcactctttgagaccactgtagatgatacagaccttaaattcatgaatgtactccctaacagttctatcaccttgtttcagatgttctaatttctcccgaagagtacatttgtaataagatgtcacagagcgctttctcatcatggttttcaattcatcccaagtttcaggtttattactaacataagtccaccaaaataatgcagaagaggtaaacttattactagcagccttaatcatttgagtatcagaaaaatcatatatatcaaattcattgtctactgctagctcccaatcaatgtatgcaacagaatcgtacttcccatcatagaatggtaacttagatgcaacttgttcaaaattatagtcatgtacctcatatgcatcacgtggagaagtcgtgatatctcgtcgaaggtgtagaagttgatgttctcgtattcccttacgcaatcctgccatggttagtagcaaacaagaaacacacaaaaatatgcacgctcctatcaactactaggtagtggcagctcaaatatcacacacaatcaagcttttaaccaagctcttacaagttcttaccaaagcaagcggaatggtaatgtacaccgactcaaccaagcaccccaatggaggttgggtgtatcgatgccttggcaaacacttgcggtacggccgtaatcaaaactgtgcagctctgggtaggcttaaatatgtagcaaaggaatagcaaatgctcaaatcagataatgcaaagttgaataattgttcaaagtcaagtaccgtgctggtcctaggctagaacgtactagagacgcgagcctagacacaaacgataccacaagatagcactaggaacaactcatgcacaactctgatatatgaagttcagctcaatgataacaaaatgattttctccttttcttctttctttctttctcttttttttttttgtctttcctgcttttcttttctttttcttttcttttctttttttggtgtggcttttttttcttcttttttttaagcacctttctgccttttttttaacaaaaaccgactcaaggacctcaatataaggtcatagggactcaaatgtaaatataaaaattacagggactcaactgtaaaagtgcaaatccaaaattaaaattatacaaaaatggaatgctaaatttatactggttccgtttttccaaacggatctac

SEQ ID NO: 15481 - DNA, 9588 bp, Oryza sativa
cggtctgaatcatcgtaggccttgggttaaggtaggtttgtgtgggttcacggccttgataaataatattgtatagttctagaatcgtgtttaccaaatagctttgagcaactaaatatctttaaatgctgtttaccgcaaccctaaccctttatattgtaactcctttgttctcccttgcatttattatgcacttgtgggtgtgtcttgttgagtacggtggttgtactcagtcttgctcaatttttcctaacccagaagaggatccccttgaagatgaaggctttggtgtctagctcgtgcctgccgtcaagcgcctgtggtggtcgccctagtcttccgttgcttctcgtttgtctttgtgtgtgctgggccttcgtcgcccatgtaataaattaactatttacgcttccgcttgttaaactctgaattgtatcaacctttggtgtaccttgcctcctgggacaaggattaatgcacgcacatcaggaacgcccgttgggttatttccggtcgtgacaatggggaccgtatcgatggtattccggccttctctcctccggcaacttgaaggtgacgtgttgtttagggaagccatgagtggtgatggcacacttcgctgcttccctcccctcccctctctggccacaccccgcacaaccctacctcgctgtcacaccctcccctcactaagggaacgggttagggacaagggtagctatgaaggaggttaaaatgcacatttgttgaaacggtgggtcagctagggaggtggccaaagttggtttggatcatgagtgctacattgaaccaagattatgaatctaaatttacgatttacaatatcaccaacataaatgacatcactgtccgtgtttaagaaccgtccatgtttttttttctgttttttagattaaatttcacaaaacttttaaatgtcgtatgaaaactatcaatttgcaagaataagtactggagggaaattctgtgttggttccaacctggatattgcctaatttggaaccggtactacgttagtgctactaaggcctagtttttttcgacttcctcattttccgttagcacacttttgaaactattaaatggtatgtttcttgcaaatagtttctacataaaagttgtttaaaaaataaaataaatttatttttcaagtttataataattaatatttaattaatcatgtgctaatgatctttcttgtttctcgtgcggtaaacgcgagaacattgataaatataaccacaatgaatagatcaagaagtaatgcatcggatcaactgtaattatcatcaaaactcaaggcaatgacattatttcctcacaaaacggatctagaagaaaagaccgacgagagcggatgtagatgtgggtgatgcaagtgagccaccccggcactgctgaagaggagggagccaccactgtatcggtgaaggggaaaaggccatgttgttgaatggggaaacaaaccgtggccatggttgggtcgggggagagaaccgccacagtcaaacagggtacactggctagatccggtcacccccaagctcattgcaaccagatctgactactcacgacctcttggtggctagatctggcagtccctaagctctagattgcttccacaacatgggagtggataggaggtgccaccaaagttgatatcgcgatgaggatgtggggggtggtgaggatgatggccggcggagccacaatggtaggagggggactagtggttgttgactgtcgttaagtaccaaattcgaacgtcaattaccttaataaatagaagagaactagcatttcttatgcgcatattagttacaaataatgtagttccacttatccttggagaatacattgaatgcagggattatacaataaagtgtaggagaatatgtgccagcatgcaacacctccggtgaatcacgtgaaagcacatggactgaagggcccaaaagcgagaccaaaccaacatattttgggtgaacccaacgtgcaccatcataaggacccatgatgaggacacaactagctcggatataaccatgactaccctatgtattaatcaaccaaagatgcatatgttctacattagatttacttgttatatatttgaacaaacgttactacataatgagttttgtgtgtttgtttgcagaggtacttgcttggacgaaggaaaagaggccgagcataacgaatgcttggatgatcaaagaagttgattgaggaccaaaccaagaccttctccatgtcttttgtatctcaccacgtcacttttggtccatagaagacaagagataaagttctacacgttttggattcggattcgggcctcctgatagcatcaacttcaaacggacctagccgctgatctagaaagaatttcgaggcccatgagtacttgttggaaagcttatgtagctgactttcagatggttttattactacatcaaaattcctactgagtttccaggaatctgaaaaacaagccacgtatctcatccagtccgaatctgatttgggtttgggccttgtaattgtgtcgtgggcttagcccatcagggtgtgcaccctagggcaaccataggatgtccctaataatacttaaccaatagccgtcatcgcttagagtcgggttttgcttagattactctgtcaagaacagtttcgctgctagatcggtttgtggaacccaaattcgagtgcttaatcattcataagcaatttggttgcaatctatcttgttcttgcatgtgttcttcgattcgcatgcagggattagccttctcggcgaggtcaaccgggtttcagcacggttgataaccagaggagacgtggtgctgcaattgcggggcttagtagcgtgttcgtttataagccggatcgagttgtgtcgcgactctgcccaaatcgtctgtttatcaatacctatcggaagatcggaacctagcatccctcatcagttggtatcaaagcgtggttgcccgttaggtaagttatcttcccataaccagaaaattgccacacaaaaatatttattctttacctagacaatttgagccgttgcgttgttctattagattttgctttgttgaattctggattgcatcatcgtgtcgagtgctggtttagttttagatttcatttttagttttgagtattgcatctgttcatcacttaggtctaggactcatcactcaagtctgtgagttgtacgtcagttttgaatttagtttttcatcccgtcggttgttgccgggaccttgaagaattgaatcgtctcgatggttggtttccgttttcgtagtttggagaagttaatatccaacggttttggagttgctcgatttttagagttactgtgttggggagttagtgcgcatgtgaggggagaggacgagccccaactcttccgtaagtagtttctctccatcgagtattgaaagtgttaaagttccagatttgagagatatttttgtaaaaacggaacctacatgatacattccatttttgaggagatctaatttagttttacactttgcatttgagtccctgtaattttcatatttacatttgagtccctattcgaggccagcgatcagtttttgttaaaaaatagtaaaaaataaaaaagaaagaaaaggcagaaaggtgcaaagaaaaagaaagaaaaagttgcacctaaaaaaagaaaaaaaaaagggcagaaaaggtgcttaaaaaacccgcaccaagaaagaaaaaaaaatcattcattctttgagtatgttttcataatgcagagttgtgcattgattcatatctagtccttagtgttgtcaggtgcttgcttgagctagagttgagtctaggctaggccagcacattgactagtacttttaactattattcaactttgcattttctgattagcacaattgcgttcctttgctaatatatatcatgcctcccaagctgcacgtatatacttctggtcagcatcgctttgatccttgcaatcgccacatcacgtccttcaaggtgacatgaactagccaccggttgtaccgtccttagcattgctgataagacacttgtaagagcttgataaggtgctccatttgcctaagttgttgagaggcaccactacaccgtgtagcagagtttttatgtttgcaatgataggtatgagtggcgctcaaaatcagcgataccaacaaggtgacataatcgtgtgcccgaagatccttatgctaaggttaagtttaaaataccatctttttcaggttattatgatgctgagaaatattttgattgggagatgatagtagagaaaaaaattagtacccaccttgtgcccgagcaacatagagttcgacaagctactagtgagtttaaagagtttgcttatatttggtggactaggttagatgtatggagacctttacctactactaggaaagaacttaatgtagctatgcgtgatacatttgttcctccatcttatcttagagatttaaacaagaaactgaagcgtttagaacaaggggataaatctgtacatgattactatggtgagctacaaaagggattgaagcgatgtagcgatggagcgattgcaatctatcttgttcttgcttgtgttcttcgattcgcatgcagggattagccttctcggcgaggtcaaccgggtttctgcacggttgataactagaggagacgtggtgcttcgattgcggggctcagtagcgtgttcgttcagaagccggatcgagttgtgtcacgactccgcccaaattgactgtttatcaatacctatcggaagatcgagacctaacatccctcatcaacccacatgtcagcctataggggaaagccagtggagaagggtggtgcccctggttgggccggaacaaggtttggcaaaacagactgaccatacgtcatctccaccttccacgtggtgactcatcaaccctccctgccgatggtcacagataaaccgaccttcgcaaccgccattggatgatttaaaatggagggtgcattctccctttacaacacacactcaagaagcaatctctctattttatacttatatactctctagattagttagtttaggctttgaatagttctttgtttcctagtcgtgttggagatgcgggtatgtcttcattaatttgctctctttgtaagactatgagcttagtaatgaaattatcttctttatttaattgtgttcgttgttcatactttgtcaattgtatgacctatcattagtttatagttctttcatgaaatataaatgtttaggctagtcgatctatgccaaggcatcggtccaacaaacttaacggattgtactagttctaacttgtccatctgaagggtaggagtcagggggaattattgatattattaagcaatataaacatggtgcttagattcattaaatgccattagataccggtatgccccacggaatgtgaattagatgacaggtggtgattgccatgtccgtcttttgtattccaccacgttcggatatgacgtaagagttcgtaaaatgccttaaccacactggcaaactaacaggaagtagtatctcggtagtacttgggtgtctacaattaagttctagccatgtatatgtatatgattattgtaacgattaagcatgataaatatataagtacatattaaatcgtagctttcctttgtctttctccacttgctagtttatttatagattttaattttctgggtgccacactacccaagtatcattatttttatcacttttctctgttagactatggcatattaattatagcgtaattagaatatatcggtctatattttacactgtcgccttccatgtagaaaaacaaataaagacacccatggaatactcttaaatgaaatgctacagtgctatccacgtgcttgcagatttatctattaccgtatcaaatagcaatatgggtggaggttccgctggtgaggaggatgacaggcagtggtgtagcagggagggagagagagggagacgtaggaaggatcaagagagatgaaagagagccatggaaggacactccgtaaaaaggaaagagatgagagacaaccgagagggaccatgagagcgagccagcccgattaggtattcttaatgggcatcagtgctctttttaagaaaaagtagcattgaaatttgaccagcgtgggcctaagaaggcaagaaatggctcatagatgaacaacacatatgaggtttcacatatttggggttttgttgtagtcaacgtggtgatgaaaaatcggcgctcggccgatagtgccggaactgtgttggtacaaactaagttgacaatagcaatagcctgggatatctgcttagctccaatgtaggtcctagaattgatgagatgggggcgtgcctgtcagtttgatcctgcaactgacaagatatgtaaacaacagatcaaataaccaattggctgacaagcttatggagcaattccagctgatgccgatagggttataagcaatcaactatatttccaatgtatattatgatacttgagtaaataatgatatatagacaatcggctgataataatgtaattaagcaacaatataatctagtagaaatcaatcggctaataacgatatgatagaataagcaacgatccgaatgttaaagcatacatcggctgaaggtccgatgtcattaaatccaaacgattagataagtaatgaaacctttgttgcaatcggctaaacccaacttgtatataatctctataagccgatacaacgtccatataactcatcggctaaaaccccgatgaaacccttattggcaatcaatggcatgttagtttttatggttataagcacgactaaggtcaatgcaactaggagtttgcaaacaaacataaagtctaaacaatcaagcctttgactgatttttaagagtggtagataccttagctaatctaatctagtaaagtgatttagtcgataccgacaaaaaccctaaagtagatcccagccaatacaagtaaatcgagcaatcaaactagattaactaagatacatgataggcaggtcggcaaatatatcaatcaaaccagagcgatccaagaggtcgaagcgatgcagccttaaacagcaccaatatagttgacataattgccaggcccggtggaatgtaggacttaccccttcgccggagatccactacaggaattctgggcttctgtgacgattacattatgacgataacagcctgtttctcgtcactgcctggctgcaataacgaaatggctgtcatcacagaaggtgggtcactatccagcttctgtgaccaccagaggacatcgtcattgatactgtgacgatagttctcctgtcattgatgaatgacgagacaaattcgtcataacaaattgaaccgaataacgccacgtgtatgatgacatctaatgttactgatgacaaggcggatgatgtggcaaatgacatggcaattcacattcagcccatatagcgtgggcttttttattttcaattacaatcagcccaattggcccaaatatgtttttgacccagctacaaatttgcttttacgtttttttcactatagcccaacaatacaattctagcccatattatgggccagcccaattaaaaagcaatcacaaaatataaaccacaaccatttgcataattatattataatcacattccagccataattaattttctagcccatacaaaagcaagttccaaaatacagtttccaacatatttccatacaaaagcacaaaacatgaatacaaaatgatccatccaccatccaactacacaagtcccagctgactacaaagttcctacaggtagtgccaagttcctgcaccaaaaaattccacctagcagccactaagtttcggcggcgtgcatcttgccagtagccagcaaaaaaattccaccaagcagccgctgcacttccggcctgcatcctgccagcagtcagcaactagtgccaaaaaatcctgcgttccagcaaccaacgcaaaaaaaaatactctggccactaaaagtgccaacctgcaagcaaccaacagatatcacatttggtttttggcacatttgtcctgcacatgacgcagttacatagcataagtaatagaaccactatgcatctgtcatttccttgcaacgccattttcatttgttttcagtggtcactattacattaaaaatgcaaatagagctgatccaaacagagctataaactggattatggaataattattttaccacctgagaatatcaaatttatgttgatgtatcttaggaagctatgtggttaaataactcaggaagattacatgaattatcttatagtcaatctgaaaactgctataataaatctagaattatcagatgtagctggcatgttccaattcctcctgacagaatcaaaagatctcaaatgtacctcatatccaatatgtatatacctagccaaacatgaatttgtgctcgaatcaaagtaataagctcacacaaaatgaaatctgctaaacatcacctgcctcacctactaaacttttttaagataatggatcaagttagtggcacaaggttttgtgaacattttgattacatcactgtaggtttaaaggtaatcaagcccaatatatcattaaccaacaattcccaattacccaacaaggcagctgaaactgtgaaatacaaccataaaaaacaatatagaaacattgtgatagtctcatgatagcttaacttattcagaatgcaatcactctactgtactctggaatccaaggatatgcaacaggccgagaggctcaccacgcataactgatgctccgggaagcggatgcattcgccgcagacaggaaccttgtgcacgaagcaataaacccttgtcgcctgcaaagcaaacaaatacagccataagcatgaaattcagctggcacactcataattttgaactataactaatctttctacttgttagataaatcaaaatatttatatcctattagttacacatgttctacagctgaaattattatatggtccttttactaattcagagatgctcttgttcatattctaatggatgagaatgcaactcccaactcctacacatactagtatatgcatcacacaagaatcatgccaggatatgatttcaatttcattttaatctcctgattacctaccatgattttagagtggctgatatatggttactttctctggtcctgcagccgctcctctggacttagtttcaaggattctcctgatgagacagcttcagcctaaatcaatttgaatgtatcagtattttctgcagagtttttaagtactaatagagaacacgatactattttatcttagtcaatgcttacttaggttttcatatagtaatacgctacagcatacaggagcaaaccacccacacattgcaagaacaagtgtgcacaacatatgcatctgcagacccaaaaaaaattcttgtggaaccaatgtagagagaacacg

SEQ ID NO: 15482 - DNA, 1537 bp, Oryza sativa
aggggaggggaagaggaaagagagaggggcaagacaacctcgtacttctgcttccttgaaatctagaatcccaggtggaggttgatgtggtcaaaagggatgatggcggcgttcctcaggggagctatgtgcaggacccgggttagatggctggagggctggaggtagcgtggatgtaccagtagagggctggaggcagcgtgatcgtggatgctagggaggagaataacaaggagcaggaggaggcgggggcggcgtcgatgaccgcagaagcagccacacccacccacccctcatcctcccagtcccagatctagcgcggcggcgagctgctgcgtgctggtggtggtgggcgagagcgtagccgaatccatggcggcgctagggtttaggcgactgagcagtggttggggaatcggatcttggaagggagttgagtgcggattgcgaaggggaaccggggaatcgcttgaggggagggggaatggatggatcgctcggggtggggagagaacgggaagatgagatagcggcgcggaggccgtcttgcggtcgacgtcggaggaggccctctcactgcgcctgccctcccgccggatctggcggaggggagggcgtggttgccgctgccgcctttgctggccagccgccgaccgtgggcaggcgccatgagacggcttgagaaaagggagggagagagacagcgagagagagagagagagagagcgttgggagagagccgcgagaggtcgagaggggaggggctcggctgaggtggtgggaatggaggtgcagttcccggccgttcccggagaaggacgacgacggcgtggtaggcggcggcgtgagtgtggggaaagagaaggtgaaggagatggtgatgagcagcggcggccgcggcggcgggtgggaggaggaggaggaggaggaggaaggggacggtggtggcggcggagtggatactgtggatggagtttaggctagggtttggagaacaaggtatatatggataagaagcattccgacgcgaatttaccaaactgtccctggtgtgttctcagtagttacaaaattgtatggtcaaaatgggcatttcaccttaaattaatgagaactttaaatttaattttaggctgatttttatgtttcaaatgcaaaaatcataaacaataaaattgtaggactcatcgagatctacaactattgtattgctcctttttacaaataagttcatttgaacaattcaaattttgaattttcaaaatttgacaacttcaaacaaaaattgggttaataaatgatttcaaatggaaaagttgtcagaaccaaagttgtagaactcatcgagatgcaaaatttttattttggtcatttctccgtctgactctatttgaatagtttgaaatttaaaattcaaagtttgagaacttcaaatagaattttttattagtgaacgacttcaacttaaaaagtcatcaacaacaaatttgtataatccatctagatctataatttttattttggtgggctgcaggaa

SEQ ID NO: 15483 - DNA, 8916 bp, Oryza sativa
tgcataggataacaaaggatggcatagtatagcttatgtgcataaacaacatttaataaacatttgaaagaatagtaaaacagttgagtaattaagcaatattaaataaacactatacaacacacccgtgttgcataggcccaaccttatctgaacaaccaaccccggtgtacaaatcaaacctcataccaagaatataccattccaaaccaggagtcaaattaattatcacagtattatcattaatgagtagtgtgagactaatcacgaaaaacaatcttagacctacccataaccgcgggcatggctattcgaatagttttactctggccagatatgtacaagtaccactgtacccacaagacacagctccacgacatgtaaccatgcgcctcaataccaccacgttacctcggaaaggaactgtgacaatacccctcgcacaacacaactcaccacagtgcaccatacctggatcacaatcaccccctctacaaccagaggcatggactccccagcgacccccacggacttctcaccgcttctcagtctggcacactgtaatgaaccatgctatacaaaagataaagccgtagcccacgctatacaaaagataaagccgtagcccacgctggcttgtggttggcatggtaaatgtttcacaatagtagctcgcgaaccggtccttaattgtcatgagcacgaccatcaaaaccatgtgctgacaacccacctttaatcaggttttaattattaattaattatcataacacgattaaccatcgtgagctaccattaaatctaaccataagtaactagtaatttgcccgtgctaacgctacggagaatgcaaattaaacaaccaaaaagatgatattatttgtgatcattggtttacataaattttgtgttgaagcataaatttgtagatacaaatattgaaacatccgccatcagcttgctgatcttcacatgattctatagatttttccacatcgttatgaattctgtagattccgagatgaatcatattgtaagattcaaacaactttgcataagaaaacagcacaaaattgtatagttatcaatctccatttttattaatctggcattaaacatgtacatgctgcaaaatgttctgctcattcaggtataacttagcaagtagaaacaattagttcacattacttatcagattatttccagaacaattgcaagcaagcagcaagccgcaacatcattgaagtgcatggcatccctgcagctccacttccatcttgtcctgaaagttaaatatgatgtcatcagaaatagcaaaagcacattctttagcacatctatatttaacattttagactgatatgtccggagcggtaaggaaatgatatataggaataatttgctgtatgaaataggcttcattgctacagaaacaccagaattaaattccattcaacagtgcgtatatgtaaatttgagcatggagaaatgcataacttgtccctataatgcacaagtaacaagaatcacctcagaaatgtagaactggcctctatcgtgaaggcttccgcagcctcccctattcagtaaaattaagcattttagtattgatcaatcgcctaactaacacaattcataagcccaatctatttttagatacctattatacttgccaaatttcataaatcagtataacgtagtcagataaaaaaaatgcaaatagacatggtacataccatttaccacataaacatactggagcgaagttactatacactgcaacaactacatgtatctcaatcccatgatacgaccactgatcagcaccttaatcttggaataccgccaatttgagtgtagatgtatgtcaacctagttttcccaaattgatccgtacttatatattgtccatgcttatcttacatgtggaatatttctgtaagaaacaatcaaaatctgccatatatataatccctctaacatgaatgaaaataacagaatgacaataaaaagcactatttagcctagtattaactacagaaagcaacagcctagtgaatacaaacctgaaagtcattaagctccacatcactgtgtgcttccctgtcatggtcacatagactaaatatctgctacaaagccctcacaaaccgtcgctttagagattgtgcctcttataaaacaatggagctattgggttaagcataaccttttcagcatagtagaagacctccggaacctgcaaatatccataaattatattatatagttaatccaagccttgcacaatatctggaattctatctcagggaaggcactggttaaaattatcaagtgcatagtacagtagatgtttgatcaggttacacaaaaaattatcaaggcagatatgggcaatacacgtagtacattgttagagatggacagcactgtgttctcaaactgagcatcaggaaaattagtgatccaaatttattactaaagccctgaaaatcaagtattaattccataagactacagagcatttcatcaagctgtagcaatcaagttgtgtacatcaaaatagcaggcaatgcaattaaccatgcataaatgcaacagtgggatttagcttgcacaacaacatgtatcttccatcacagtatcaacacagagtcaggaatgaaaaaaatgggatttaacttgcacaaccaaatcattatagcttcatgtgccaactctttccccttagccttctatgtaacacatgattggaaatatgtgtaaatagaaaaaaaaaatgtcttataccaaggaattttagtgcaagtattttttttacaaaaatgtggagtaggaagcattcctttccttccaaatcacagaaaaaatatacactctcctgctgaggattttatacatgaaggaatacaaaggaatgttagaaatattaacaaatataatgccgagttgatgccaggagtgtatcgatcttagaactgctttgatatatcgggttcccacccacctagtacgcgacaactgtttagaaattagaagagtatcaaggtttgacatccaccgagaattttgaaaacaaattacaattacagttgatagaaaatattagcctacaggatatcaattattaactattcactcttgagagtagttcaaaaaatatttgcttaatctcctgtcttagcactttgtcgagcacttggccggcagaatgtactcaagcaattcatcaagtcctgcaaggaagaatcaagcaattcgtgaagcacgtaccaataatcaaggcggcccggcccgttgccgatcacgatcatgtcctgcacgatgtcatcccattggtcccgtggccgcccgtcaccaccaaccaatgacctgggcgaagcaactgagggcgtcgagcagcaggtgttcggggacgaacgccgccaccaccaagcacgccgccgcagcacggccgccccgggtcttcgcccgacaccgcccaagcacacgggcgtccgacggcgcccagccagccgccagcctcaccgctagccacgccggctcttcggccggtgtcatcaaccgctgccacccgcgtcccaccagccagccacgccatcgcccgcgtctcccgtcggccgtctctcccgccaaacgccgccgtcctcacgacacctgccgccgtcgtccgctccgtcagctcaccggccagatccggtggtgacgggccggatccagccacggaagggccggatccgacagcggcggcggcggatccgcagccacgcgccgcgccgctgcgaggccttcccggcgcactgtgccgcctcctcgcgccggagacgggccgtcgccgccatcccagcgtccacgcggtttccggcggcggcgaggcggtgagaggaggggagggtggcggcggccgggggctcgcccgcacgtggacgaccgaaggcgcgtgaagcaaaatttcagtgttccttcatacaagaatgtctcggtcgtcttctttgcctgcaggcgtcggcgtcggcctccttgttcttcttattcctccttcgcgtcagcagtagggtctcgacagtcgacggcggggcgaggagatcatggcgaaactggggtgggggtgaggtaggcgcggatgcggtgcggggagaggcggatctgggagggaggtgagagaggcgcagatgcgcaaatccagtggtgccgtcggatgtaatttgtcgtatgattttgcaccgttggatatgtgatatgataaatgatgaatgagtaaaaccatttgttgaactatatggtagataatgtaatatgattcatcccattaatgagctaatgtttctaagcatggctaagcaattatatataaagcatttagttgaaccaaaccaatatataaagttcaagctaatcaatttattacccataggaaaataaagtcatctttggccattaattaattgggaaaggcccaccacccgatgacattcaaaattaatgcataagttgaaataaaacattaactttaaacaagttcaacatgctcaaagggttgtttgggatctgtgtgactttccttgagcttcttcaaatgcttttgaaccttcctcaacgtaaacgctctcctccggaacgtcggaaactaaagcaaataaacaaaatcaacaaaacagtaaaaaacaagcataaacagtatatgtggatatttttaacatgtagatctcgattttagatgaatttagcaactcgaaccacttgaatctgagttacgatgatttagttatgaatttctgaagtttaatcagattttcatctaatacagaaaattattactatttaaataaaggatttatgatgtcaggatgacatcatcgtagccatggcactggaccacgactccgccagcgatagagagctcgggcgactaaaccgaaggcacctacacaaagaggacgacgagacgaactcaccgaagcaaagaactacgacaaacgacggcgaacgaagaccgacgacgaacttgacggcggcacggctcggctcgatgttgacggcgacgctccggcgaattgcagcagcggcgaaggagcggacgggacgctcctccacctggcgaacctgacggtggcgacggaaagcggcagcgacgaccacagcggcaacgcggcgcggccgaagcggctacggcggcgacggcactagggtttacgcggtggcagcggcgctataggcgacggctgcagcttggacttgaggcaaacggaagaggacgactaggggatgctttaaataggcatggttgagggagatcggactccaatcgagaggatttgagccggaaaaatccgatggttagtttggagagataaactcgaaaacgaatccaaattcgcatcgaactcaaagggataagatcggatttttgggggaagggagagaagaggataagggaaacaaatccactcaactaattttagaaatgcacgagaggaaaggccagatttggaggggaaaaaccgagccaattcggcctcaggtcggctgcctgaggtttgaagaagaacagtgcacagggaagcaaagtaaactttcagtcttgggccggctgaaaataaaatagagaaagaaagagaagggggaagctcggctgtgctaactgggctgcacaaccgtgctcccaaaggagggagatgggctagaatcagtccaacggcttaggggaagattaaaaactttttcaattaaaataattcgtaaaatgatgtttcatttattaaaaatactttccttgctcaaataattcacagaaaaatctagaaaatagataaacaagcaaagtatttaatgaaattttatctaactcagttttatgttgctatttttcctagattattagagtttaacttgtaagcctttaaaataatttctaaaaatgtgttacagaatgaattattaaattaggcgattttcagggcgtgacaagcctacccctcttaaacggaatctcgtcctcgagattcagaagaactagcaaaaagatgagaatgagctgacttcaattcatcttctcgctcccaagtggcttcttcttctgaatgattgctccactgaaccttacagaaccgtatgatgcgattcctggtgtttctcttattcaccacaagaattcggactggcttctcaacataagttaaatctttttgaagctctatatgctcaggatctgcttcctccgtaggtacacgcaaacatttcttcaactgcgacacatggaacacgtcatgtattcccgccattgacggaggcaactctagttgataagctacttcacctctccgactcacaatcttaaaaggtcccacaaatcgcggtgccaatttccctttggtctgaaaacgatgaactccccgcagcagcgtaacccgtaggtatacataatctccttcttcgaaagtcaaatccctacgacgattgtctgcatagctcttctaacgtgactgggcaatacgcaacctttcttggataatcttcactttttcttctgcctctcgcaatatatctgtcccaaaaacttgacgctcaccggtttgatcccaaatggagcggtgtacgacactttcgaccatacaatgcttcatatggagccatttgaagactagcttgataactgttgatataaccgaattcggcgtacggcatattcttatcccaacttccaccgaaatctagaacacaggctctcaacatgtcttctaaaatttgattcactctttttgtctggccatcagtttgagggtgataagtagtactgaaattcaaacgagtacgcatctcttcttgtagtttccgccaaaacatcgaagtaaactgactacctctgtctgacactattttcttgggaacaccatgtaaacatacaactcttgccatatataactctgcaagcttatttcccgagtaggttgttttgacaggtataaaatgagcaactttagtaagcctatcaaccactacccaaatagaatcttgtcctgccgacgttctgggtagaccggtgatataatccattcctatttcctcccatttccactctagaatcttcaacggttgcagctgacaggctggcttctgatgctccgccttgactcgctgacacacatcacatagagccacatattccgctatctctcatcgcatgctagcccaccagaattgttgcttcaggtcttgatacatcttagtgctcccaggatgaatggaatacaaagtttcatgagcttctttcatgatagttgttaacagtgaaatttggtaatcgcaaagacgtcatcggcttagaatcattatcggttgtagcatctcggaatcagccgatgggagttatcaagtcgccaataatcggattcctgctatattggttaaggaaatcaatctactaaaggaagcttatccctaagtgaccgagtttagagaggatgcggcatggcagtttatatattaattaggaatagtttgttagtttccttttatctttaggaaagtgtgtttagtgtccgataaggacttcatattttccttttatctttaggtgagtttctttcttgtccgacaaggacttgtatcaacccatggttataaatatgtacacccggggtctatgtaatctatctctacgatcaatacaattcggctcatcgccaccctttttacttctacttttgttttttacgttccggcggaacttggcacccgacgcggggctgcatcgtcttcgatctccggcgaagggataagtccaatgttccgtcggcccaggcaattgtctcatctacgtcggcgtcgttcaaggctgcatcagtatattcgacctcttggattgctctggtttgaatgatatatttgtctacctatttattatatgtctctgttaatctagtcttagcatatcaatttagctctatcggctgcttctcgttttagggtttctgccggtatcggctaaatcgcgttgctagattagattagcttagatatctaccaccctgaaaatcagtcaacggcttgattgtctagatattgtgtttcttttcatacttagtgctgcatcagttaagtttgatctactaagtcgtgcttagaaccataatctctagcctgcttcttgattgccaataggggttgggtttcagccgatgagttatctggatgttgcatcggctcataaggatttcatatacatataagttggatttagccgatgacaacaaaagtttcattgtttaatctaatcttgtggatttcatggcatcggaccaccagccgatgtgtgctttaaccttcggatcgatgcttatctatcatataaatgctagccgattggtttatactggactatattattgttatattttattatcagtagccgattgcctttatatcatcatctacattggacatatagccgattgcttaaaccctatcgctatcggctggtatcggcatcggctattatcggctatcggctggaactactccatcggcttgtcagccgatcggcttgtcagccgatcggctgttttgatctactatttgcatatcttgtcagttgcaggatcaaactgactagcacgcccgcatctcatcaatctttggacttgcactggagctaagcagatctcccaggccggtgtgttcgattttttttcgtcaacaatagtatccttcaactccttattatcgggcacgcaaattctttctcctagccacacagttccttgctcatcttctatataaccgatggtttttcctcttctcatgttcttttcaatttcttagatatcaagatcattcacttgagcctctctaacttgatcaaaaagagtaggttgagcttctaaagcggcaacaaaacctttattgactattcccaag

SEQ ID NO: 15484 - DNA, 15211 bp, Oryza sativa
ctgacatatggcagtagcttttcctgctgagagcatctgctacaacatttgctttacctggatgataatgaatttccatgtcataatccttgatcaactctaaccatcttcgttgacgcatgttcagattaggttgagtgaaaatgtactttaaacatttatgatccgtatacatctccgtacggttatcaaaaaggtaatgacgccaaatcttcaattcatgaaccacagctgccaactctacatcatgtgttggatagttattctcatgagggcgtaactgcctagatgtataggcaaccaccttcccatcttgcatcaaaacacaacccaaaccatgtctagatgcatcacaatacacctgaaaacctttccttggatcaggcaagactaacattggcgcagtcactagccttttcttcaattcttgaaaactctgctcacactcttccgtccacttatacttcacatccttctgaagcagtcgagacattggtctagcgatctttgagaagttctcaataaacctgcggtagtaccccgcagaccaaggaaactacgaatctctgagaccatcttaggttgcttccaatttagcactcactccacattgcttggatccacgacaactcctccagctgagatgacatgactaaggaacttcacttcgggcaaccaaattcacatttactaaacttggcatagagctgatgctcacgtagtttctctaaagcaagacgaagatgctcttcatgctcttcttttgtcttggagtaaataaggatgtcatcaataaacaccacgacaaacttatctagatattccataaacacgttgttcatcaagttcatgaaataggccggggcattagtgagtccaaacgacataacggtactttcaaacaaaccataccgtgttgtaaaggcgatctttggtatatcctcctcacggattcaaagttggtgatatccggaacaaagatctttcttggagaagactgtagcaccttccaattgatcaaacaagtcatcaatcctaggtagaggatacttattcttgatagtgacctcattcaacgctcgataatccacacacattctttgggtatgatctttcttctccacaaagatgactggtgctccccacggcgaagtactgggtctgatatatcctttctgaagcaaatcatccacctgtctctttacctctgctaactcaatagctgccattctgtaaggtctcttatggatagggttggttccaggtactaagtttatccggaactctatgtctctcttaggtggcatacctggcaaatcctctgggaacacatctggatagtcttgtactattgggatctcttgcaaagcaacttgatttaatgtcaaaccatgagatctaggggaggacacaaagaaagacactgtttacccattgctacttgttaaagtcaccttacggttagcacaatctataactcctctgtgatgggttagccaatccacccctaagataacatcaagatctttggattctagcaagataagtgtgatgggaaaggaatttcttgtatttctgtagtaatggaaggacagtactgcgttgaggatacttgattgcctggggtattaactagtaaaggcctcccaagactaataacttccattccatgattgctcgcaaaacttttagacaaaaaggaatgtgtagcaccgaaatcaaaaagcacagttgcgggtatagagttaacaggaaacgtacccaaaaccacatcaggtgcattctaggcttctgcagctgcaacgtgattaacacgagccttcggtgctggagcattggagttgttctggacaggagcattcttcacacgccgaggctttggacacttatcagcataatgtcctggatcaccacaattgaagcacacccctggcttgattccctgttccttcctgacaggctgattttgagttggagctgctacaggacgagtgaccacattacgattgtcgttgctgtgattaccagtgttgttgttgtagaactggcgttgagggcgagcaactgaagaggatcctccctatgggtatggtgcagcttgaggtcccaaagcaatgcgcggcctctggctattaccctattgagccttgaaataagcagccctacgcttcttctgttccatcctattgtacttgtcttcttggcgaatcgccttgtccaccaactgctggaaattccggtattctatagccatcaatgcataagacaactcatcattcagtccctctaaaaacttctcctgacgttcttcatcagtgcgaacatcatctgggacataatgagctaggcgattaaagtcatggaggtactctgtgacagaacaggatccctgattgagtgctctgaaatctctcttcttaagtgccacaacacctgatggtatatgtgtcttcttgaaagtagcagtaaactcccgccaagtgataggctctcccgcagctctgtgtttgacaaaagtgatcccaccactcagcagcaggaccatgcaactgatgcaaagcaaaggaaaccttctcctactcggtgcgcagaatcaaatctaacttcttttcaacagcatgcagccaatcacctgcctctactgggttagtggtgcttgagaaggtaggtggtctcacacgtagaaaatctgccaacttgttctttggaggtggtggttgattgttgttatttgcctgctggttctgcgcttgctgcactagtagattaatcaactgagtttgctgagccgaaacttgggcaagtgtgggatctccttcattgtgaccacttccacttccagtgccggtgttcaccatctgaagaaaagcacgggcaaaaggaaagattacatttaagtatgattacatttaagttgaattaacactatctcactagctaacttactctttgacaagcaaaagaactaaactcatgtagttacatcccaccaatgatgtaagcaacacgcaaaacccacacacgcacaagcaaactaacacatcgaactatggcaacggtctaactaggcaactaatcccgccttgcatcggaacgaagagatggatcttcttcctctggagtagctggctctctttcttctgggtcttcctcctcttcatcattacttaagacatggatgataggttcagcatgatcaggcacaacatctcccaccacacgagtcttcgaagccaactggatacgaggtggtggacgggttctcttccttgcggtgaggcgaagtttgggtgctggcggtggtgcttctcccttaagctcggccagttccttctgcagacggtacaccttgctctccaacttgcaaatcctgccacggttccagttttccctgtcatcagctgttttctcccgctccacgcctactgcatccatggcgctaagcatatacacagcatgcttcagagtggtgctatcttcatcttcagggcagtggtaaactccatagtcttgaccatgaggcttgtgtggatgatactggaaagctgatgactctaactcctcatcaaagcgatgacgtagctctccaatggccaccaaggctacctcctgacaagcatgactatactttcttcccccagcttcaaactttatcgacagaaggtcttctcgatcactagtcaacgtcacgcgaacacgacacttctcctcgttggggtcatagggaatctggcgatactcaggggcaacgtcgtagcctacttcaaatgccatcattctcagctccctgacgaatcctaccgcattgatcaagctttccggcggatggggcggcgtctaaaggagcacagaaagaaggaattaatgcatatatttaagttagctgcacaaactagacttaattaatttgacccaaaaagaaaaataaaagaaaaggagcaaacagaactaatttttttatttttttaattaaatttcgaatttttcttatctggccgaaacataaatttttagaaaccaattcgttttattttttcagaatttttttcgaaaatttttatttatacaggggcatagactttggaactaaacaaaaagaagcaaatatattttcttcctgtacagtactcgtgggaacagaattaaacaaagttttgtttggaaaatgaaatcaactttggacagacacaaattgctttacacaaatgaataaaataaaactaaaatacttagtatctaccataagaacggtacagtgtcaccattatatattttcttcctgtacagtactcgtgggaacagaattaaacaaagttttatttggaaaatgaaatcaattttggacagagacaaattgctttagacaaatgaagaaaataaaactaaaatacttagtatctaccataagaacggtacagtctcaccattaacaaggatgagtagtactggtgctatcttgattgaatcgataccataatagatgataatagatgtacagtgccggctaaccaatgaaattcataaaatcaaactacttaacaccatgaacagtaaagttttttttttaaaaaagaaaagaacaggtttctgttttggtaaagtaggatttagtaaattttgtacataaccttgcatgtgctgcaaacttaattaatttataagagaatagagaaaagcagtcctatttttcaaaaaattttgaaggctacttaaggtttaccatttggcttgtcctaaggtcaaggtggctctggtaccaacttgtcacgcccgaaatttctatccaaaattccaaacgcttacatgtgcttaaatcctcgtccaggaatcagccgaggcacacaataacaaattgataatagagtactatcaaactactaattaatattcgcaaaataataaattattacagagatggatagttcctctcaaaagaataaaattctacgcagcgaaaaaacacaataacaaattgataatagagtactatcaaactactaattaatatttgcaaaataataaattattacagaggtggatagttcctctcaaaagaataaaattctacgcagcgaaaaaaaaacaaaagactaaacagctatggcgactccactccgcaagcaacttgacccaaacaaagcctactcctcctgatcatcaccttcactgaagtactcctcctctgaagaatgaatattgcaagaatgagcatatgacatactcaacaagccacacagcaaatatgcaactgcacaggatagcaaaggatggcataataaagctcatttgcacaaacaacacttaacaaatatttgagagaatagtcaaacagttaaataattaagcaatattaaataaacactatacaacacacccgtgttgcataggcccaacctcatctgaacaaccaaccccggttgtacaaatccaacctccataccaggaatataccattccaaaccaggagtcaatttaattatcacaggttatcaccaataatgagtaatgtgagactaatcacgaaaaacattgttagacccgcccataaccgccggcacggctattcgaatagttttactctggctagagatgtaccactgtacccacaaggcacagctccacaacatgtcaccatgcgcctcaataccatcacggtacctcggaaaggaactgtgataataccccttgcacaacacaactcaccatagtgcaccatacctggatcatcatcaacccctctacaaccagaggcatggactccctagcgaccccatggacttctcgccgcttctcagtctggcaccccgtaatgaaccatgctatacaaaaggtaaagccgttgcccacgctggcttgtggttggcacggtaaatgtttcacaatagtagctcgcgaaccggtccttaattgtcatgagcacgaccatccaaaccatgtgctcacaacccacctttaatcaggttttaattatcaagtaattattgtcgcgtcccaaaacgactctaaaatacatcctcaaaattgtgccgagaataattaaaatccatgtgaaagcctccaacaattaaaatgtgcaaatttaaaagtcaaataaggcttggaggatttttgtatatttcctaaaagcctaaaatgtgtaaataaattttagtggaattttcagagcacaaataataattgagaagaaataaacaaagttaaaaaggttttataaaaagaaaaaccctaaaagtcttcttttcccccccttcccttcttgggccggctcggcccagttctctccccccctctcctctcccccgcggcccatcggctctcccccgcgcgcgcgccgctgacgggcgggcccgcccgccaccctcgctgacaggtggggcccacccgtcatcccctacctcgcgccgcagccgccgccccgcccgtgccctagcgccgccgccgccgcggattccgccgcatcccgccgtccccgcgcgccataaagagggggaaatcactccccgtgattccctccctcttttccccctctttcccctctctctctccctcggattcgtccggattcactcccgcgatcttcgccgacgcatcaatggcggccgagatttccgcggccgattccttcccctccggccgctctctccctctcccggcgctatataatcgttccccgtgcttcgctcctccgtttccgccactcgccgcctctcctccccgtcggaatcgagcccgcgccgtcgcaccttctctccgccgtcgccgccgagctccggtcagccgccgtcgtcgctccggaccgtctcccgccccgacgccgcccccttcggcttcgccgcgtcctcgccgacctcgtccgctcctccgtttcgcccgccgaccgccggagcgccgtcgtcctcgtcgacccgagccgcgccgccgccttcctccgctccggtcgtcgtttccgccgccctcgtcgtcccggggtgagccgtggaccgcccctttcgcttcccccttccctcctctctctcgggtgccgctccgccgcgccgttggtcgccggcggcgaccatcggggcgcgggtgcgccgcctcctgtcggccgtgccggcgaggccgccttcgggcgcgccccgcggctgccaggtgggcccggccgtcagccgcccgcgcccgcgggtgcggctgacgcgtgggacccacggcgccgaccggcgccagccgcgtgcacccggtccaccgtggaccgttcggctgacgcaataaatccgatttttaattaaaatttaaatgaagaaattcgcaaatatccatttaaagagcatataaacttcaaatggccataacttggccatttgaactcggaattggaccgttcaagtctctaatttttccttataaagccaagaacccatttttgtgctttgtttctgctgttatatggagtttattagagtaaaagccttttcttttccgttggtcgtgtagacgctgcagcttcggaagatccgctcttcgtggaagttgaagccgacgtttgggaaagcgagcaaggcaagtcacatcatctttgaacatattgaatcccagtttgtaaaattatgttgatttaaattattgcattatcgctttatttaaattcccgcgttatcactgttttatttagccatgcctatttacctttgttatgaccctatgattgttattgttattattaccttgttcaccctagaataaacaaaacctcaactagtggacactctactcatggcatcactagtttaattttaggtagatgcttcgcaatttaattaggtaacattaggtggtttttcaattttagactttgggaaatattcatatcacctggatactctggaatggtctggttattgtggaattggcttcacaccgctccctcttttcaaaacccccaaaatggttttaggctgggctcggggtgcatggttttgatagtagcacctcggccatataaggaccggtcttcgggcctctgttgcaaagcactaccgtacttccacatgtctagtgggtaaggcttagtttatggctcagtctggttataaacaaaagtacacagattggagatggatgaagtcgggggtcgatggacattctccagggcaaatgaaggctacacgagctgcggcccggtagtcgagatgtcatggcacagggccggtgtcctgttgctgggggctcagtcctgcctgcctatcccgggggttccggccgtaggtgggattgggtcggtactcttgtctatggctaggatgggttggaaactatgtcacgtcttccgtctgtataccgtggtggtatgtggcacgtggctacacgtgaggaagatgtgtcttgtgggtaaagatgtacacctctgatcagagtataatctattcgaatagccgcgccctcggttatgggcaagccgagcaatgtacccaagttagtgttttaattcttaaaacttgcttatcaactaaaatgtggaatggttggcctcggttggcttgggacgagctgggacccagggtcgggttgccagttcggtctgaatcatcgtaggccttgggttaaggcaggtccgtgtgggttcacggccttgattaataacattgtatagttctagaatcgtgtttacaaaatagctttggagcaactaaatatctttaaatgctgtttactgcaaccctaaccctctatagtataattcccttgtactcccttgcatttattctgcacttgcgggtgtgtcttgttgagtacggtggttgtactcagtcttgctcaatttttcccaaccccagaagaggagttccttgaagatgaaggctttggtgtctagctcgtgcctgccgtcaagcgcctgtggtcgtcgccctagtcttccgctgtttcccgtttgtctttgtgtgtgctgggccttcgctgcccatgtaataaattaactatttacgcttccgcttgttaaactctgaattgtatcaacttttggtgtaccttgcctcctgggacaaggattaatgcacgcacgtcaggaacgcccgttgggttatttccggtcgtgacaattatcatagtacgattaaccatcatgagctaccagtaaaaataaccataaataataatgtagtatgattcatcccattaatgagctaatgtttctaagcatggctaagcaattatatataaagcatttagctgaaccaagtcaatatataaggtccaagctaatcaatttattacccataggaaaataaagtcatcttcggccattaattaattgggaacggctcaccacccgatgacattcgaaaataatgcataagttgaaataaaacattagatttaaacgggttcaacatgcaaaaatggttgtttgggatctgtgtgacttgccttgagcttcttcaaatgcttctaaaccttcctcaacgtaaacgctctacttcagaacgtcggaaactaaagcaaatgaacaaaatcaacaaaacagtacaaaacaagcttaaacagtacatgaggatatttttaacatgtagatctcgactttagatgaatttagcaacttgaaccacttgaatccgacttacgatgatttagatatggatttccgaagtttaatcagattttcatctaatacagaaaattattacaatttaaataaaggatttatgatgtctggataacatcatcgcagccatggcactgaaccacaactccgccggtgatagagagctcgggcgacgaaaccgaaggcacctacacgaagaggacgacgagacgaactcaccgaagacaagaactacgacgaatgacggcgaacgaagaccgacgacgaacttgacgacggcacggctcggctctatgtcgacggcgattctccggcggattgcagcagcagcgaaggggcggacgggatgctcctccacctggcgaacccggcggtggtgacggaaggcagcggcgacgaccacagcggtggcgcaaagcggctgaagcgtctacggcggcgacggcgctagggtttacgcggcggcggcgccataggcgacggctgtggcttggacttgaggcaaatggaagaggacgactagggaatgctatatataggcatgggtgagggagatcggtctccaaacgaaaggatttgagccggaaaatccgatggttagtttggagagataaactcgaaaacgaatccaaattcgcatcgaactcaaagggataaaatcggatttttgggggaagggatagaagaggataagggaaacaaatcccctcaactaattctagaaatgcacgagacgaaaggccggatttggagggggaaaaccgagccaattcggtctcaggtcggctggcagagcttgaagaagtacagtgcacagggaagcaaagtagactttcagcaataggccggactgagaaaaggcagctcagctgggctgactgggctgcacagccgtgcacacaaagaagggagatttaaaaactttttcagttaaaataatttgtgaaatgatgtttcatttattaaaaatacttcccttgctcaaataattcccagaaaattccaggaaacagataaacaagcaaagtatttaatgaaattttatctagcttaattttatgttgcactttttcctagattattacagtttaacttgtaagcttttaaaataatttctaaaaaagtattaaagaatgaattattaaattaagcgactttcagggcgtgacaaactcggatatgccaaacacaacatactgtgaggctagcaccagggtctgaccagctggagggtaagactccaaaagagattgctaaatacaagaagggcttgcacaaggagaaattgattattgtcgcacagaacattggacgaggcttcttgcactttcaaaacaagagagtcgtcatggctgcttataattttaagtaagtctggtacatttatcttgtacacatatatcttattttagctggtactaactaactatactgttgttaatatgtagcgatcaattatatctgtttactcatccaccctaaagacggaaccgtggtagtcttggaccctctcgattacggtcacaagcaatacaaagaatttctagcaatcttacggtagtaagtgattatgactcttgcatttttatatgaatgtattataaataaatatcctccttaatgtgaaacggtacgacatccatacaatgcgtaccaatactacaagttcaagggtggagaatagacccgaacaagggagaagctgctagcacgtaccttttggccggtaatactccactcacttaatgttttccaattgttttactaattgcaaattttaactattcttttctatgatatgtcctgaagagtcacaagtaaccgcgaggaatggtcctttgcgggtattatgtgtgtgaatttcttagggttaatgggaggtacaagattaacgcggaggatgtaagtctctatactatgtactagacagcttcacatatttatgatactaatatattgattaacttcaatgcatgcagttgccaagattagaacgtcgaacaagctttgacgatacagacatcacaaatgtccagcgtgatctgtgccatttcatccaccatgagtgctgtcatgtgaaaggagatttcttcgacccagagggtgccctagcgacaagtgacgaattcaaggatctttgggagtggaacactgctatgccataatgtaactagacggcgttatttgaagtgacaatgtaaaaaaatattgtaatatatatatatatatatatatatatatatattggcaacactttagatttctcagtactataccaaatgctcgataatcttctaatatatgtacataataatctacctagaagaatttctattaatgggcaaattattattaaattttaatattttctacctattttcgcaggcggattttttttttgcaggcggccgattcctattttcacaggcggaccggacaagccaacgtccacctgcgaaaattatcttcgcaggtggacggccgccctgtctgcgaatatcggcgatcttcttcacagtcgttggcttataggcggacggctgccccacctgcgaagaccgttttggcccgcttgcgataatgcttttcctagtagtgggcagccccatgcacggccaccttgaagttgtcgtgctcatctaagctgtcgatgtgctcctgcgccgtcttcacaaaatcgctcaccacgccgcctccaaagtgcctagccaatacatcctcgtgtggcgcgcacaatgctctcgccgcgaacgccgccttgttctttgactgggaggagctgctgcgctgctgcccggcatggtcacgaagagctcccgatacacaatctcgaaggagccctcggcgctgactgcctccaccacctcctctgagcaaggctcgtaaatgggcagattgaacatctcgagcttctccttgtcaaccattccctgattagacatgtatcgtaccattacatcgaaatgaaatatggagatcatggaggtacctctattttttaacgttgttcatagtcatatgaaaatatatataagtcatgtctaaaatatttttatgataaaaaagtcaaatatttttaatatattttttttaaaaaaataaaacgaatgatcacatattattttacctgagctgccattttattgaggatgatggagatgtgatcccacatacgtgtgtctccgcttctgaggttgtctatacatttcctcccttttacggagattaccagccatcctcccgggatgatctccttgcctcgtgactcgagaaacaatgtgaagtcgttcataaactgtagagcgtatgcgtcacatacttccggtgaacatattttgcccgcacatatgccctccttgtttgtcagcttgccgatatgcacttcttcagggacctaaatcagtaatcacgattaatttcaagaataagtttctctgaaatcattgtttcttctgtgacagtaattaagtctctgaatatcctgaggacggcaacaaatgtgttaggaacgactcctaacttaataccatctgcgttacaaaaataattgacattttggggatagcaaaatggtcaccaggatactattttgattattagttactcgtaaaaagattattgttggcatcgaaaatcatttcagcaccaacatatagagatcatatagctcccttctgtaagcgtcacaccaagaagtgtaaaatcaaatgtgtttttgattattattctgtgatgaacaattgggcattggagattattggttttgttatttgtaatttattcacgaagtggttttggagatgattggatttcacaggtgaatatacaggaactgctgtggttttatgtggaccggtcagaccgggctctggtagccggtcagaccggcgtgtaatgcacggtcagaccggcgcagcccgtggtctgaccggccgatactgtgttggtttcggtttcgggttgtttatttggatatccgagtttatttcatgattatgacttctggatggatactatacgtatgtaatactattgtttgctgctaatgagtcaagttggagatagcttggtctcggaatatggtttctttgtttgttccatgtgtaggttactcgatgtctcgggagagtatttgcggtgatggaccgggagtcggcttggggataagacgacgtccgtggtggtcagagatcatgcggaatacttaggctagagttgttgcacgtggttgatggagattccatatggcatacgatggaggaattgtgtgcgtatgggatgcggagtcgaatttggaaggagtccaaatttggtacgtttggttatgtaaagtttatttcttcgatttgtgtttcaccgggtttcggcggtctaaccggcggcgcaccggcggtcagaccggcagcgcaccggcggtcagaccggcggcatctcggcggttcgaccggcgggcacacggcggtcagaccggtggctacaggagtcagcaacaggcattttcggcggttcgaccgatcgatctacatcggtcagaccgacgttcatcaggcggtcagaccggcgcaactacttcggttagaccgtgatccatcgatttcgagggtaacttttattttcgctaaaagtttttgatttttgggtataccaaccattcacccccctctggttggcttagttcctgtgattcgatcctacaagtggtatcagagcctcgttttcttctttggatttttatcgatctaaagtttttttgccatggctactcccgctaggttttcaactaagcctcatgttttcgatggaacggatttttcttattggtgtagtaggatgcaatcttacattatgtctgaaaattatgatatttggaggaaagtttctcatccttatgtgattcctgaagccattaatactgatgctttaaaaactgaatttgaaaataattgcaaagctcgtaatattcttttgagtgggatttctcgttctgaatatgatcgtgttgcacatcttgaaactgctcatgagatttggaatgctttgagaaattttcatcaaggaacaaataacattaaagagcttcgtcgagatctttttaaaaaggagtacattaaatttgagatgaaatctggaaaggctttggataactatctttctagatttaataaaattttgagtgatcttagatctgttgattcttcttatgatgttaattatccacaatctgagatttctcgtcactttttgaatggtctcgacatgtctatttgggagatgaaagttacatctattgaggagtctgttaatatgtctactttgactttggattcactttatactaaattgaaaacacatgagatgaatattctttctcgcaaagttgattctaaatcgagtgttttggtttcttcttcttcttctttgattgttgatgcttcttcatctatgccttcttttcttgctgcttttaatgccacatccgattatcaactcgaacaaatcgaggaggaggatttggctttggttgctaacagaattgctcgagctatgaataatgtcaggaacaggaaaagaggtggtccaaatcgttgctttgaatgtggttcaattgattatcttcgttcgcattgtcct

SEQ ID NO: 15485 - DNA, 526 bp, Oryza sativa
gttgttccggccctcggtacagagtgacagtgcgtctcgcgcaatccactactccttggaattgagccaaccaattcatcctaaggatcacatccaagttcttggtgtctagaagaatcagatccgagggaaaaggaatcccctgaatttctatagggacggcagggctataatactttgctgtcataacccctccaggggtggtgatgagcagagggttcctaagcctttctacccccaactgttttctccccacgaatggcacagatataaacgagtgggaagctccagagtcgaacaaaatggtagcagggatggaatgaatgaggaacgtaccaacgatgacgtctggagttgtcagcacgtcctcggccgtcacgtggttcacacgaccccgaatgacatccttaccaccgttgttggagcggggaggcgattgacattgctggcgcctcggctttgggcatttatccgcaaagtgcccgggctcgaagcagttgaagcacagacgctgcggaccttgagc

SEQ ID NO: 15486 - DNA, 2707 bp, Oryza sativa
  unsure (1)..(2707): unsure at all n locations
ccgctaatgacgcccttagganngatcaacttttggtgtaccttgcctcctgggacaaggattaatgcacgcacgtaaggaacgcccggtgggttatttcaggtcgtgacactgggattcaatatgctcaaagatgatgtgacttgccttgctcgctttcccaaacgtcggcttcaacttccacgaagagcggatcttccgaagctatagcgtctacacgaccaacggaaaagaaaaggcttttactctaataaactccatataacaagcagaaacaaagcacaaaaatgggttcttgacttcttaaggaaaaattagagacttgaacggtccaattccgagttcaaatggccaagttatagccatttgaagcttatatgctctttaattgaatatttgcgaatttcttcatttaaattttaatttaaaatcggatttattgcgtcagccgaggggaaagggcgcgcggaccgggtccacgggagtggggcccacgcggcagccccacggtccacggtggaccgggtgcacgcggcttacaccggccggcgccgtgggccccacgcgtcagccgcacccgagggcgcgggcggctgacggccgggccccacatggcagccgcgggacgcgcccgaaggcggccacgccggcacagccgacgggaggcggcgcgcccgcgccccgatggtcgccgccggcgaccaccggcgcggcggagcggcgcccgagagaggggagggaagggggaagcgaaacggcggtccacggctcaccccgggtcgacggcgacaacggaaacggcgaccgaagcggagagaggcggcggcgcggctcgggtcgacggggacggcggcgttccggcggtcggcggtcgaaacgggggggggggggtggacgaggtcggcgaggtcgcggcggagccgaaggaggcgacgccgaaacgggagagggtccggggcgacgacggcggtggaccggagctcggcggcgacggcggagagagagaacgacggcgcgagctcgattccgacggggagagagagcggcgagtggcggaaacggtggagggaggcacggggagcgtttaaatagtgttggagggggagagaacgnccgnatgagggtgaatcggccgcggaagatccgnccgccattgatgcaccggcgaagtttgctggagtgtttccaaacgaatccgagggagagagagagagagggaaaagtggggggaaagggagagggaatcacggggagtgatttccccctctttattgcgcgcgggggcggcggaatgcggcggaatccgcggcggcggcggcgctagggcacgggcaaggcggcggttgcggcgcgaggtaggggatgacgggtgggccccacccgtcagcgagggtggcgggcgggcccgcccgtcagcggcgcgcgcgcgggggaaggccggatgggccgcgggggagaggagagagagggagggagctaggccgagccggcccaagagggggaagggggaaaaagactttttagggtttttttcttttaataaaacctttttaactttgtttatttcttcttaattattatttgtgctctgaaaattccactaaaatttatttacgcattttaggcttttaggaaatatacaaaaatcctccaagccttattcgacttttaactttgcacatttttattgttggaggctttcacatggattttacttattctatgcacaattttgaggatgtattttagagtcgttttgggacgcgacacccagtttataaaattatgttgctttaaattattgcattatcgctttatttaaattcccgcgttatcactgttttatctagccatgcctatttacctttgttatgaccttattattattgttattgttattattaccttgttcaccctagattaaacaaaaccccaactagtggacactcttctcatggtaccactagcatgattttaggtagatgcttcgctattttaattaggtaacactaggtggtttttcaactctagactttgggaatattcatatcacctggacactttggaatggtttggttattgtggaattggcttcacaccgctccttctattcaaaatccccaaaatggttttaggctgggcttggggtgcgtggttttgatagtagcacctcggccatataaggaccggtcttcgggcctctgttgcaaagcactaccgtacttccacatgtctagtgggtaaggcttagtttgtggctcagtctggttataaacaaaagtacacggatggagatggaagaagtcgggggtcgatggacatcactaggacaaatgaaggctacacgagctgcggcccggtagtcgagatgtcatggcacagggccggtgtcctgctgctaggggctcagtcctgcctgcctgtcccgggggttccggccgtaggtgggattgagtcggtactcttgtctatggctaggatgggttggaaactatgtcacgtcttccgtctgtacaccgtggtggtatgtggcacgtggttgcacgtgaggaagatgtgtcttgtgggtaaagatgtacacctctgatcagagtataatctattcgaatagccgcgccctcggttatgggcaagccgagcaatgtacccaagttagtgttttaattcttaaaacctgcttaacaactaaactgtggaatggttggcc

SEQ ID NO: 15487 - DNA, 3671 bp, Oryza sativa
  unsure (1)..(3671): unsure at all n locations
ttatttnnattagcgctctcgtgtgatggatgaataggctatgttgaagaggcttgacaggatattgatgaagatgacgatgtcggtgatccagtcaatagcaatgtagcaaccaatgataatgacgaagacgctcatcagcgtttttataataggtcaaccgtgaaggcgaaataacaagccggcaatgacggaagcaactggaggcgaagacgtagtcatccattagcaacggcagagatgtcagggccgatgaagtagaggtgctgatgatgaagtcagtgataataatccatcaaactgttgagaagatataaagctcgagtagtttccttgatgcgagcgtgtatgcataaagaagactgatgcaacgcttcttgatttatgaagatggcaataaaatttaatgttgtagctgttggagatgcttcacttgaaggaaagtagatgatgttgtccaacttgtcgaaactaagttgattggttgatgactccaaactcccagacatgtaaatttaatcttgacctactgctctaaagcgaagacaaaattgatgactcccagagttgactcgttggctgattaattgattaattcatcttgacataaagcttgtcgaattttgagccatgtatttgtgtagcccccgactctttgattagttgggaaacaactgaacatagagtcgagaactttagcttcttgtcgtcgaatagtcattgcttgattgaagatggaaaatgctacacatacgatctttttagtacgatcttgttacgataagacgcaacggcacggacggcaacggcaaaacagcacgcacggcgcgcgcggcagtctaagcgtacttatgggccctaaagcccaatttacctctaaacctgactttacgttcactacaccaaaccctaaatctgactttcatgttctgatctaacctgcaagtgtgaaactaatccaatagcatacgcatcgaagacaaaggtatggcatcttatttacttgattttctttagcttcacaatcatctttttttttttacattattctctctttcttttttttcctaggcaatgttcatggccatgaaatgctttctttattattatggatttaatctaaaattttcctttgcaaaacatatgccattatttttaatttaatctgaaactagggttaatgttatcactgtccaaggttcgaggaacatatttgtatgcgtaatttgcttaaccatgccacatgataaattcaatgttgggtgctaagtacaattcttatatacagtaagatattaggaagaggattgcttaagatatgattgaaataaaaattgcttgggttggctcattggctgtccaagcaagccaaccagatagcaggccaggacgtcaggagcttgggcttggatatgggatcaactaaggcctgagggatccgtttgatcgtacaaccatcgtacgaaataattcgtacgtatagcagcgctgattgaagatatgtgttgaagatgtccaagtagaaatcctgaatattggagagccacttgttgtagtaaaataacacggcatcgcatgccgagatgtcgaggttcacaaagacgtcgtggttggtgaagtagcaaaacttgcgaagtagcagcaatagagtttgccggtgccgaagataataaagatgaagttgctccaccatgatgacaaagttggatagccgtgatgaagtgaacacgagtcagcagcaacagaagcaaacagcgatgacgatgatgccagtcaatgatgacgaagtcgcgcagccgtggaggtgaacgagccagtcggcgtcagacaaggcggccagcaatgaaaacgatgacgtccatcagtagtggtagcagtataaaccagcagtcggcagcagacgtagacagcttgcgttgaaggtgatgacgcctatttgcagtggcggagacgtggccagtcgtgaagacgatagcaccagttggcgtcatacgaggtggccggtcgaagaagatgtagatgtcctacaacggcggcataataaaccagccctgcaggcggagacaccagtcggcggcagcgaaggcaagccggtcggtgaaagcgtagacgcccaacaaacggcggcataataggccagccgtgcaggcagagacaccagtcggcggcggcgaaggcaatccggtcggtgaagacgtagacgcccaacaaacggcggcataataggccggccatgcaggcaggaataccagtcggcggcggcgaaggcaagccggtcggtgaagatgtagacgcccaacaacggtggtgtgaccacttaaccgtataggcgaggacaccagtcggtggcgacgacggcaagccggtggtgatgttctaactaatccattcctgaagcgtaggagataagcttaaagccatgaatcccttctatgcatatctggatctggatcctacagaacaaacatatcggatgagtagtatctgatataaatataatactcgagaaaaattcaagtatttaaaatatttacaaatatgtatttctcctcttgtcaattttgatttccccgagcggatgactccttacgtttaaatactctgcccgactagtcatagtccccaagcatcgggagtcggccaaagcacttcccagacatgcatatgagtgacatgagttcgtcattaatggaacaaagtttcacagatcggagtttactactcgggtacttttgcaattgtaaagagcagaaaataaatttatcttatctttatgcttttgatttattccgaataatacttagcaccttgcgttactcggtccatccaacgagcccccgggtgctaggaatcggcccaaaggcaactatccatcgacaaaccaaacggagaacataggaagataaaactccataactcgataggcacatttgtactcagattatatcgcaagcaatcaagataaatattatgaaaattgttgaaaatatgatataacatctgtagcccccgactcactagtcaacggtgaaccagttaatgtagtgaggcagaggaaaaggaaaatatcatataagaaaaaatgatgagttagctttttagtattcccttggtgatggcagaagtagccgatgtgggatcgaagtagtccatcaatggtgacaaaaacaccagttggcgccagtggaaccaagccggtggtgtcgatgatgaggcccattaacagcggcggagtccggcaaccgtataggcgaaaacaccagtcggcggcggcgaaggcaagcccggtcgtgaagaggtagacgcccaacaacgggggcataataagccagccgtgcaggcggaaacaccagtccgcggcggacgaggcggccggtcggtggaaaggtagacgcccaacaacggcggcataataggccagccgtgcaggcggaaacaccagtcggcggcgaacgaggcggccggtcgatgacgaggtagacgcccaacaacgacggcataataggccagccgtgcaggcggaaacaccagtcagcggcggacgaggcggccggtcgatgaaaaggtagaagcccttcaacgccggcactaataggccagttgtgcagncgnaaacaccagtcnnannnnnnnaggggnntgcgagntgacntaaggttcatggacatggg

SEQ ID NO: 15488 - DNA, 5657 bp, Oryza sativa
  unsure (1)..(5657): unsure at all n locations
cacgatgggcaaatagnccagccatgcagcggnaaacaccagtcgccgncgaacgagcgncccagtcggtgaaanacgtagacgccacaacgnncagcataataggccagccatgcaggcgaaaacaccactcggcaagagtagtgccgcggcgttacatgcaacagccagaaaatacccagagattaatttgatatttagagatcaatctaatgaaaaaacaaataagtcgtaaggggaaaaaacccagcgaagtcgaagattaaattgttgaactcggcaaagattattggtcttcctggatgcgtgcatgtcatgggatccatcctcctgccatgcgtgtgtacagatcgcggacccgagtctggatcaaatcccagtcggaggcttcgcgcgtggtcttaactcagaaaagtccgataccacaacgcaatacgacagctccgataacacatgcatgtaaacaaatcaatctgattagcagagaaattaatgcatatatgtagttggttatgagagcaagtaagcaagttaatttatttgctccctccatgcatggcctgcatgctcctgtgtgcacgttggtcgtccatgcaaggttctagtcggtggcatgtcaactgaatcagcacatgcgtgtgtttgctcctgatgcccgggctttcctctgcccaactaatggcagggccatccgcgtgggaggaaggggaaaagctctcggcaacggttaggcaggagtggatgacgatgataatgaacacgtcttgatctcaaccagcatgtgaaaaacaaccaaacaccaggaagtcaaacaacgattaaaagttaatctaataaaaattagattggaacgataaacctgattgaagatttgagccgtcgaaatcgatgagatcgatctcggggtttcttctgaagttgattccatcgcacttttcgataggtaattcgacgcaacccctacttggcgcgccaactgtcgaaacatgaattcggcaataataaaacggggtagcgcacgagacctaaaagtggatggatgcagagacagaggatttagacaggttcaggccctctcgatgagaggtaataccctactcctgtttggggatttgaatccgccgggtgtattatagatctgacgatctagttgtctcatgccccctagagggcctcctgcccaccttatattggatggggggcaggattacaagatagaaaccttaactaatacgatatcggtttcctaaatctattttacaatattatcaaatcaggactttaggccgctccataatataaaaggaaacgtaatactcaagtcataatctgttacatatttcatagatataagctatcccctatgactagtcggataaccatgccgtgtgggtatggggtacccataatctccacacgaagttcataagaagtttttccaagtttagattgcaagaaaactcgatttgaaatataacatgcagtgttaatcgcctcatgccaaaattttgtaggagttttgtattcatccaacatcgttctagccatctcaaccaaaacacgatttttcctttcaacaacaccattttgttgaggaacacgaggagaagaaaattcatgttcaagacctctttcgctgcaaaattgttcaaatgaagcatttttaaactctccaccattatcacttcgaattcttttcaaagaaccagaaaattcaagctccaatcgaagaaacaaaccacgaaagtgttgaaaagcttcgtccttagttgccataaagaaaacccaagaatatcgagaaaaatcgtcaacaataaccaacacataccactttcctcgaacagattgcactctagctggaccaacagtgtccatatgtaaaagctgtcccggtgcatccgtcatcacagaaacaataggagcatgtgaagtagaaaccatcttagcatgacgacacggggtacaaaccaaatcacgatctttcttaagtttaagcaaaccacgaataagatccaaaccacttagcctagtgagatgatcaaaaccaacatgtccaagtctacgatgccaaaacatcacatctttatcaaacttagcaaccaaacatgttatcacaggtgaaacaggattttcaaaatctgctttaaacactcttccatatcgagaaatattcagcacagaatcaccatgagaatcaaaaactttactttcagttttcttaaagtgaacctcaaactctttatcaacaatttgcgaaaccgaaagcaaattggactttaaatcctcaaccaaagctacattcttcaattcaaaattttcatttacctttaccaaacctgtagtgagaacggcacttgtagaagcatcaccaaagataattgattcagtattagatgccttctttagggaggagaaccaatttttatcaccggtcatgtgccgcgaacaaccggaatccacgatccacacgttctccttccttgccaccaaagcctacacacaaacagaagtcgaagcttcagtactggggttagataataataaaaatttagtaatccagtactgagacacacgaccagaagaagtcgaaagcttcagtactgggttagataataataaaaatttagtaatccagtactgagacacacgaccagaagatccaataggcatatatccacgtgcaaaatcaattttagaattttcagaaaaattcctccgaggccggtctgaccgagggtgtgcagccggtctgaccgggtgtcacgaccggaattaacccaacgggcgttccttacgtgcgtgtattattccttgtcccaggaggcaaggtacaccaaaagttgatacatttcagagtttaacaagcggaagcgtaaatagttaatttattacatgggcggcgaaggcccagcacacatgaagacaaacgaaaaacagcggaagactagggcgacgaccacatgcgcttgatggcaggcacgagctagacaccaaagccttcatcatccaggaacacctcttctgggtttgggaaaaattgagcaagactgagtacaaccaccgtactcaacaagacacacccacgagtgcagaataaatgcaaaggagtacaagggagttataatataggggattagggtttgcagtaaacagcattaaaagtcactttgttgctcaaagctactttgtaaacacgatcctagagctatacaatattattaatcaaggccatggacccacacgaacctgccttaacccaaggcctacgatgattcagaccgaactggcaacccgaccctgggtcccagctcgtcccaagccaacccacgccaaccattccacattttagttgttaagcaggctttaagaatttaaaacactaacttgggtacattgctaggcttgcccataaccgagggcacggctattcgaataggttatactctgatcagaggtgtacatctttacccacaagacacgtcttcctcacgtgtaaccacgtgccacataccaccacggcatatggacggaagacatgacatagtttccaacccatcctagccatagacaagggtaccgacccaaccccacctacggccggaacctccaggacaggtaggcaggattgagccgctagcagcaggacaccagccctatactatgacatcttgactaccgggacgcaactcgtgtagacttcatttgtcctagagatgtccatcggccctcgacttcgtccgtctccatccgtgtacctttgtttataaccagaccgagccacaaactaagcctaacccactagacatgtggaagtacggtagtgctttgcaatagaggcccgaagaccggtccttatgtggccgaggtgctactatcaaaaccatgcaccccgagcccagcctaaaaccattttgagggttttgaatagagtgggaggtgtgtgtgtccaattccacaataatccaaccattccatagtgtccaagtgatatgaatattcccaaagtctagagttataaaaccacctaatgtcgcctaattaaacagcgaagcatctacctaaattcatactagtggaaccatgaatagagtagccactagttggggttttgtttattctagggtgaacaaggtaataataacaatagcaataataataaggtcataacaaaggtaaataggcatggctaaataaaacagtgataacgcaggaatttaaataaagcgataatgcattaatttaaatcaaaataattttataaactgggattcaatatgttcaaggatgatgtgacttaccttgctcgctttcccaaacgtcggcttcaacctccacgaagagcggatcttccgaagctgcagcgtctacacgaccaacaaaaaggaaaaaggcttttactctaataaactccatataacaagcaggaacaaagcacaaaaatgggttcttgacttctaaagaaaaaattagagacttgaacggtccaattccgagttcaaatggccaagttatggccatttgaagtttatatgctctttaagtgaatatttgcgaatttcttcatttaaattttaatttaaaaaggatttattgcgttaaccaggggagatggcgcgcggaccgggtccatgggagtggggcccacgcggcagcctcacggtccacggtggaccggacacacccgggctcacaccgaccggcgccgtgggccccacgcgtcagctgcacccgagggcacgggcggctgacggccgggccccacccggcggccacacggcgcgcccggaggcggccacgtcagcgtggccggcgggaggtgtcacgaccggaaataacccaacgggcgttccttacgtgcgtgcattaatccttgtcccaggaggcaaggtacaccaaaagttgatacaccaaaagttttatctagccctgtgccatgacatctcgactaccgggccgcagctcgtgtagccttcatttgtcctagagatgtccatcgacccccgacttcttccatctccatccgtgtacttttgtttataaccagactgagccacaaactaagccttacccactagacatgtggaagtacggtagtgctttgcaatagaggcccgaagaccggtccttatatggccgaggtgctactatcaaaaccacgcaccccgagcccagcctaaaaccattttggggattttgaatagaaggagcggtgtgaagccaattccacaataaccaaaccattccaaagtgtccaggtgatatgaatattcccaaagtctagagttgaaaaaccacctagtgttacctaattaaaatagcgaagcatctacctaaaatcatgctagtggtaccatgagaagagtgtccactagttggggttttgtttaatctagggtgaacaaggtaataataacaataacaataataataaggtcataacaaaggtaaataggcatggctagataaaacagtgataacgcgggaatttaaataaagcgataatgtaataatttaaagcaacataattttataaactggaattcaatatgctcaaagatgatgtgacttgccttgttcgctttcccaaacgtcggcttcaaaatccacgaagaagccatctcccaagcggccaatcaatggtcaaatcatggccagta

SEQ ID NO: 15489 - DNA, 2826 bp, Oryza sativa
  unsure (1)..(2826): unsure at all n locations
cccctgatgacactcgcttgtgccatggatgaaaaaaggactttttagggtttttctttttgtaaaacctttttaactttgtttatttcttaataattattatttgtgctctgaaaattccactaaaatttatttacgcattttaggcttttaggaaatatacaaaaatcctccaagccttattcgacttttaactttgcacattttaattgttggaggctttcacacggattttaattattctaggcataatttcgaggatgtattttagagtcgttttgggacgcgacaggaggcggcgttcccgcgcccctatggtcgccggcgacggccataggcacggtggagcggcggccaagagaggggaatggaagggggaaaagaggcggcggtccacggctcaccccgggtcgacggcaacggcaaaggaggcggccggagtggagggagacggtggcgcggctcgggtggacgggaacggcggcgttccggcggtcggcgaggtcggcgagatggtggacggggtcggcggcggtgcggcaaagccggaggagacgacgccgaggcgggagatggtcctggcgagtggagagggccggctggaggtcgacggcgacggcggagagagaggatgacggcgcgagctcgattccggcggggagaaagggcggcgagtggcggaaacgggcgagggaggtgcggagagggtttaaatagggttgcgagtgagagggggcggccggcggggaaggaaaccggcgcgcgggatccggccgccattaatggcgctggcgagattaggggaggggtttccatccgaattagagagagagcgaggggaaaatggagggaaagggagaggggatcacggggaatatttcctcccacttaattgcacacgggaacgatcgggggcggtgggattcgcagcggtgncggtgctaggcgcgggcggggcggcaggagcggcgggaggaaggggatgacgggtgggccccacccatcagcgagggtggctggcgggcccgcccgtcagcggcgcgtgcgcggggagaggccgagtgggccgcggggagaggagagagagggggagggagatgggccgaattcggcccagagagagggaaggaggtttttagggtttttctttttataaaactttttcaactttgtttatttcttaataattattatttgtgctctgaaaattccactaaaatttatttacacattttaggcttttaggaaatatacaaaaatccttcaagccttatttgacttttaacttcgcacattttaatttttggaggctttcacaaggattttaattattctagacataatttaaagggtatattttaaggtcgttttgggacgtgacaccgggggccggtctgaccgaggcttcaccgccggtctgaccggtggtcgatctgaccgaggctgttcagccggtccgaccggtcgccgatctgaccgcgggacccactgcggtctgaccggtttcctcgagggaaaaccagatttttgccactttgattttgcaaaagcaatctctctctcctttttctgtttatgagctaatctgaaacaaaaatcaacaatatgtccatctttaccacaaaaagaacaagtatatttttcacgttgtttagacacattgttagcattagaagatttagcaacacaagcagcaacaggaggttttgcatgcacaacattggattttgaagaagatgcattcatggtagacatgataccagcagatttaaacacaattttattagtatcatgtttaatcaaaatctcaccacttctagcaccaacacctaacacaacaggaggatgtctagaattatgagcataaggatcaaaacctaaaccaaggttatgtgtgctaaccttagattgatccaaaatcatgttgaggttctttttaccatcacaaaatctttgcaaagaatttttccaaataagaaacctatttttccaaattagcacaattttcacaatctaccatgacacctttgcttctacgacatttggggcaagaaaaccacttcattgtttttcacaacatcttctatgtactcaacacgacctaaagcatcttttagtttcatcttattcaaattacatgctgagcaatccaaaacatcatgaggttgtttcaactttttagcagaaatcatgttaaacatcaaactagcatgaaaagcaatttgatatttttgcaacaactttttagttaaaatcaactcatccaatgtgcgtgtacgcaaggcaaaactcaagcaagagaagatctatttttcaaatcatgtgcagcattaatatctctaatttttgaaatctcattcattaaaacctcacaatttgagcaatcatcatcattacgaataagagattttaatctagcaacttcagatttaacagattcaatgataaattcctgttttctatatatcttctcacacttcttatttttttcactcaaaatattaatagcttcctcaaacgcacttacctcattatcttcaaactctatgtcagattcaccacgcgccatgaagcaaacatcggagatgttcttcctcttatcatcatctccactttcaccatctacatcacttagtggctcgaaagcagcacaaacttgttgaaaagccttctgagattcttcatcttcttcccttgngatgaactcttcgaccttgttgtgtagggcttgggtgtgcttgtcttctcaccatctcttgcttctctttttgctcttcccaagcttangacaatgcgaacgaagatgatcaattgaccacatttcaa

SEQ ID NO: 15490 - DNA, 1807 bp, Oryza sativa
  unsure (1)..(1807): unsure at all n locations
aaaaagggtggagaccccccgcccttcccttaaaaaccccctgtgttacgcgaggtgctttatacataaagaaggcccactaagccctccccagtgtttcttaatttccttgggaagccaaaaaaccaaggggtccaagtagccacaaaggtcacaaaacccagtggggacagggaccaagcgggtgtttaataatggggccatttcaggggggagtcggcaccgtatagcgaaaacacagttggggcggggaagcaaccggttggtaaaagttaacccccaccacgccggcataatagccaacctgcagcggaaccacagtcgcggcggacaaggggcccggtcgttaaaaagtancggccaacaacgcgggcataatgggcaacccgtgaagcggaaacaccagtcggcggcggacgagcgggcggtcgatgacaggtagacgcccaacacggcggcataataggccagccgtgcaggcggaaacaccagtcagcgcgggacgaggcggccggtcgatgactaggtagacgcccaacaacggcggcataataggccagttgtgcaggcggaaacaccagtcggcggcggacgagacggccggtcggtgaagaggtagacgcccaacaatggtgccaaataggccagccgtgcaggcggaaacactagtcggcggcggacgaggcggccggtcggtgaagacgtagacgcccaacaacgatggcaaataggccagccatgcaggcggaaacaccagtcggcggcggacgaggcggccagtcggtgaagacgtagacgccaacaacggcagcataataggccagccatgcaggcgaaaacaccactcggcaagagtagtgccgcggcgttacatgcaaacagcagaaaatacccagagattaatttgatatttagagatcaatctaatgaaaaaaacaataagtcgtaagggaaaaaaacccagcgaagtcggagattaaattgttgaactcggcaagattattggtcttcctggatgcgtgcatgtcattggatccatcctcctgccatgcgtgtgtacagatcgcggacccgagtctggatcaaatcccagtcggaggcttcgcgcgtggtcttaactcagaaaagtccgataccacaacgcaatacgacagctccgataacacatgcatgtaaacaaatcaatctgattagcagagaaattaatgcatatatgtagttggttatgagagcaagtaagcaagttaatttatttgctcccctccatgcatggcctgcatgctcctgtgtgcacctttggtcgtcccatgcaggttctagtccgtggcatgtcaactgaatcagcacatgcgtgtgtttgctcctgatgcccggctttcctctgcccacctaaggcacgggcactccgcgtgggaagaaagggaaaagctcttcggcaccggtacgcccgagtggatgaccatgataatgaacacccctttgtctcaaccgcctgggaaaacacaccaacccctgcagtcaaacacgcttaaaagttatctaataaaaaatannnnnnnnnnnnnnnnnnnnnnnnnnnnnnnnnnnnnntgtatcccagtcgcgaccaccttgaggataagtgagtatttcatacgcaccctaatagcttggcgaaatatgggatagcttgtcctgcgggaatggtattcgctacacatccccacatacaacgcgaacttaaagaaaacccggtgcctaggagagctatcacatatgcgtggctcacggccctttcaacggaaactgtcgcccctcttaagaaccg

SEQ ID NO: 15491 - DNA, 521 bp, Oryza sativa
tccctatagaaattcaggggattccttttccctcggatctgattcttctagacaccaagaacttggatgtgatccttaggatgaattggttggctcaattccaaggagtagtggattgcgcgagacgcactgtcactctgtaccgagggccggaacaaccggttgttttctttgcacccccaacctctgtcagtagttcagaacttcatcagataggactgtcagaaatccccatcgtcagagagttcggagacgtgtttccggaagaactacccggtatgccgcccaagcgagagattgagttccggatagatcttgctccaggaaccactcctttgtacaagcgaccctaccgtatggcagcaaatgaactggccgaagtcaagaaacagttggaagagttgaaataaaaggggtatatacgttcgagtagttccccctggggtgctcctgtgatttttgtggagaagaaagacaagatgaagaggatgtgcgttgactacagagctctcaatgaagtc

SEQ ID NO: 15492 - DNA, 22328 bp, Oryza sativa
  unsure (1)..(22328): unsure at all n locations
ttatgtacatgtatgcttggtgacatttctagtctaatgttgggaatgaaaagattttattctgttctcaaattataatcatgcaatggtttaagttggtcatcacctaaattaaaacggaaattttttgctctcaaaattggagaagttaacctctaactattttgacaagaaattttaagtcctaaaatttcaggtacgttataggcaattacctttgggaaggtaattgagatgcggcatgtggagacataagcgccatattgccatgataatgatgacatgatttgtgaaattaggaaaggaactaaacacttgttttagaccggggcggacggtagatttgggtggtatccgggaaaggctagtatcgtccccggtcaattaaggaccgagccatgaagttaagcatgaaacgaccccgtacaatcacacttctcgaatggggatagacctagcggagtaaatagccgagcggaggcagtatccatgcatagtggtttctcgatgtgtaaggcaggggctctacaatggtgtcgccattgttaggactgccatgtgatgagttgaacataattataacttaatacatgtgtgtgaattttccctccccgggtgcgctagaactcctctcactgctagaaactgtgtacgcctagagcgcatgaggatgaaaagttcatggagcgggtactgccaatgcgaggttatcgaaaagctttgccgtgacgcgtctcatgtgttgagacaaggctcatgtgttgggcagtcgcagagtgtgggtaaagtgtacatccactgcagtgtgagtaaaccaaatctattcgaatagccgtgcttgcggttattgagcatcgggacatgtattacacttggctagactttaaattcttaacttgtgtgggatgggttattgcatgatgaatttttatggtggacgtcctcagaaaaccatgacgactcaatggcgggaagctatccttgggatcacaatggatggtggacagaaccgtcgttgtttaaatacaaacactggtactaaaatttgatcagtcaatgctaggtcttaggcttgtgaaaagaattacaaaatttgctttgcgcaaaagaaccatagccatcctttgaaatacccctatcatatgcattgttgatgtggtggcttgctgagtacggttggtactcacccttgcaaatataaacttaatcagaggcgggacttgaagcttcggaggatccctatgcctattaccaggagggtgatgaagacgatggcgctcagtaggacttagtacggtcgttgcctgtggcattggcgtgccgctgtcttatttccgctgctttatctatttctgcttttgggatgtattccggaccgcccggtccgatgatttaagataatgcctgcgggcttatgttgtaataattcgcactagactctcgtgtatgtgcatttggtatttcagctatgaactcgtgtgtaccagactacttgatccagggaaatggtactgtttacacgattgattcctgttataaaaatgggggtccacatcactggagttggagctgttgcaacgcgggctataggaatgcttcgggatgcatggatgacaattcgctgaggagcaagcttctgattgtggggagttgcgtggactgacgtgctggtagctatgtttctcggttttgggcacttgtcagtgaaatgacacatttcttgacaattgaagcaacagatatctttccggactcagtattttcttttctcattttgattcctctgtcctggcactggagttaggctgaaactgtaatcttggcgaggattggtgttgccttgatgcttctctccattagaacgggcatgttggttggccatcttcttcgtcagcagaaaactgagttgacaatcttttggtacatgatcagttccttcacacaagaaacaagtgatcctgctcatggggcactcgccgggtggatggtcttccttacaatgaaagcaggtagtggcacatgagctggcaacatgaccgatttctccacaatgagagcatgccttatgttccattttattctggttgaacccttggggagacttctcatcttcatcatctgaggagacttgatctgaatcttcactatcagacactctacctccattagctaaaagatgctctgtcaactatggtgcacctcggaaggaatttcttctctgacgttttgtcattcctggtggaggccattctgtactggtaatgatcatcttacggacttcatcttcggttcgcattggtgcttttcttttctgctgaggacagttccttgcatagtgcccttgttcatcacacataaaaccaatgatacttgcttcttttgagtcaacatgtgacatggcatgaggggccttctgggatgttggcggtgcgctgacttgtggtgtgagtgcttggattgcctccaactgcgcctgaggttgcatctgactcgggttcagaattggcatccgatgctgctgtagtatctctataagcaatttgttctggttaatcaagtgttggaccactgccacacaattggtgtctggtgcttcattcactcgggagcttgaggtacccatttcctgacttctgaccttattgcctttctcattatccgccatctgttgcaggttttggagagggagagaggaaaaacaaaggggagagacagatcagaaactaaggataggaccttaacagagctacactttttctgttgtgatgtatgttaggcttattctgcaagttgattacgcaaacaacctagcatggttacatcacaccccactgatgcaaaccacgcgctacacacaagagcaaggaaacacacgactaacgaaaccctagaggtggcttaggttctgcgacgggttctccaagatcttcactcctgcttcacatctggcttcactgcttccctcgcttcgctagcagatccaacagtcttgcggagcttcggcagacaattgacgacatcttcttcttcgcaaagctgaccacctagtactagttgaaattcgaaggaggaagaagggagtaaaccttttgcaaatagcattaggcaaaggagaaaaaaaaggaactttcgcaaatagttttatttataaaatatgtccttaggttttatccacttggcttaacctacagtcaaccaggctctgataccagcttgtcgcgcccggaaaaatacctttttccagaacgctagtgtattaatccccgtcccaggaaaagccggggtacaccacacaaacatgatataaaagacacatctttattatatcgctaatatttacattattacaaaggcacttcaggcctgacaatcaaaaataaatagcagcggactagcgggcctacggctccatcttcacaggcgctcaactgaggtataagctaggactccacaaaagacttctcccaagcttctcttactgaagggggaaagatagagcaagaatgagtacaaccacagtactcagcaagtcacaccggtagatgcatgattaatgcaagagggtacaaggggtaataataatagggttgggtcttgcagtaaagagcgtttaaaagacacttagttgctcaaagctattttgtaaacatgatcctagagctacacaatattattaatcaaggccgtgaaccctcacgaacctgccttaacccaaggcctacgatgattcggaccgaactggcaacccgacctgggtcccagctcgtcccaagccaacccaggccaaccattccatattttagttgttaagcaaattttaagaattaaaccactaacttgggtacattgctaggcttgcccatatccgagggcacggctatgtgaatagattacactctgatcagaggtgcacatctttacccacaagacacgcctttactctgcattccattgcaattggaacccatcataaaaaacgtgacataaccctttacccatcctagccgtgaacaaaagtaccgatccaaccctgcctacggccggtatcccgggacaggcaggccaggattgagcccctagcaataggatctagaccgggtgcgccacacgcataggggtgagaccacccgtgtactagtccagtgccatggcatctcgactagcgggcaccgacccgtgtagccttcatttgcctagacatctcgattaccgagccacagctcgcgtagccttcatttgcctcagagatatccatcgtcgcaacgacttcatccatctctatccgtgtccttttgttcaggactagactgagcaccgagttaagccttacccattagacatacggttagtacggtagtgctttgcaacagaggcccgagcttaatccttatattggccggggtgctacttcccacaactggcatgcacccaaaccccaccggaaaacaggttttaggggttttgaaagaggaagagacgggtatgtccaattccaccataagccaaccatttcatagtatccaagtgatatgagaattcccaaagtctaaagttataaaaccacctaatattgcctaattaatcagcgaagcatctacctaaattcatactagtggaactataaatagagtacccactagttgggttttatttgcctagggtacgcaaggtgataataacaattgcaataataaggctataacaaggattaataggtaatgctaaataaaacagtggtaacacggaaatttgaataaagtagtaatgcaataattcaaatcaaaataattttataaactaggattcaatgtgctcaaggatgatgcgacttgccttgctcagagagaacggccttccgaaccttcggcgacgaccgtgaaccacgcttcgggaacctccggaacgacaggagctacgcgaagcacacaagcagagctaaaccctataaagaagcaataacaatacataaaaagaaagcacagggttctttaggttataacaaacattaggagacttgaacgggtcaattcagagttcgtatgaccaatgtatggtcatccgaagtttaatgctgttatatggagatttgcggattattataattaggttttgcaactacaaaacatgtgtaagcgctagcctagaaaagacaggaaggctgcgccgttgacatgcagactccacatgtcaacctaaaggaccacggtagaccgagtacacagagacggtccacgggtcgacggaagcggaccccgtgtgccaaccgaggcgagtggccgacaagcagactccactagacaccacgcgggctgcacacatggaaacaacgcggctaccgagcggctcactaacacgatcaccacacgcacacacgaacgactacctacaccggtacaagggtaccggggtcgacaaacgcacgacgggtacggggcgacaccgaaaggacgaggacgggagcagcgagaagggggaccttaccaccacgcgacgaggcgtgggaacgacaacgacgaacgagcgcggcggagacggctcggggacgacggaggcaaacggcgagggaatgacttcggcggtgatccttgcacgaaggcgagacgtggccggcgcaacgcttgacgacgcggaggcgaggacgaagacgacgacggggctgcggcacttgacggagcgaggacgacaaacgagaacggcttgacggagggacgaacgccacgacgaccgggaacgacgagaggacgacaacgacgatgaccagggccggcgaggagacggcgatggcagccggcagcagctgcacagatgcgaggacggcgtggaacatgccgctgtgatgatgacgatggtggtggcgcagcgagacgatgtgccgggcgaccgacaggacgtcgacgtcgaggacgaacggtgacgacgacgacggacagcggaggggttcggatggagggaaggcgatgccgaggacgtcgtcgccggctcgccgctgcgatgccggaggagacggcgacgtcggccggcgcacgggaacggtggaaggggttgccgaaagaactccggcgaggcggagggcgagaccggagcgggcgacggcgttccggcgaaaccgagggtaggccggggtggagggcgacgcggcgatgtcgagggaggatggcgacgacgacagtcgctacaccggcgaggcggcacaggcggctggaggcggtggagtggtggcgacaccactggtcgtcgacgaggacgtggctccgataatttccccgcgaaacggaggcgacgccggggaagaggaggcggctacgaggccgctgggggtgacggcacgaccggacggcactccggcgaggagggagaggcggctggaggcgaccggcggcacgggagaaagaggaggacggcggggagaggtggtgaggccacgggatcgaacgcgggagggggctaaaactggagaacggatcgagggggttccattttatagggaaggagagggagctggccaagggagaggcggggaacggtggcgaaattcgtggccggcggccgtggaatgtggccggggttggcgcgggcgttcccgacgattggggtcacgaatcaagggggaaatatgggggaaagacagaggaatcaatagggattaaaaccccctaatcaattttggaaaccctggtttgaatcgcgtggattttggggaggtttggcgctagggtttgcacaggagagagagaggaaggaggccgggcgggaggaggacgacgactcggcgcgtgggacccacgcggtcgcgcgatcagcgcgcgtgagggggggtgggcggcttgggaggctggggcggctgggtggggtggcttgggccgggaggcggcccaggcgggaagggaggaaaagagagctgggccgaggggaaaggggaggcccaagagaaggagggggagaaggagagggagagaaagagagggaggaagagaggactttggccgcgggccgagagagagagagaggaaggactttgggccagacttggcccaaaggaggaaggaggattatttttaggtttttctttttaataaactttgataattgtttttgttgcttaataaatatttcctgtgctctgaaaattcaagtaaaatttgagggctcattttagaccaaggagaatttaacaaaaattctccgggccacattcgaatttttcttatacgtattttagtgtttgccaatttcttttcgaattttaattaattctattatttcttttagaaaatgatttttatttcgagatgaatttatcaggacgtgacaaatccaccccccttacaggaatctcgtccccgagattcgaggaggctagcaagaagataggttgggtggtcttctcttcttgtctgacttcttccgctccgtgttctataataaacttgcctaacaaaacttctccactctagactgcttggctcgatctcctgttccagatggaatcttctcttcacctgacttttccatggttgcacctctagctgacttcgactgggttgtggcacttgaagatgggacttcagttccagaacttctcataattcatatctttggcgtcaacctcatacaagttacccacttcatgttatgcgccgatatcagcttgtcattactaggataccatgcttaccatcgtgagaataccacgcttggcgtttccttccagcttaccaccctatgctttagactatgatatcccgcttactaagaataccatgattgacaacttgccacaaactgtctcatattagctttcctggtctccggtgctagatatttcctctattcaatgcgagggtcgataattttgcctttgaattatgtttcccaagggaaccaacttatcccacttgacatgctttgacgtcttcccaaatgactttactgctgaacttattattgtctgatcgttatcctgccaaatctgaagcttcgttgttggatgtgattttaatctgacctctgtagattttccttgaacatatcacttgtttcataactgggaatggctctcatgaacaagcaactcagattcactttctttacattcggtttactttccagtattctcttcgtgttgtcatcatttagcattcaacgtattcctttacaccttcagccttgatgtgttctttcccgatggatcgattgctaggaaagtgcgttgaacgatactagtgcaggtgcttttattctagcagcatctgatgcagagcccaaggttgaaccgagctttagattccaactgtgcgggttttcttgttgacttcttggtcatgtcacgaaagtttccatccttgtcctcatagaatcacttctacctgtggtcatctcgcttactcgcgaattcatctgctttgatgacagggtggctattgtagggtcaattgctatcgggagtcttcctcgagtgacacaaatcatggttctcgttatcctttatcaatcacctttcgacctacttcttttccctgtaaccaaacatcttttccgatctcttccattaatcacctttcgacctttctcaaccaggtactcttcactccgggtgttgaggatgcttctggggcaatgaggtccttgggcatgctgtctttcagagaaactttgaagtagtttgtcaaaagctagactgacgattgttgcctttgatccgaagaagacacgtctgaaactcttagtccaaacaaatgtctctttggttgatcagttgattttcttttctatctacaactaggttatttgattcataatagagtaggagctcacggaaatgagactctaggtctccttaatcaacaacaaaacgtacacaactcacagcacttgcaatcttaacatggatccttcataaacttgtcaaactcatgttttacctcttgttgaagatcgaaaccgatgcaactcaacccgaaagcgtcgtcaagcgttgcgccggcagcatgtcacgactcaagttctccctgagcatttggttcataatgtgcagccagatcaatcggtgataccccaagttattccttagcatttggtgcgcaacatacagccaaactttcagaattatcaggggggcaatttgaattaccaatatcagccttcgtcgcaacaggttcagtatcagcaaggaggatcagctcagcctcagtttgctcctcagtacaatcaatttgagcctatacctcaacaagcacaaggggtgcctcagcagagaccttgggccgatatgtttgcagatgtgatgagagagcagtttgggcttaagccaaaggatactcgaaacttgtatcggcatccgtaccctgagtggttcgagacggttcaattgcctaaccgatacaaagttccagatttttcaaaattctcaaggcaagacagtgtttcaacctatgaacgtgtcagccgattcttagctcagtgtggtgaggcatcggctgttgacgctttgagggtcaggttgtttcctttgtctttatccggattggcttttactaggttttcttctttgccatacaattcaattaacagttgggccgatttggagaacaatttcatagttacttctgtagtggggttcatgagatgaaattgtccgatctaagagcaattagacaaaggcatgatgaacctgtgcaagattatattcagagaatcagagagatgaggaatatgtgctacagtttgagtctgactgatgcccagttagctgatttggcttttcagggtttgatagctccaatcaaggagaaattctagtctcaggagtttgatagtctatcacatcttgcatagaaggtaaccctacatgaataaaggtttgcagaagccaagaagaacttcaaaaagatcaatcatgtctatccttacatgtatggatccgatgatgatgatgatgattccgaggtagcaacagccgagtgggtcagaagcaagaaggttataccatgccaatgggtaaatagttctggaaaagaggagaggtatgacttttgacatcaccaaggctgataagattttcgatctgttacttcgggagaagcagattcaacttcttgctggtcacacaatcccatcggctgaggaattgggcaagagaaggtattgcaagtggcataactctgggtctcattctactaatgattgcaaaatattcagatagcagattcaggcagctattgagggaggaaaaatcaagtttgatgattccaagaagccgatgaaggtcaatggcaatccttttcctgtcaatatggtacatacagctggccgaacagccgatggaggaaaaactcgaggttttcagatgaattcggctagaattattaataagtatcagaggaagtatgataagcagcaacaggagaggtattatgtaacataccgaaaattaaccgttttctaattgtgcatcatgccgagtcttatatttttaatagcatcctaaacctaggaaaatataattagagggaccttctaaaactaacttgcataaaatccttctctggtattttatttcttttgtatttttcatttaaaaatatatttggttaaattgaggtatttcttgatttggttttaatttaaaaccttctttcgactaaaactcttttattcaaatttagtttgaaaaacccctttctatttttatggattatggtccaagaaaccttcccaattttgccattgaacctaaaccaaagtaattccaattttagtgggattatttgttagcccatcctttgatcttaaacatatcctttgattcttgatccaaattcttccttttgatctagctgctgatctaattcctgtggcttgatttccttctcggcacaagaataatattactacaaacattgtgaataattgttcttgtgctaagataatagattatatccttgtcatccaaatctcctattagcctcaaacaattctttgaaacccatgccatatattttgaggctaaaaatcctatctatcttcctccatttattttctctccctctcatttgagtgcatcaaataaattccgttatattctatctctcaaaatattgcactcaaactagaaaatatctcttttggaaattatatccaaatataatttcctttcaaaattccctattcaaattccttccaaattctaatctcatccaatttctatcatacaaacaacctacaaaatttagaattgatttttaaatttaattgggctaaaatccctttgtctcttccttttggcccatcttcctcttcggcccagcccagccgagccgccccttcctcctcccgtgggcgcttccaggcgccgccatgcgccgctactgccgccgtgcacaactcagctaccgccgctgccatattgccttcgatgccaagcaatcgccgccaacgtcctgccgtcgccgctaaggcatcgccgccgacgtcatctgccacctcacgccgccgacgtcagcctctggagcaaaccgacatctccaaccaatcacaagccacagccggcgccgtcgccttccttctccacgtcgccgccaccaagaccaactctatcttctcctctacaaccgaccttcacaaccgacgtccgacgcctataaatagaaggccagccctccccttttctccacatatgagccgagctcctcgagctctctctctctctcctgttatgtctagccaccaccggccactgtcgatctccctcaccggagtgtttctggccaatcccttgcgccatcaggtttgcctcgacgaggcaaactcattttcctagtttccccttcctttcctcttccgaaaccaaccatcacagccacctcctcttgttgccggagcaagctcttgcctgcgccgttccagcctcctctctcacttcctctgccgactgtcaccctccccgggtgcgcgtcgctcgggaacatgtttttccgccaacgtcgcagcctctcaaccaccggagtatcgatgcccctcctctcccttctctctgtttgttcgtggagaaagagagaagaagcaggaagaaggaagaagaaggaagaagaaagagagaagaaaaagaaaaaggacagctactgacaggtgggcccctacagtactatttcacattttctagatttgattcaaaatccaaactttagaagcccatatctcctaaaccgtagatccgattccagtcaaacttggacctaaattcatctaaattcaaaccctaccttttgataccaaatttgctatttaaatattttatttgaatttccttgatttatttaaatgccatttgcctttcaaatatctcctgttactccaaaatacccgttagccagtaaaaagccgccgattggaactttacgccttctatggagacgttcgtggtctattggccccgacatggaaccattggttgtaaagcccggcataaaccaaacccaaggtcgaagtgctgctcctggcaccccacgccttgatgcatatagcggtcggagcttcactattctatcgacctccacagcacgccacacagttagctctcgggctctgtgtgatcctagccgctccgccgccacccacggttgtcggagtaacacttccgccccactaaattaacctgcacctacctcatatccctctagccgttatactgtccgtcaacaccgactagagaagacaccaaatctagtcgttatactattcaacactagcatcgactagtacacaaccaaaccctagctgacaccttactagttaaatcccagccgtcatccaaattccacacccaccagtatcacctatccaccatactctcagccacctactctccaactacctagaacctatacataaaatatagagcctagccgatatgttgtcctatccccaattggcttaaatataagcgacatttgttgcttgatcccctttctatcttagcctccaaccctttagaacccatacatgaaatattagccaataatccctatatcttacaaaggagatatttataccccaaacccagcctttcttgcccttcatcgctttcttgttattttgtgacttttattgaatttggttctttctcttctttagtagagtctattttggatggcagcctgtgatatttcgaggatcgaataatcaggttgcctatcttggatttatttgcgttggagcaaggcaagttattattcctcccctttgagcataataatcctatattctatatctccagtatcttgtgcattagccttacatgattttgaatgcataacttgaacatatagcaaaccagatatatgctagattttgcttagccatgcctagttagattgcataaaatataataaacttagattggaacaatacggaagaaatggttgatttccgggtggctagtactgttccaaccgacataaaattgccaagtacatgtgaagaacatacgagtacgaccgcaattctcgtatgggcatagacctagctgattaagttatctagcaaaggtggtacctctgtattgtggttcttcttaagtcctcgtgcaggaggcaaacttacgccgagcagggcgattgtaatatttaccgaggcgcaggtaaatatttgagataaattgtgatatcacaaactgtgtgtattgtgaaaaccttgttgagatgacgggggtctctcaactagttctctccaaaaacctcgggaacgccagaactcctttcgctgctgataacgttacgtttagagcgtatgaggactacagttcatggaacaggtaccactaatgttagtaactgaaaagctttgccatgactaagctgatgaatattagcatgtcatggattgcgggtaaagcgtacatttactacagtaaagtataaatgaatctattcgaatagccgtgctcacagatttgagcattgggactcatatggtatttggttagaaacttaattccaaactttattaaatactgttgcatttaaaacattctaggctttcttcctctatattctttgctttctgccagtaaacctagatctactcagatattaccatttcatgcattcattattgaatataatagtttgctgagtacgttgtactcacccttgcttcaacccctttttcagagtccaattgatgttcttaccgaagctgggagttcaatcatataagttagtctcattctaacttagttctcaagtatagattagataaatggtttaagtctataataaaacattagtgtttaaatccttctatagcctctgctggactagttagccacaatcttgtaaattcccctattattttatgtaataacatctcctttgaaaccttgaccaaatgtatgcaatgaagaaccagattgtttaacctgtatcaatttactgatccagggcttgatacagtctaaacatgtcggtttccgaatcattagttttgggacccgacatattatgaagaagatgatagcggttttgaccctcattgggactgagtttttcagattttgctggaatgaagttatgaggctgccatctattgaagattgccctgggtgtagtgatattacagaaagttcaagccgatcttacaattgaagcaatcggctgtggcaaacgcgggttcctattcattaaaggttgggcccagtaaaccaagatcgtgaccaagaggacgatgaggataggaaaactcaatggtatccttctggtatttttacaaaaaatcagaagagaagggttcaaaggttgaggaacatggggcgctttcggaggttgagcaagaaatcaaccatcggctgaagaaagcaaagccgaagcaggagtggcgtgttaagaatcaagctcccacagccgatgaggtgaaaagattggctaaggggaagagtgttgtgactgcatcggttaacatggttttcacgttacctgcggaattcggagctaaacaagccgatgttgatgaagttgaggaagcttcagctaggttggttttgtcaccagagcaaacagtttttgagaagccggaagggacagagaatcggcatcttaagccattgtacattaacggttatgtcaatgggaagccgatgtccaagatgatggttgatggtggggctgctgtgaatttgatgccatatgctacattttggaagctaggcagaaatgctgaagatctcatcaagatgaacatggttctcaaggattttggtagcaatccattagaaataaaaggagttttgaatgtggaactgacagtcagcagcaaaaccgtccctacaacattttttgtcatcgatgggaagggttcctacagcttgctgcttggaagggattggattcatgctaattgttgtattccttcgaccatgcatcaatgcttgattcaatggcaaggcaaaaagattgagattgtgccatccgacaggtcagttaacgttgccagtgccgatttagctctttgggagatggacgatattgattgcttatctggaaaagtttgggatggagatattctaagagtgtccgattgtgatatacagccaattgaagatggagagcccaagttattattttgagggcgtcgtggagggttcaaacgtttacaccaaggacacagtagatgatctcgataacaagcaaggacaggatttcatgtcggccgatgatttggaagaaattgatattggaccaggtgatagaccaaggccgacattcatcagtaagaacttatctccagaatttagaaccaagttgatagagctcttaaaagaatacaaagattgctttgcttgggagtattacgagatgctaggactcagccgatcaattgttgaacatcggctacttatcaaaccgggtgttagactgtaccagcagccaccgagaagatgcaaagccgatatgctcgaacctgttaaggctgagattaaacgattgtatgatgctggttttattcgtccttgtcgatatgtcgagtgggtttccagcatagttccagttatcaagaacggcaaagtcagggtgttcattgatttctgagacttgaacaaagctaccccaaaggatgagtatccaatgccagtagccgaccagctggtttatgctacttcagggcacaagatattgagttttatggatggtaatgcagggtacaatcagaactttatgtccgaagaagatatccataagactgctttcaggtgtcctggtgcaatcggcttgtttgagtgggttgtgatgacttttggcttgaaaagtgccggagctacatatcaaagggccatgaactacatttaccatgatttaatcggctggttggttgaagtctatattgatgatgtggttgttaagtccaaggaaattgcggatcatatagccgatttaaggaaggtttttgagagaactaagaagtacggcctgaagatgaatccgacaaagtgtgcttttggtctatcggcctggccaatatttaggatttcttgttcatgaaagtgggattgagataactcagaggagtgttaatgcgatcaagaagattcaacctccggaagacaagacagaattacaggagatgatcggcaagataaattttgttagaaggtttatctctaacttatctgggagattggagccttacactgttgttgaggttgaaagccgatcaaaaatttacttggggggcagagcagcagaaagctttggatagtattaaagaatatcttagctctcctccagttttgattcctccacaaaagggaataccttttagattatatctatcggccggagagaagtcaatcggctcggtcttgattcaggagcttgaaggaaaagaaagagttgtattctatttaagtcgccggctcttggatgcagaaacaagatattctcctgtggagaagatgtgcttgtgcttatatttttcttatatgaggctaaggcattatctattgtccaatgaatgcaccgtaatatgcaaagccgatgtggttaagtacatgttatcggctccgattttgaaaggaaggattggaaagtggatattttccttgacggaatttgatcttcggtatgatctaccgaagccgatcaaggggcagactatagtcgatttattgttgatcatcgtgatgattcaaaaccgctcggtgagattgtgccttggactttgttttcgatggatctgtgtgcactcatgggtgtggtatcggcttggtacattttccccctcgggggcagttttgagttttctnacactattaaccctnatgcgaccacaatcaggcntgagtatgaaggcggttctcaaaggggttgcaattactcaaggaagttgaagccgatgctgttgagattatgggtgattccttgctggtgattagccaattggcgggagaatacgagtgcaaaaatgatacattaatggtttacaatgagaagtgccgagagttgatgaacgaatttcggctggtgactttgaagcatgtatctcgagaacagaatgttgaagctaatgatttggcccaaggggcatcgggatataagccgatgatgaaggatgtcaaagtagaagttgccacattaacagccgatgattggaggtatgatgtgcatcattatttgcataatccatctcgatcagcttctcggaaattgcgttataaggctttgaagtgtaccttgttggatgattagctttattatcgaacgattgatggggtgcttaaatgtttgagtaacgaacaagccaaggttgcaatcggcgagctgcatgaaggaatttgtggaactcatcaaaaggctcataagatgaagtggttgcttcggcgtgcaggatatttttggccgacagtgttggaggattgtttcaaatattacaaaggatgtcaagattgtcaaaagtttggagcaatttagagagcgccagcatcggctatgaatcctatcatcaaaccatggccattcagaggttggggaattgatatgatcggtatgattaatccaccatcgagcaaaggacacatgtttatattggtggcgaccgattacttcaccaaatgggtagaggcgatttctttgaagaaagttgattctgaggatgctatacaatttgttcaagaacatattatttatcgattttgtattcctcaaaccattacaaccgatcagggttcgatctttgtgtccgatgagtttgttcagtttgccgatagcattggtatcaagttgttgaattcttcactatattatgcacaagctaattggcaggccgaggcatctaacaagagtttgatcaaattgattaagagaaagatttccgattatcctcggcaatggcatactcgattggccgaagcattgtggtcctatcggatggcttgtcacggttcgatccaagttcctccttataaacttgttgatggacatgaggctattttaccatgggaagttagaatcggctcacgaagaatggagttgcaaaatgagttaacagccgatgagtattataatctcatggccgatgaaaggcaagatttagttcaatctagactaagagcccttgcgaaggttaccaaggataaggaacgtatcgctcgccattacaacaagaaagtggtgcccaagtctttttcggaaggtgaacttgtgtggaaattgattttgccgataggaactcgagataacaaattcggcaagtggtcaccaaattgggaagggccgttccaaatcgataaggttgtgtctaagggagcttatatgttgcaagggcttgatggagaggtttatggacgagcgctaaatggcaaatacttgaagaaatattacccaagcgtttgggttaatgcatgatcggctggtgttgccgatacatgatagacgatgtgtttacatcaccttgagatggccgatatgattatatcgcccttagttgttttcatattgtaatcggttgtgtcttgccgatatacaatggccgatatagtaatatcgcccttagcagttttattatcataatcggctatgttttgccgatgtatgacggccgatatgattgtatcgcccttattggatttctgtgtgattaacataatcggttgtgtccttagtccaagttataattttatcaatgccttcgtcattgcaaaattaggggggcacatatatacaaaattgaggaaaacagagaaaatttttgagcaaattcagaagttatattaatcggcacaaaggattatcaagacaagttaaataaaagtaccagagtatcttagctgtttacaaaaatttcctaaggtctattacacagaaaatcactgggacagatagcgctggatagccgatatagctctttgcctaatttgttgtacttcttcaatagcttgggcatcttgagtatcggttctagggatgacttttaaggacttggtcatatcagcgacattcttaatagccgatttcatccttgtcttctgttcttcaacagcttgcgggagatcggctagctttttgtgttctagatccagttcggcgttgcattcttgaagttgtgccaagagctcaatcttacgagcttcaagctgtaaaatcaaaggtgtttttggttattattctatgatgaacaattgggcattggagattattggttttgttatttggaatttattcacgaagtggttttggagatgattggatttcacaggtgaatctataggttatcattttatgtgtccggtcagaccaggcaggtgttgccggtcagaccggcggtgatcgagcggtcgaaccggccagcccgcggtatgaccggccgacgctgtgtcggtgtcggtttcgggttgtttatttggatatccgtgattatttcatgattatggcttctagatggatactatacgtatgtaatactattgtttgctgctaatgagtcaagttggagatagcttggtctcggaatatggtttctttgtttgctccacgtgtaggtgacttgatgtctcgggagagtatttgcggtgatggaccgggagtcggcttggggataagacgacgtccgtggtggtcagagatcatgcgggatactaaggctagagttgatgcacatggttgatggagattccatatggcatacgatggagttattgtgtgcgtatgggatgtggagtcgaatttggaaggagtccaaatttggtacgattggtcctgtaaagtttctttcttgaactagagggtttcctaaggtgttacgnactcntagtatgagtttggttcgtggctttgggctgcctacctcatgtataaatagagggggagcgtgaggcttcccggtatcgctttagagagcaattgagttgagttttgaattagggtttcgagtttagtcgaaatttttgtaaggagtgttgttggtgcnctttataaccacagagagaagaaataaagttgtcatccactttaagagttcttcgatttgtgtttcaccgagtttcggtggtccaaccggcgacataccgacggttagaccagtggcatcgcggcggtccgattggcggaaggacggcggtcagatcggcggcggcgacaggcgcggcaggcgacatcgatggtcagaccgggtgatctataccggtcagaccgacggcatccacttggtcagaccggtagatcaatctcggtcagaccgatctccatcgaattcgagggtaacttttattttcgctaaaagttttcggtttttgggtataccaaccattcactcccctcttgttggcttagttcttgctatttgatcctacaagtggtatcagagccaggctaggttaacatctctggcccgatggacacgtgtgaaggcctgatggaccttgggtgcctgcggggcccgcatacctgatggaccgtgggccggtggggcccggatacggtgaaggggcggtgaagggctaagggacactaatgtgtgaagcggagattgttgaatagtcccacattggttgtggaagggcaaagaacctaagatataagtgggggagcccctcacctcaatggctagcttttggggtgggaaaggccctttacgatcctacaattggtatcagagccatgttttcttctttggatttttatcgatctagagtttttgccatggctactcccgctcgtttttcaactaagcctcatgttttcgatggaacggatttttctcattggtgtagtaggatgcaatcttacatcatggctgaagattatgatatttggagaaaagtttctcatgcttatgtgattcctgaagctattaatactgctgctgaaaaaactgcttttgaacaaaattgcaaagctcacaacattcttttgagtggtatttctcgttcggattatgatcgtgttgctcatcttcaaactgctaatgagatttgggttgctttaagtaattttcatcaaggaacaaataacattaaagagcttcgtcgagatgtttttaaaaaggagtacattaaatttgagatgaaacctggagaagctttggatgactatctttctaggtttaacaaaattttgagtgatcttagatctgttgattcttcttatgatgctaattatccacaatctgagatttctcgtcactttttgaatggtctcgatatgtctatttgggagatgaaagttacatctattcaggagtctgttaatatgtctactttgactttggattcactttacaccaaattgaaaacaaatgagatgaatgttctttctcgaaaagctgattctaagtctagtgctttggtttcttctacttcttcttctgttgttgatgcttcttcatctatgccttcttttcttgctgcttttaatgccacatccgatgatcaactcaaacaaatcgaggaggaggatttggctttggtcgctaaccgtattgctcgagctatgataatgctaggaactgaaaagaggtggccaatcggtgcgtgaatgtggttcaattgatcatcttcgttcgcattgtcctaagcttgggagaggcaaaagagaagacaaagatggtgagaagacaagcaacaacaagccctacaacaacaggtcgaagagttcatcccaagggaagaagatggagaatctcaggaaggcttttcaacaagtttgtgctgctttcgagccactaagtgatgtagatggtgaaagtggagatgatgataagaggaagaacatctccgatgtttgcttcatggcgcgtggtgaatctgncatagggttttatcaagatgggatcaaccggccgtg

SEQ ID NO: 15493 - DNA, 1058 bp, Oryza sativa
gcatgggcccgcaccacaatcctgtggcgggaaggtttacaaaaaacccaatagatctcttgaaagtacccggaaaattaaacccggcaaggaacccagcttttctttaagagttggaaaggcttcctggcatgcggggttccacacaatattctcttctttcttcaaccaattgtttcctggttagaacaatttttgaaaaagttctcgattaactccggtaagtatcttgcaaaacataagaacttccgacctggagtgactgtcttgggttctttcaatcaagtgccgcgggtcactgttcgggggtccacggcacttccttaagcagatatcacgtgtcataagaatttgacttcgaacaccaagaattcacacttgctaagtttggcatacaattgatgttcccgcacttttcccaacaccagacgaagatggtgctgatggtcttcctcggattgtgagtatatcagaatgtcatcaatgaaaaccaccacaaacttatccaagtattccatgaacactttgttcattaagttcatgaagaaggcaggtgcattggttaaaccgaacgacatcactgtgaattcatacagtccgtatcgcgtggtgaatgcggtcttaggaatgtcttcttcacgaatacgtaattggtgatatccggaacgaagatcaatcttggagaatacagtggcacctttaagctgatcgaacatatcatcgatacggggaagagggtacttgtttttgatggtgacttcattgagagctctgtagtcaacgcacatcctcttcatcttgtctttcttctccacaaaaatcacaggagcaccccagggggaactactcgaacgtatataccccttttatttcaactcttccaactgtttcttgacttcggccagttcatttgctgccatacggtagggtcgcttgtacaaaggagtggttcctggagcaagatctatccggaactcaatctctcgcttgggcggcataccgggtagttcttccggaaacacgtctccgaactctctgacgatggggatttctgacag

SEQ ID NO: 15494 - DNA, 1890 bp, Oryza sativa
  unsure (1)..(1890): unsure at all n locations
tttttaacacgaagggtgtaaatgtttttttatctatggaaggaagccccgccccccaaagccaaccaaacacggcgaagttgaggggggaccacgggcatttgcggaaggcccaatttagacacaaaggcttccatcctttaggaactcttttctgagtttgggaaaaattgagcagcttgagtacaccccggtcttcaacaagacacaccnccaattgcagaattaatgcaaggaagtacaaggagtttatatataagggttagggttgcagtaacagcatttaaaaatattttagtggcccaaagctattttgtaaacacgattctagaactattcaatattatttatcaaggcggtgaacccacacgaacctgctttaacccagggcntacgatgattcagaccgaactggcaaccggacctgggtcccagctcgtcccaagccaacccaggccaaccattccacattttacttgttaagcaggttttaagaattaaaacactaacttgggtacattgctcggcttgcccataaccgagggcgcggctattcgaatagattatactctgatcagaggtgtacatctttacccacaagacacatcttcctcacgtgtaaccacgtgccacataccaccacggtatacagacggaagacgtgacatagtttccaacccatcctagccatagacaagagtaccgacccaatcccacctacggccggaactcccgggacaggtaggcaggactgagcccctagcagcaggacaccggccctgtgccatgacatctcgactaccgaaccgcagcccgtgtagccttcatttgtcctagagatgtccatcgacccccgacttcgtccatctctaatccgtgtacttttgtttataaccagactgagccacaaactaagccttacccactagacatgtggaagtacggtagtgctttgcaacagaggcccgaagaccggtccttatatggccgaggtgctactatcaaaaccatgcacgccgagcccagcctaaaaccattttggggattttgaaaagaaggagcggtgtgaagccaattccacaataaccaaaccattccaaagtgtccaggtgatatgaatattcccaaagtctagagttataaaaccacctaatgttacctaattaaagcgaagcatctaccttaaatcatactagtggtaccattagtagagtgtccactagttggggttttgttggttctagggtgaacaaggtaataataacaataacaataataataaggtcataacaaaggtaaataggcatggctaaataaaacagtgataacgcggaatttaaataaagcgataatgcaataagttaaatcaacataattttacaaactgggattcaatatgttcaaagatgatgtgacttgccttgctcgctttcccaaacgccggcttcaacttccacgaagagcggatcttccgaagctgcagcgtctacacgaccaacggaaaagaaaaggcttttactctactaaactccatataacaaaccgaaataaagcacaaaaatgggttcttggcttcttaaggaaaaattagagacttgaacggtccaattctgagttcaaatggccaagttatggtcatttgaagtttatatgctctttaaatggatatttgtgaatttcttcatttaaattttaatttaaaatcggatttattgcgtcagccgggagagaggagcgcgcggaccgggtccatgggagtggggcccatgcggcagcctcacggtcgacggtggaccgggtgcacgcggcttacgccggtcggcgccgtgggtcccacgcatcagccgcacccgagggcgcatggatcactcaaagacgtcaatnggcaat

SEQ ID NO: 15495 - DNA, 1456 bp, Oryza sativa
cgcgcggaacaaagagaggctaccccaaaaggaaaaggttccgggcatcaaaggcggtggaacggaatttgggagcaaggagggaaaaaaaaaataaagcggcaaagttttatttccaacgggaaaagaaaatcggcaatgtgcggaacaggttgaaggtaggcaccggaaaggttttaaaaatttttggaagggaaggaaaaaggaatccccttaatttctatagggccggcaggaattataatactttgttgtcataacccctccaggggtggttatgaagcagagggtttcttaagcttttctatcccaaactgattcctccccacgaatggcacaaatataaacgagtgggaagctccagaagtcgaacaaaaatggtagcaggaatgaaatgaatgaggaacgtaccaccgatgacgtctggagttgtcagcacgtcctcggccgtcacatggttcacccatccccgaatgacatccttcccaccgttgttggagcggggaggcgcttggccttgctgacgcctcggctttgggcatttatccgcaaagtgcccgggctcgaagcagttgaagcacagatgctgcggacctgaagcgtccctgcggccttggccaggctgcacagttggcgtaggaggacgaggcgcacgagtcccttgctgactctgctgttgctgcggttgtgggacgcgcaccacgaattgaggtcgaggcgcggagcgaggttgctgctgttattgttgctgctgcgaggaggatccccctggatagggattggtgtagcggaccctttggttagcaccctgttggttgcggcaattcgccaagcggcgcttgtgcgactccagttccttgtgcttggcttccaagcggatgctcttgtccaccagacgttggaaatccggatagtccccggagactagacggacggacagctcagggtccattcttgccaagtacttctcttgcttctcctcatcttcccgcacatcctccggggcgtaacgggccaggttgttgactcatgcaaatactccatcacggagcggttgccttgcttcaactctcagaattctcttttcttaagggccacgactccggcgggcacatgggttctcccgaaagggcggtgaaacgggcccaagtaataggttgcccctcttggctgcgtagcctggaaatggtcccaccatagagatgcgggcccctgcagctggtgggcggcgaagatgactttctcctcatcgctgcactgcacagtgtctagctttttccccacggcatgcaaccaatccaacgcatcctggggttgttggagctaaaaaaagaagtggggcgattccgaggaactccgccaggtatatgttgtggggggtgtgtggaacaataagttttgcggattttggattggggagggaagcatcattattttgccctgttggcaaggattg

SEQ ID NO: 15496 - DNA, 1164 bp, Oryza sativa
tttgaacctgatttgcatgtatgggaaagcgcgtggcgacggtacagaaagacggtcgaagagtggaatttacagctacctcagtcaccgatctcaaaaagtatattgctgaccttgaatctcaggttggtaccacatcacgacgccaggggcctgcaaggttttacgtatgaaaataccatctttagtgggtcctgacgggaaaacatccctccgggaatacgcggggtatcatggcggcggcggagggtttggtggtcagttgcggggctggaatccaccaagcgaaagtgctgatgcggctcttctgcctaacttctcgcgcggaaatgcccgtgctgacgatctggtcagaaataatggctatgcggcaaacgccgtgcagctccaccaggaccacatcgtcgggtcatttttcagactcagctatcgaccgagctggcgctatcttggcatcaatgaggaggattcacgcgcattttcgcgggatgtagaagccgcctggaacgagtatgccgaggacgacttttgcgggattgatgccgagcgtaagcgaacgtttacgatgatgatccgagaaggtgtggccatgcacgcgtttaacggtgaattatgcacgcaggcgacctgggacagcgattcaacgcgtcttttccgtactcagttcaaaatggtcagtccgaagcgcgtcagcaatccgaataatatcggtgatacccggaactgtcgcgccggtgtgaaaataaatgatagcggtgctgcgctgggatattacgtcagcgacgatggttatcccggctggatggcgcagaactggacctacattcctcgcgaactaccccgcggtcgaccttcatttatccatgtattcgaaccgatggaggatggacagacccgtggggccaatgcgttttacagcgtgatggagcagatgaaaatgctcgataccctgcaaaatacccagctcacagcgcgattatgaagcttggttgtcgttcccaatcggaggaactggttaccataccgggatggacttttatttccggccggataataagagacacggagcaaattatcgggttggttggggaaagaggcctatatttaaattgccttggttcctggtggggcaaagttctccaactcgtttcgggggtatctctt

SEQ ID NO: 15497 - DNA, 1788 bp, Oryza sativa
gcattatcagatggctgctcaatattccttttacccctatgttctttgttatctttccaggctatgtttgaaattgctgtaggatgaccatctttgtccagtttggcatcacctttgtagtcagcatgtatccgtctgtcggctcttatgtcattgtcatctgctctattgtccgtctttacatcagtctcaactttattgctcggaaattcaaccctgggatcactgtagacatctcgagtgtcagcctttgcctcccgaacatctaccttagtgtcccatggatctttattttgctttgattctaatctgccatcagatgagattgagtggtccacaaagttggaggggccaataggcatcctatgtgccagagagggcctcttatcatcccggggctcaatacgttgaactttggcaaatctcccatcatgttcaaacgaaccatggaaatcactgctgcctggttgaataattttcccagaagggcttgagtacaagctgctgtcatccaacggccgttttgccggtgtggagtgactaccctcctcatgcgacctcttgggtgcaccactcattttccctcaaaaatgtcaacagtccttcaatatgaaccaagaaacacaaatacaaaaggatatagcccaatgcctttgacacaatgcactgccaaaaaaaaatgaaaatttaggtcagaacacatcagttactttcttttttccacataaccagattgtgtaatttagagtaagacatgatgtataaggtatttcaccaacaacaagaacatttaagggtgcttatgggcacatctaaaataaccccctacaacctcatgtgcagtaataaaaaatctggaacaatttagtagtaaagagcatgttggcatctaacaatccacaaaacgtcaatctaaattcaatccaaacaacaagaaacaaaaaggaaggtgttctgctaaaaagaatctcctttgtttcttgacatcttgatgcagtttggatatgaaaatttgtggcgtagaagatgccaacatgccctatcttactgttctttttcacataatctatcatcactatttgcatggtttttaagggctggaagcacccttggggagtaaccgatacaccgcattccatattgacctcagtactctgttcctagttcaccaaacaagattcagctgtatattgcaccaagctccctgttatcgactaagctactgttatactgtagtccatcagaatgagggaaaatcttcaagtttgtaaatgttcaattctacaggaagataagtcatgaaaaaatgatttgaatgtattctcaaacaaattacgtgcagccccctcgtcaatttccatgccagcccagcaccctcctctctcagctacatcatgtcttgccatttttgcggtgtccagccggactggtacaacaggaacagggtggaatcggcacccaacagaattaaagatcatttctttacccccaatttcattttttttatcaagagaatggcgtagctttcactagttcaaacgaaggagtggcggatctaacatgggacatgggggttcacttcagttgaacccccaaacccaaacctcttttttttaaaaaaaaaaaaagaaaaaccaaacctttttgggaaccatcaaactgttattagtgttaagggttagggaaaatttctagaacagaagcggtttgacgcaaattcgagaaaaaaaagtgcgtgggtaaagagagagatgggaaagaggatgtggttcctcaccaggatggatg

SEQ ID NO: 15498 - DNA, 4533 bp, Oryza sativa
  unsure (1)..(4533): unsure at all n locations
tatgtgcnngaatagaatctctctgtgtgtcagccgcggactcgccggtggtgagcggcgggtgaaaacccagctcggccttagccggaccgacaacgatggttcattccccctcctgagggcgttatcgtgttgtctcatcccttaagagtggttgccgggtgaaagcccagtcttgggctcttttgagcccccgacggacggcggcggcagttttccatcgcttctctccttggagacgtcgtttagacatccccttgctgaaaccactcaaacgattggtgcaagcacactctagatagagttaggctttgtgttggttgtgggcgttttttgggcaatctcgtctatgttcctttgttggtctagcggcggtcggtcacgctttgcgggggccggtccggtactagccttctcctagacctgtgtgttggcgttgtcggtgtatgggttgggggatatttttttttcttttttcctggtacgaccttccagggtcttgtaatttttttcctgctctatcagtaaaacttcgcaccgtctcatgcgagtccgtcaaaaaaaagtatacaaggcattggtatagtataatggactaagcatgatgaagttatattatagttaattgaaagtttagaaaacctatgaaattttttaagattgtcggagatatgggcccgggggtatgcgaagtgaggggaatctacattcccatcctgccacgtgtccctacagcctggtcctacccccgcattccacgagtcgcaggagcggccggaggggggaggggggcctcggggtgccgcgtcatgcccctcgggcccttgcaccgctttgccccaaggccctcgcccagccgccatttggcggggggagcaagtgaggacgaggcccaggctgaacctccttttaagcgcgcagcgccccaactgctccctgtcgaatttaatgcagtggggcagacgtgcggcgtgcccgactggcgcgtgatggtcaagaatgaccggtctgtgaccggcctgacgccggtcacgtctgactagacagacaaccgtgctcccacgtcgcatctgcctccggcggagtggaggtaggtatgacccgtcccatcggagggtcattcggagggcggccaccacaagtcttcacccattaatgagggaatgacaggactgtcccccatgttaggcgagagacggcgctgggccccgctcaaggataagctgtggtttagctttcaagcaaaggcacaggtcgagttccggtcaaggtagggtgggtccccatccgagagaagagtaggtagaggcggtgcatgtggtatcccttgaggtataaaaggaggaccttgctcatcgagaaaggggatgactctcggaaaacctgagctcgaggaggagggaactaagtgtgttctccggagtttaggaacccttgtaactctcagtctaaatcccatacacaggagtagggtattatgcttcatagcggcccgaacctgtataatttggttgtgtgcgagctagctaggagccttggggacggatacgtgatttctagaggcaagctttttcccctggccgaactcactaaagggggggtctcacgatctcccgctagagaggatcactcctcgacagctggcgcgctaggtagggggaagtcgcgcgctttaaagagaagtcgttttcttctgccccaagtttccctcggccctcgacgatgatggtcgaggtcctggaggaggaggcggtggtgtacacccctactccgcctgggagtgaggatgctagcgagagccgcggccctcgtcaccgccgccgcaactctccaactcctccccgccgcgatccctcgcggagggaggaccccacccagtcgggtggttcggccctctccccgcccccgggcggagggaggccacgacgcgtcagggcacggcgccgcctcacttacggtgacggcggctcgcctcgaggcgcacttcaggcagcgggtgcccttctggggcatccccccgtgaactcggagccggagacccctgtccagcgctggttggacgacgtggccaacttggtcaccactgcccaacgggagctggccgcgggcagccgacccgtcgtcaccggtacgtcgcgtacccccattaccctctcctcgtcagcgaggaagagggcctgtcgatcggccacggcctcaaggcggtccacggctccaacatcgtcggaggcctcgggaagccggaggcgtcacgatggcctctacggggagcaggacgctcgaatcaacatcgagcgacgccgggacgagcgtcgagctgctcgcatgggggaaggcgcctcctcatctggagtgctgcgttcctcctcacgaggcggccctcctcccacgctcacccctagagggactagttgtagggccttcgtggcgagtctccggaatgtttggtggcccccgaagtttcgccccaacctcacggagaagtatgatggcagcatcaatccctccgagttcctccagatctacaccacgattatcgtggcagtagggggcgacgaccgggtcatggcgaattacttccccatggccctcaagggtcaggcgcggctggctgatgacctagccccccgactccatcaactcctgggttgtcccccggatggtcattcggagggcggccaccacaagtcttcacccattaatgagggaatgacaggattgtcccccgtgtcaggcgagggacggcgctgggccctgctcaaggacaagctgtggtttagcttccaggcgaaggcacgggtcgagttccggtcaaggtagggtgggtccccatccgagagaagagtaagtagaggcggtgcatgtggtatccccttgaggtataaaaggaggaccttgcccaccgagaaaggggacgactctcagaaaacctgagctcgaggaggagggaactaagagtgttctccggagtttaggaacccttgtaactctcagtctaaatcccatacacaggaatagggtattacgctttatagtggcccgaacctgtataatttggttgtgtgcgagctagctaggagccttagggacggatacgtgatttctagaggcgagctttttgccccggccgaactcacgaaaggggggtctcacgatctcccgctagagaggatcactcctcgacaaagatagtttatggaaaaagtatgaattaccccctgaagtatcgtggtcgaccaaatcaccccactaaactcgaaaccagacattgctcaccctgaactttcaataccggataaattaccccctcgaccgaatccagagtggttttgtcccatgtggcgtacacgtggcaatccagtcagcattttatttttttaaaaaattatggggcccacctatcatacctctcttctcctcttcctcttcctctctctcgggctcaaagcgtgcacggcgcagggacgggcggcggcgcgctggggcggacgggcagtcggcttgcgggggcgatgggtggcggcgtgctagggcggacgggcggtcggagcgcgggggccgacggtgggcaacgggcgatggcgtgctgaggcggacgggctggcgacgcgcggggagggcgcagcggacaacaggcggtgccaaggagggcgttggaggcgacgggctacggcgacaagtccatcatcccctcgagctccgcagctatggcgacgaggcgatgagtcctcggctcaggccggcaccgtcgaggtcatccttccaggcagaggtggcagtgctgctaagacgacatgaggtagcccttgtcgtcatcgtccttttggatctcaaagtctgggaggaaggaggagagaggtgtggagcctcttccccggttccgacagggagtcggcatgatccacggcctccctctctctctctttctcggctcaggcaggcggcgggcgatgaatcctcctcggggagggcgtggcaagcggcacgcgtggcggggagggcacggtgctctacgacaatgagttcgccgcccatccacatcgtccccatcgactgtcgtcgctgtcaatcggagccacacacccgcgccaacgatttcccctccctggccgtcgtgcccgccgctgctcgccttcggccggagtgacctagccatgcgcactgccactcgccacccagctccgtcctatgcctccgcgtctcgcgctgccgcgtaccgcatacccccgcgcgccaccggcacgccatgcgcgcgcgagagagaagacagaggaagaggggaagaggatgtatgacatgtgggtctcactattattttaaaataaaatgctaactggattgccacgcgtataaaacagcttagattcggtcgagaggggtaatttgtccgatattaaaaatttatggtgagcaatgtctgattttctatttaggggatagtttaagtcaaccccgatagttcggggtaattccatactttttttttcctcttttttaacgagtttactcctgtgactctcatgacgtttggcc

SEQ ID NO: 15499 - DNA, 2992 bp, Oryza sativa
gtgagagaagaggcccatataaagagccgaggcccaccccacgaaagagcaaaatcgcttataatgagattggccgcaccagagaagccccccacatataaaattttttgagccgcgaggccgcgaaacacccttatgatggtaacccatggaggcgccacggtatttaataattaaggagaatatcgccggacgcgccgacaaagaaaataataaaataacgagagcgaggcggacccaaaaggggtgtaaaaagatatggtcccgaacgagggaacatacacaaaacggcgagggaataacgaaacagaaatagaagggtctataccctcaaaaggacgaaacaatgattgtgtccgcgagacacagagaaagaggttttgaaatacaattttacagagggaaaaaacaacctatttttccgagaaaaaaaaacaaccactgaccaaaacgggggaaaagatgaccaattttaccccgaataggcacccaggggaagaacacccgatttttaattgagcgaatagagagatgatcaagaggacaacatacttgtcaaaagatggaataaaagaaatagtgagacagcaaataaaagaacgggaaccccaaattaaggtgtacccttaaaatacgaagttagaagcaagagaaatatttggaaagaccgtcgcggtaggggccatattcgcagaaaaataatctgccacaaggaacatttctacaagcccagaaatttaaagaccccaggggttaaacatatccagacggaaagaaaaacgacagtcaaccgaaaacaaactcccacaggggcaaatatgatccaaaaaagacgagaaagaacggaaccaggtggcataaatgagaacggccaaacatgtgctaaaaaatcaatggcgtcaaacatttcgaaacggagggagtattatggtatttgttatttgtaccatattgcccttcaggatgtctcgtagtctaagagtaactagtacaatttctctaggcttgcattgctggaaggaatcatgtttcaaaggagaatagcacacatgttaagaatttatcaagataaattatccttttgtcctctttggattatcatctaacatttgtttcaattgccagcaagagtaaccattttaaaggaatgccgtttcgtcatgtcatcaaaaactttgtaattcaagggggtgatttcgatttcaatggtgctgcccaggaatggatactgaaagccaaagccagtggagaaaacgctctaaggtttgtccccaaatcaatgcacatatagaattctgttgaaaagtcttggttttgccagacttattttttttctttacactacgtgtatttctatgattttgcagtccaaagcacgaggcattcatgatcgggactacgaagaatcctaataataaaggatttgatctttttatcacaactgctccaattcctgacttgaatgacaagcttgttgtatttgggcaagttatcaatggacaagatattgttcaggtactttacattgaattctctctggatgcattaattcagttgcagtttccatacatcattggaacctttcatttttcatttatatttaatatcatttttctaaaaacaatatatttcatgctgagatgttcatgtccttacctcatgattagtattgttacatatttgtacattattttgagttacagtagtgctaatgccaataggaaattgaaagagttagacatgagtttaataggtgtgctaatggagaggatatgagctaattcaatgtcattatctacaaatgtatcagacgcatgtgcttcaactggttgaattagtattttctgagtatgttcattttaatgagactttttgcttgtttgatgacttaaacaggagatcgaagaagttgatactgatgagcattaccagccaaaaacccctatcggcatactcaacatcacgctaaaacagcaagctttgagctgatagcttgttgtccttacctgaaaatgacttatctgtactccaagagggtccatacatcgcctccaattgctgctgaaattgattatgattatggcttcctctagaagcccatgggttgcaaagaaagaaggcgcttaatcttgcctggcagctaaaagcttcttccgtctcatggagtagttgtgtataaatttatccctggtgtcattcggctgtcagtttttgcaggcattacagtgtattttgatgcttggttgtttcattgtaaatttgaagcccatttggatcatgaatcatagaacttggaattcatagttagttatgaggaataagttcaattgagggccctttaactttacaccgaatccgattttcgtccctcgatcagaaaaccagacacaacgggtcccttaactattaaaaacggtgcaaattatgttccttagcggttttgagagcagttttggctgacgtggcgcctacgtgggttaattgactcggtctttggttgacggggcattgacatggcgcttacatggcaattcgaccggaaaaaatataaaaaccggggacccacatgtcaatcttacatagaaaataattaaaaaatttgtgggaaccctgttggcccccacttgtaaatccaaactcacctttcctcttttttctctcttcttttcccaattccctcttttttaatattttttccccttctcccttttttttttcccggcaagagcgggcaaaccttggaagagggcgggtggaacccggtcccccacccggccaaagacaataaactttgaaggaggaaaccgcgggcatttaaaagggaggggaggttattttggaggccgcccatgggcccaccctctgggcgggggcttttttactctaaacggggggaaaggggtcaccccccccgcgcccagggaaaagagagtgtgaccgccttcctcaaaaccgcttctcaacggatttgtaaatatcccccgggaggggg

SEQ ID NO: 15500 - DNA, 3457 bp, Oryza sativa
  unsure (1)..(3457): unsure at all n locations
gatgttcnttaggtgaccatcgatggccgccggaggaggaggagatgcaaccatgcggggaggtgtggcggtggcagccggaagaggaggacgtccgacgtgcgctgctccccccgctagtggcggcggcgcgggggcctgggagtcgccaaggatgccgaggtcgacattgatgtcgtccgcagccacggccatggcgtccccgtccgcatccggcgtgcgccacagaagcggcggcatggggagcggcgcctcagctgttgcggcggcgacgtcaatggggggaaggggaaggggaagctcctcgctccggtgggctgccgctgacaagctcggtggtggtgaaatgcgacggatcgagtgccatcctggcggctgggggctcttctccgacctctgctccagaccgccgccttcgtcctcttcacccatcgccagctgtcgtcctcctcactccggtgggcggtcgctgacaagctcggtggtggaggcgggttgcggcggagggcggtcgccgctccctctcccactggccgccgtcggctgcacacctctccctccgtctgtcgctatcaagcccccgcccacggcgctcggccatcgccggcctccctacatcctccctcccttttattgccccggcttcctcctccagctcgctgctctcgccggtgggcgccggtctcaccgccccctccagctcgccgctctcgccggaagaagagaggagaggggagagagatgaagagagggagatggggagagaggaggaagaagaggaagggtgagtttgactgacatgtggggcccacaatttttttttattattttctatatgagactgacatgtgggtcccacgggttttattatttttccgggtcgaattgccacataagcgccacgtcaatgccacgtcggacgaagaccgagtcaaattagccacgtagacgtcacgtcagccaaaaccgccctcaaaaccgccgagggacctaatctgcaccggttttgatagttgagggacccgttgtgtctggttttccgatcgggggacgaaaatcggattcggtgtaaagttaagggacctcagatgtacttattccaaaaaaaaagtgagaaaatggacatttggccatgtttaaaacgcgcggtttgctggaatgccatcccaaaaacatgtttctttaaaatgccactatgaaacacgtgctcaccgtcgctttgacattttgaccattttgggcattttgaaaatcatttttgctggaatgtagggtgatgagacggaattgccctcaccggcgtcttgagcaggcgggttcttgcctcgtgccggttgcggtggcgcagctcccaccgggagcccagctcgccgtcgtggtggcgtccgtcggcggccgccgctccgcagtcctctgctgcgagggcgcggctgctccggagccgtaccaccgcggcggatggagtgcggcggccatggaggtcgcgctcggcgggctcgtcgtcgctcgcccggcgatgaagcgcttaaggttcgattctcgaaacatctgcttcaactctttttttctgctgttcctttctgattctgcatcatcacggcttattgcaaacttctttgtccatcgatcgcagaacgaaataggctctcttcttttgagcctgcagattgctcttcttctgtatcttggttcttgtcccatggcgcagaacaaaaggctcttcttttcgtcttctcttcatcctgcatataggttcttgctggagaccttcctcttgtgcacatcattgttcttggctttgctgtagacggagccccaggccctcagcagctgcagttgcgcgcgcaccgcgcctcgcagtccgccgacggcgagtgctgaaacggcaggagctccttgttagccagctccacgagctgcctccgcacctcccagtacagcccgccgacctcgccgctcgtgcagccgccgccgccgacggcgcataccgagccgtccgtcgtgttggccaggcactcgcaccaggcgccactctggatttggaggttggaggtgttgaggagcacaagagtgggaatgaggatgcgaggtggagcacggcgaggtcgagcatggtggagttgacgcggaggaagccgagggcgaaggcgctggcgagggcaattccatcttatgacccgacattccagcgaaaatgatttcaaaaatacataaagtggtcaaaatggcaaagtggcggtgagcacgtgttccatattgtcattttagcgaaacgtgttttcgggatggcattcgagcgaaaccgcttttgaacgtggccaaatgttcattttctcggaaaaagtacaccagaggtccctcaacttgtcattgagttacaaaaacgtcctcaaaccacaaaccacatatgaccccggatttgtccgacgtggcggctgagtcagcgtaggacccacgtggaccccacatgtcaggtgtccacgtcagcacctactcctctcccctcttctctttctccatttctctctttccttcctccctctcgctctttgctctcgcagggcatggggatgccggtgacgaaagatggtgcggctggcgacagcggctccccgggaggcgccgtgctgctcaccggtaacgtcatcgtctgggccggcacgtcggtcctcttcctctacgccggctaagtcctccttgtatgaacttcgcactggtgcaccaccgcatccgacaagtggatgacaccaagcaatcaacctcggacttcacggcacggctcctcntggatgagaacgcgtctcacggcctccactcccattttcntccaagcccactccgtgctaagaatgttcgcgtgccgcctcgtcgatctcctccactcgccactctacctcccgcgccgcctcaccatcctggacatcgcgtcgcaccggtggtcgaagcccaacgcggtggcctcggcgctcctctccccgctcctcctcgccgccgccaccgcacccaccacaaccgccctcctctccgccttgctcgccggcatcctcctcgccgctgccgttgcggtcgccacggacgctgcctctgttgagttgtgatccaaatttatttgcacttaataaaggccagcttctgctgtagcgaagcggaggcccattgccagaggcttgggccggagcccccgcggtacggatcgttatcccttttagggttccaccatatatatacctcttgtaagccgccatgcggcgttgaaacctcaccccgatatagtaaagatattttgctggctggcgcctgtgtttttctctctcatgctttgggagggtttttccacattaaatctcgtgtcttttgtgattgatctattgttctttattgtttatttgcccatcgtttcctaacaagtggtatcagagcttgttatcagattagggtttcgcgatggcatcgataa

SEQ ID NO: 15501 - DNA, 17071 bp, Oryza sativa
  unsure (1)..(17071): unsure at all n locations
tgtggtnnnnnaatggtagccctctacctcccgcgccgcctcaccatcctggacatcgcgtcgcaccggtggtcgaagcccaacgcggtggcctcggcgctcctctccccgctcctcctcgccgccgccaccgcacccaccacaaccgccctcctctccgccttgctcgccggcatcctcctcgccgctgccgttgcggtcgccacggacgctgcctctgttgagttgtgatccaaatttatttgcacttaataaaggccagcttctgctgtagcgaagcggaggcccattgccagaggcttgggccggagcccccgcggtacggatcgttatcccttttagggttccaccatatatatacctcttgtaagccgccatgcggcgttgaaacctcaccccgatatagtaaagatattttgctggctggcgcctgtgtttttctctctcatgctttgggagggtttttccacattaaatctcgtgtcttttgtgattgatctattgttctttattgtttatttgcccatcgtttcctaacaagtggtatcagagcttgttatcagattagggtttcgcgatggcatcgataaagtatgatctactgctgctagactataagacgagattctcgctgtggcaagttaagatgcgggctgttctagcgtaatcttcggatcatgatgaagcgttggaaagcttcgggaagaggaagaaggatgaatggaccactgaggagaagcggaaagattgtaaggctctgtcgctgatccaacttcatctgtctaatgatattttgcaagaagtgttgcaggaaaaaactgttggagaactttgacttaaactagaatcgatctgcatgtctaaggatctaaccagtaagatgcatatgaagatgaaattgttcacgcacaagttgcaggagagtggttctgtgttgaaccacatatcggtcttcaaggaaatcgttgccgacctagtgtcgatggaggtacagtttgatgatgaagatttaggtcttctactgttatgctcactgcctagttcttatgcaaatttttgtgacaccatactattaagctgtgatgaactaacccttgtaaaagtttatgaggcactccaaaacagggagaagatgaaaaggtttggatcagtctgatgcgtcgtcctccaagggtgaagcattgcaagtcagaggcagatctgagcagagaacctacaacgacaacaataatcgtgacaaggagctggccgttggatgcgatgaaggaaagatcatgggtaattgccctcggtgcagagcagcagtgctcccccggcccttctcatccctccctatgcacaagggcgacgacactcccctgtcctccctagacggcaatggcagcagcctccatagacggcgagggtggcagtgctcccctatcctccggcatatgtaggcagtggtttgcaaagatgctggtgtgtgctctgctttcttggtttggttatgattgtatgtttttttatgaaattctcatcttctgttgtggtgaaaagcctttatggcttgattttgtttgcagcttcatctcttatgtctacaagatgtttggtcgtgttcctcaaattttgaaggtttttggccagcaaccgggcatactcgttcattttcctcaaaccttaaaggttctgggtcagccacaaacggatcagaagcaatatcagacttattttgcttcctgcgggaaccctgcgatctcttcacaatctggatgtgcgcatggaagaagggaatcggaagaaaatacatggtgttgagtttgatggatgaacgacatggatgcgagctcgacacggatagggacggcatacaaaattcttgggaaaacatcttagatttttataatgggtaaagaatatatatacaccaggtgatttcctgctttttcctacaggaattactaagcaattctcaatatatttttttcgacaatcaagctaggaataaaaaagaaaaaaaataaaacatcagggtttatcattacttattatgaaacaaacaaatgatacacacactttaatgtaaaacatattaataagttaaaatattgtgcaaatgatgtagggataattgttggatatgattgcatgttgatttgtaaaattaaataatttgtatatgatgttgtatgcttgcatgaggttatatatgtaattattgctagtgtgatgatgtggcatggttgcatgtggaggtttagacttagtgtgctataactttatataaagtatatatatatagggggaatatccagtgaaaacccgtgaaaactatatctaaattcacgaagaaattactagagataggtataggcatgaagtacatcaaatttgtcttttttgtttttctcaaatgaagttgagtttggacttgagatttgatatgaatgtatttcatgcctatacctatttttagtaatttattcatgaatttacaaaacttttagatatggttttcacgggttttcacttatttgatggtttttaccgtatgtgccccatagatatagatagatacccaatgtgtttagattaatgtcaagtatttattatttggtcctaacacaatcgaatgataaacaatattttctttttctccgattatggtggtaacttttatacctctaaagtaattacaatagcaccttttccctattagcatgcggcatacatgaagctgatttgatttttgggtgcatcttaagattttaactgttaggtactggagattcctagaaatattcaccatagagtacttagcagctgtggggcagagaatcttctgggtagtcaccaatctccaacaaaggctgtttttagtttcacattaaaattggaagtttgaagaaattagaacgatgtgacgaaaaagttgaaagtttaggtgtgtttagtttcacgccaaaattgaaagtttgactaaaattggaagtttatgtgtgtaggaaagttttaatgtgatggaaaagttagaaatttgaagaaaaagttgggaactagatcacctttgtgtgtgtaggaaagtttgatgcgatggaacagtgggaagtttgaagaaaaaaattagaaactaaacaaggccaaataaaaaaaatctagcatttgcgctctctatctctgaagccatcatatttactcccgtggaatcctatgttcaatgctactcccatttacacgtgcatgtcaatattttccttcatttgatgtggtgaatcggatacaaattctgcagctgctttaccgatttgaaacaatacaatccggtccatactccatacataacgacactcaaaattatttgacaaaaacatcttgaatttttataataagtaagaaaaaaaattggcgacaaagggatgacaaaaacactatgaatcttttaaatacgcaaagataaaagaaaaagaaaaacttatatataagtatattggactaattattttaccagagtttcacttttgcaatgtttttttacttataatgctagtcattgttactaatcttgtactgtgaaccatctctacatactcatctctctaactctctcttcttcgccttcgattcctaatggtcgttgttatcaccgctagcatgtcttgttgcttaagcttgagctatgcgtctgctcatcgcggagctcgagagcctctccttccttcagagctcgagatcaagatatgatggaaagctgggtttgtcacggtagaattttgtttttttttctttttgttggttgatctttttctttttctttgtctgaaattgtactttacatcatacctatcatacttatgttcaaaagtgtatttctaaatcatagcccttttttaataagccgtacggcttataactaacatatggccaatctatagggccgaattactatgatataaatgaaatgcaccacatgttcacgttgatcattaaaaacttttaggacatgtacaatgatgattaatagtggtctctcagcgttactaattaggaatatttgttaacatggaaaggagagacaaaatattgttgctataggtaacaataactcaacaacgattcttcacctctataatatggatacatggttacattagggtgaaaaaaagaaagaaagaagaatagtaaaaggaatatttttcagttaatggttagagcctttatcgtttcaactatcataaacacacggtctctaaataataaataatcttgtactccatatgtcctaaattataagacatattgacatactttgaccattaatttatttcatattatgttcctaacgaatatgaaaccagtgatataacatgcataatatttagcatagatatggttaatatgattattagttaaaagttatcgagtgtgatttttttaaaaactagcgcgtcgtataatttaggaagaatggagtattggctaagagattatacttgtctctactctctactattaaatatgccctgaagctgatgcataggaagctcagggagtgatgccacgttagatatctaacagtggaattttcttcttcatttacctctggccggtatttaaaaaaaagtaaaattcattctagtccacaaataaccaaagtggcatattggactaggggtgtatctctatttccacttagcaccactaatctttataatctgttatatgttggattatgtatctaggtttgttcatgtttgagccatgctgggtggtaatttccggtgagaccggccatcggtgctcggtgcatggtagctgggaagcagttgacacaagggctccctcgagcctcgaaggctcctacgccgtccatgctcctaaacacacccaattccacacatccaacaaaaacactctttcaagggaccgacccctccgcttgtggctgtggctggtgtgccgtggtgtgagcttggctatcgacatgcagataacactacgatatgtccaccatagtgtctccaccaaggccctcactatgttcacacaggtggtcatcacgcgttgtcatccgagcatctggccatgttgccagcattagggccaagggtctcggccaacgccacctcgatggcttatggagggtacttaatcaccgaggtcgctagttggttgtgcagatagctagacaagtagttcaaagctatcatatggtactcaatcttggagcatgctatccagggaaaaaacaatcttgagaaagtaaaacaaaagaacattagcatcatagcatcaacgctggcgttggagacgcgatcgtaccagacgatgatgtggtgcatgtcaccgatgacctcctggtatcgctctctggtgccaccacaagcaaaccaaagcgactagtaaattagacccaaaaatataacacaatgagtaaatcatatccaaatctataatacacaatgagtaaacatgatccaatctacaattaaaattagatgataacggcttgtttggtaactcgatggaagaggattgggagtttatacaagggaattaatgatgagattaagatggaaatttgatttttaatcctacggcctgtttggcaagagaagggaagaggaatgtgagtttgaaggaaggagttgatggtgggattggtcatgggagttacttttttagtccccatcccttgtttggtttcacatcgaattccctctaagtctcacgaattaacaggcctcccccaggtaagagattggtgggaattggaccccttaattccccatcccaaaccccctcaaattcctaagttttccaaccaaactacagacttaaactcccatatatcataaactcccattccccatcaccaactccctccaaccaaacagaccgccaatatcttgtttgatagagatgatggaaattgatagggagtttagttggatgttaggtcattaataaaaacggatggctaagatttgcttagataaagtaaaggaggaattccctcccagttacctgcccctacgcaagaattaaaaaggagggagttccttcctcaattgcccatcccatcccaccaaaattcccatgtcttccaaccaaacaaaacacttaatagcatcattcctctaaactcccaatccctcctagaaactttctccaactagaagtgaaatgagagacctagcactagtccaatataccactttggttattgaacaaagtgaaatttacttaaattttcttcaaaaataaatccccacctaaacccgcgtcgcctcctcctccgccgccgtcgcgtcgccgtctccgagcgcctcctccgcctccgcctccccctccccctcgcgccgtcgccgtcgccgagcgccgccacttccgcccccgcctcgtaccctcatcgccacgagccccgtttcgccccaagcccccgcacagatcggacccgtggcggcgctcctccaccgtcttacccccgtcccccgtgctactactgcgcgcccagccgccgcagagtagggcttctcccccctgtgccggcggcggcggcaggggttcgtaaggctgcggggaagatggctagcgtatacatcccggtgcaggggacgaagaaggaggtgcgggtggcgctggaccagctccccgccgacgcctccgacatcctcgacatcctcaaggccgagcaggccccgctccacctctggctcatcatcgcggtacgctctccctcactccctcccttcctagttcctagtcctcgcgacgaaaaccatcaacattccctgcaattaatcgctcggagttatagctcgtcggaggcgtgattattaggagtgattcggcgcgtcatggtgcgaggtccactaccctcgggcctcggctatcgcttccttgaaaatcttcccttggggtttctagggccacggtctctcgcttaatcttgcctgcagatgcgcatctattcctgttccagtgttggcattttgatagatttgtcaatgttggttcatattttcagtttattcgctcaactacgtgatgttgtacttgattagctttgttcttctctggttgttcaaagtgaacgaccatgctggtgaggtgccagaaattagtgatgttcatctcccacaagttgagtgcttgcgcacttaatccaggactagccttctgatgaaacctgtacttgtggggaccctctctttcaattgctctcctgagtcttgacaaattgagcctttccgagtggttgatttaactgttgtaaatttggaggaaacaatcaattgtattgttttgttcacttgtgaatcttgtgttgacacagagagaatacttcaagcaaggaaagatagaacagttccgacagattctagaggaaggatcagggccaggtttgtttttagtttctatttctctaactgtagggctactggtcaaccacaccatcttttatttcttacactaatttagattctcattgttacttgaacgcctgttcttgttgaatagtctcttctcccttgcagaaattgatgaatattatgctgatgtgaaatatgagagaatagctatccttaatgctttgggcgctttccatactttcctggggaaggttgagagagcacaacagaaggaagtccatttcaaagaagcaactcaatgctacaatagggcatcaaggatagatgaaactgaaccttcaacatggatcggaagaggttctattatttagagagtttcaaatatcttcatctattgtcttttatggcttagtgaatgttatgcacagcttcttttaccactgctgtggttctattatgattttctgcatattcatttgatcttgggattgtgtggttaatcccgtggaagttttatgtttttgtcatttttgcatttaaatttaatctattaaatttgataatactgtacttagttgattgtatttatttcaaaatgttcttccaacgatttcagtaaaaaaatgttcttccaacaaagctcaatttggttcaaagagatgcagcaacaagtatgggactgtgataatcattttctaatattcataaagaacgttttcatgtgtgtctaatctatttaaaaacatattattttccatgtgtttgttgatgtcacacaacatgtttgtggaaatcatctttgtttgtgaatatcttggctcttcgagacctattagtgttggattagtcccacagagtctaatatagtgtttagagaaatatgttgctccttttagacaaagcaaggagccaatggaggaagcctaagagttgatgtgagtttgatgtagttttgcatagtgacaaccatacatatatatatatttagttcatatttacctccgttgatttatatacatggtatgatgaaggtgtggtgtaagatgtaaagtttggttcctcagactgctttatagctgttttcaacaatcatgtcttattttgaaggtcacattatttataatctctgttaggtgaatgctaacatcttacagtaggaatttcgattgtgcatgtcatggaaaactatcttgttgcattgcaaacacatggggaagaggaaaaactatccttttatagttgcaactattaagcaaaaacttgtggccacgattcattcttaatcagatcgagcacatattattattttgatcatgtgttccagtggcgttcttgattttgggtttaatttcttactacactatttgttttcacaacttaagtttcatgatttgagcttagcgcactcatacgagttctgcagttaatgccatttcttcaccatattaattcatttgaatgattaccagcataacacttcatgattttttcctaacaagtatggttttaagtatgctgatttattgatgttgttcttcaggtcaactctgtgtggtcaagcacgatttgcaaatggcatctgattcattcaagattgtattggatgaagatggaagcaattttccagctttacttggtcaggtaattttcttgaggatttcaaaaatataataacaaaattgtggtatgtcgggtggaatcatggtatgtggggtttgaggttcgcaattcgccatttaaccccccaaaaaaagattcactgggtacgcctatgtgattcacaaataaaaaaaatcagttcatgaatcagagattggattgggtatttatgggggttgataccaaataaccaaaacgtgtcctaccaatttttttggcaagatggacagtatttatgaactgtttggattgaagcctgtttggcagtgcccacgctcaaggtagtgccctcatctaccctacaaaatcatgacctacaaaatttgacaactagttagcaaaccaaacgtaaggcaaggcagctttactctacaaaattttagtagtgccaaaacttaccaattctttggtagggatgagaatcagtcaaccaattcacccttatcattaaagtcaaataacaatatttacttaattcaaatacattcaaaaggattgggagttttaaaggaccaaatggtgaaaaaaattgtgaaaaaactgatattaggattattaaggaagataatgtaatgggcccagtcctccaggcacaccggattgtttcctcgctgtaccttctctatctcaatcattggcgcaaaacagctggtttgacttttccgtcaaccctagcgttgccagccatgctccctcatccttgtcttctcgccctttcccttcttgttgctctttgccgccttctcagtagagatctttcttctcctggaccgacaaagatgcatctagcagcatcttcagtaaacaagtggccattgtaatggtggcagaggtgatgttgacgataagaagcactggtggttactctggttggtttcccctttccactcctctcctttgctgtccatggggttgctgatttggttaatttgtgccaataagatgtcattccctattgatctgagtcgcaagtgtaccacaatgcatttcatgtgattggaactgcagtacgcgtcctcttggtatgtgtccagtaactacttgaagtgattgtcattaagtatgtataaattctgaatggccacagattgcttcttgtaatggtttactctataatatttattcaagttttgaattttgagcttgatatgaacactgaacggataaacctatgacagcagccaacagaagtattatcctatcatagtgtctgtgcattgcggtggatctcaaacaaataaactataagttcttaatatgttcaatgcaaaatatattgtcatcaaatatctaaaaagttgtacagataatcaatattagctaaactggccatttggatacacacaaaataacaaaataagagaatgtgtgtaagtacattaaaaaaaagattgtcgaagagaagtggtgggggtaaagcaagtgctatcattctacactgtactactgtaggtaaatatgacaacctggattagatggcttcacaccatttcttcatatgcttactagatctcctgcattagtttatctttgtactgctccctgtattttggctctttagcatgcagcagataaagatcgtaacaacctattgaaggcactaaaaagtacaatgtggtagtcattgtaaactccagcatctttcttccaattattgtaaccttcaagttataaatcctatctgtgcaggcctctgtttatttcctgatgggtgactcagagcagcaacacaagaaagctctggactattataggaactcactggatctctataaggttggtgataactcagcacttgagttccttttgacaatgccatattatttgctgtgataatattttaacttttataaacttcgtagagagccctgcgggcctataccagctgtcctgctgctgtaaggcttggtatagcattttgccgatacaaacttggtcagtcagataaagctcgacaagcttttcaacgcgttctgcaggcaagccctatttctgtcacttttatagctgtatagaagatttacctcggttaattgattaaactaaactaacctttcacagttggaccctgaaaatattgatgctttagtagcactggcaatcatggacttgcaaacaaatgaaggtaaatgctctgtcctaagtactaacaagaatccttttttcacaaattttccctgaagtctcgcaacttgtgtatagctggtggaattcgcagaggaatggagaaaatgagaagagcttttgaaatttatccttattgcacattggcactcaaccacctagcaaaccattatttctttactggccagcattttgtggttgaacaactgacggagactgctctctcttcaagtaatcatggactgctgaaatcacatgctttctataacttagccagatcgtaccacagtaaggtgatatactctgttcatacacccacgggactatttggttattcttttacttgttctctctgttgaaaccttggatttttttggttgctactcttgtttataaccctcaatcaaacttttaccaaattcagggtgatattgagactgctggaaggtattatatggcatctgtcaatgaaatcagtaagccacaggactttgtgttgccattctttggtaagtatattctcattttagggactgttatgacatcacaagccaattggtcatgtgctgcagtgtatctcaacaaacatacaccaccaactctaaaacactcaaaaccaacaagttgtctttattttagcctttacttgatcagcatgtgagttgtgattgtgacctgtgtgatgctttgggtgcattggatcatgtttagcagtttctgttttgggtctgttaattatattgattgaactggtattttcttcaggataccatgatatatttcttttccttttgctgactgtctaatggttagttcattagtataatgttggactatggttttctgagctgtatgtggaagctgaacgatatgacagttgcttgtgtcattttgaccttgaaactcccatgaggcattgtatgacttgtttcaattgagaaatgtagattttattttatttttgtctcggataggtgaatctcgattgtcaatttgtctattttgcacttctaactttataacctatggtacttttatttatgatccagtcacaatgcgcatgcactacactaacttaaaagttattatacttcttttaccatttctatatgcgcgaagctgttgttgaactgtaagtgattcccgatctttctgtatcaacttaatgggttgaactgattggcacctacctagtgacaatttaaatataaaatggcatcccacttctattccacttgcaagggagctcataggtagggggagcgatggagtataaaatgagttgctaccttatcaacataaacttctggctgaattggctggtgcatgctacccaatatcaatattcctttttgcagtcatcatcatagcactaatagccttttcagattttgtccaacgaagacttcaaactcttaatgtctattttgcactttcatgtggagtgttgatgttttcttatcttttccttgattgattaccttttgtttgacaattgtaaataaaatcatgctatctattgaatcactttatgttcttttttgtcttctttcttctgattgaggtttgtcaaacgtgtgctagcagttctagtagatatttttttaggtcaattgagaataattttcggcatttcttatgttgtttgttacaaaataatgatttgaagttttgaaccaggacttggtcagatacaattaaaatttgcagactacaaaagttcattagctagctttgagaaagtgttgaaggtgcacccagaaaattgtgaaagtttaaaggtgagatgaggcttccattcaatttcatttgtttgagaaggggctatctgtatgaattaattaatgttgctctgtcaaggctattgggcacatatatgcaaagtcaggtgagaatgacaaagctatagaaaccttcaagaaggttacccggattgatccaaaagatcatcaggtgatctctctctctcttgctcactcattataagaaacattctttcaatataatcttatcatgcttcttctgtacatataaagaataaggccctgtccatgtgagaggaacaccactgaacccgtacccagttttcaatcttcagacttttttgattaaaaaatgtggatgttaatatgtaaaccataggaactgagtgctgctaggttgtctgagtgtactttttgagcaccttcctgggctcaacacctggtgcctatcttcttaggtgaacggcagagcacatggccattttttattttaaatctgggaagcatgtcttagcttttaagcatggtgatgatcctagagtatttattattgaaaaataccgcccttaactaatactccataattagttcattgtatatctgtggtgctctgtataacctagaattgaaattgaattttattctcaatctacttaccctacctattaatttatgtacagttattctggtttacatttttaatatgctaaatgtatttataagagcaaatgttccgaatgttacatcaatattgtgaaatgttgtattatttcaattcacttgtctgtttatcgtagaaaagcatgggcatttatttctaatgggttttagatatgactaaaaagattaactaagttggctgaaagttcgaatttctttttgctctcttgaacttctattcctggtcatggtcatacaatctagatgaaacttgtaaccttcaagtttcctttcttaattcaatgatatgcaagccttttttacatattcccgaaaaaaggtttccatttatttcccttcttaaaaagaggaatttggggttatggtgtgcactacacccatcccctcatcaaggtcttctgtgagttgtgactagatatatgtagacgtgtgtgagttgtgactagatataattagtaaaaagtgcattctttgcatatgtgtgtattatattttttctgtcatgtagttatgtaaggacaattattttgattcaccttttactgtagatcttacaatatatttatttggcacccattgcgatgtgctggcaggctggtagttttgtttcaaacctctgatcatccacttatttagagtaggacatattatttagttacttcgtgtttgtgtttgacgcttcttgcattgtgaaaaaaaaacaaacttacaatctattttctgggcacatatctgattttgtagcccattatgttcaatattatgtatataatcttgttcatccatttttcaggcatttatggagctaggtgaattattggtacaatctgattgggctactgctatggaatacttaaaaacagtaaggctattcacttcgctagaagtttattctgttagcctgtatcagattctaccttggatgtatgtttcagtcatagagtttagcatataaattttgtttatttaatttgttgttgatacaaatgtgtactgctttgttttttgatccaattaacgtgggtcttgcttcagtttgaaaatatgaaatcttacctagcagttcacaggctcggaatctcctaaagaaggcaggagagaaaatacccattgaattgctcaatggaattggactacttcattttgagaagggagagcttgaggtttgttactgcacactccatataaaatactttacagtcatttataactgatggtatttttattgtttgctttttcagatggctgaacaaagttttaaggaagcacttggagatggcttttgggtttcaattatagatggcagtgtaggtagctccgtggttaactggagtattcagtatagggaccagagtttttttcaacaacttgaagaagagggaacacctcttgaattaccttgggataaggtcactacattgtttaactatgcaagattgtttgaagagctccatgatactgtgaaagccagtctcttttaccgcctcattattttcaaggtactgccattcccaccacatgtgtgccatcatgcagctcaacagagtctgttctttcatatagtcatgttacgatattaagtttacccaagcaggggagcatgcactgaaaagaatgtgaacatatttaaattctgacctttgctcacacatcctattcctgatgtttattggcgtcgcagcctccaaatgtttttatttgttacgttgtgatgtttgcatggagttccatacctttgcattttattttgtttgtgtagcatcactgatatatgcagtggtggtctctgctttatagtcttcccttgttaaattagttgatgtgttttccatgcttatagatgatattgcatcaatcacagggtttgaaaactcatgatataagatataatttccatgttcatcaattatgacagttaagaatgatttatattcctcagtaatttgatttgtcttgattattacagaaaaatttaagatatgtttaatgccaaggcttgtgaaatgaccacaattattttatattgcatcttgtttgcatgtatgtttatatgtcaattgtcatagctcatgtcacaagctattatggatactattatgcttgaaaagatatatacttccttcataaccatttgcccattatttccaaatatatgtaccaaataattgttccagagaatatatttggtacataggtatttgttgtacattctccctgaaaatgtgaaaacaacaggaccccttttgaaactatttttttagggtactgtgtgctgtacattctaattttaactccttttatttttacatgacagtatccagactacattgatacttatcttaggttagcagctattgcaaaagaaaaaaacaatctccaactgagcattgagctggtgagtatgaatgcttctgcatttttcttcttcttattattaagaataactataatatatttgttgtagataggtgatgctctaaagatagatgataagtatccaaatgcactttctatgcttggaagtcttgaactccaaggtgatgaaacctggcttactgcaaaggagcatttccgtgaagctaaagatgcttctgagggaaaagacacatactctatgcttcaattggtatgtgagcttacttaactctagtacatttatctacttatcactttactggtttgattaacaaccttttgttcgaaaaaggcagatggtttgtgtaccaaattgggaacaaacttgttatagactttgttcttatttttcttttgaaaactaaagcccaaatggggacttaaattacacaggaagatatggataagaattgttatggttaaagtgaagaagtaaactcctcgttatgaattagttgcctgtaattactgataactttgtttggcgtgtaatgtctggacaagtgctaccagctggcacgagatgatgcattgagctttatatattttggatcactagcatatcacccaaattaccattgaggtaggggcatgctaagcataatctaaggttgatgttttcccaccaataggtttacatctgcttggnttgatgcantcatattatgtaactaaatccaatggtttttcttatatttaaaacgaattttccatgttggttcaggggaactcggattaccttggtgcttattcggctcgtgaaaaagccccccaaatttggggcccttcctatggagaaaggccaggaactgntttcaaaatgttgtttgttttatgctcaacaccaattcaggagactcagggtttaatttgtggtaggtgggctgataaaaatacccgaacaacccgctccaataaacttgccctcaaggggtggattaaatggtacatgtggacaagggccaataaaaattaatgagctttgggaaatatacaaagagacaaattggcttttttttctcttttgggaaaaggcagagtggggaacactttttttgtggggtgggaaaagag

SEQ ID NO: 15502 - DNA, 1610 bp, Oryza sativa
  unsure (1)..(1610): unsure at all n locations
tatgatgatgtgatgcaattgatccatgagctcctccctgctgggtcaaagttggatgataacttctatcgttcaaagaaaactcttgctggcatagggatgccatatgaaaaaatttatgtgtgctacaacaattgcatgctttactacaaagacaatgccgagaaagttagatgtgactttttcaaaacatctcggtatgagaatgacaatagcaaagttccacgtaaggttctaaggtatctccctatcatacctagactgcaaaggttgtatagtaatgaagagatagcagtccaaatgagatggcacaaagaacaccctacacataagctaaatgtgatgatgcacccacgtgatggtgaagcatggattcaatttgatgtagatttttctacttttgcacaagatccaagaaatgtccggcttggtctagctatagatggattcacacctttcaacatgactgctgcgtcatactcctgttggcctgtctttatagtaccatacaatctcccaccagacatttgcatgaaaccagagaacataatgcttgcccttgttatccctggtcctcaacatcctggaaagaacttgagcacactattggaacctttggtggatgagttacttcagatatgggatgatgtaaccacatgggatgcttcgaagaaggaaaacttgactatgagagcagcatatctttggtcgatccatggctttcgtgcttatggtgattttgcaggttggagcaccaatggtaacttagcatgcccaacatgtatgtgtgagtcaaaagcattcaggctccataatggagggaaaagttgttggtttgattgccattgatgcttccttccaagtgaccatgagtttcggactcaagcaaatgcatttcgaaagaacacaacagtacaccactgttagaatttcaatggttactctcattgagaagaggatggcacttagaatggggcaattttctggttttcttcattcacaaactcaaaagccatatcctcccaaagaggattggatacatatttatagctgcttgtagcagccatgctagggcaagtgggtgctgtcctagagcatcccaacaaactgtcctagagcatctcaacaaactgctgtcctagctgtcctagagcatccaaactgaaagtacaaatgctgtcctagagctaaaaagcaagaaaaagcaccacaagaccaagaccaagacttattcatacattctccccctaagtcttgtgcgccgtcttgtgggaaagttgagccatcccgatccgggagcaaacctcaaggaacttgatcctcccaaggggcttggtgagcaaatccgcaagctggtccttggtgttgatgtagctcgccttgatgctcccttcctccaagtagcttcggatgaagtgatacctcacccggatgtgcttgctccgttcgtgaaaaccagggttctttaccagggctagagcggacttgctatccaccctgagctccaccgctccaatgtctctgccgaggagatcactaagcagtagagcaagccagagcgcctgggtcgaagcgncggagcagccggcactcacgggcgatcatccgcg

SEQ ID NO: 15503 - DNA, 2901 bp, Oryza sativa
atataaacgtgtgtaagaatccccccacagaagggaattttctttttaaaacctggtggtggccctgtcggggttccgggataaaccgtttgtgtacccaaggaaaaggccaattttcccgtgtttggttaaggaaaaaaagcttccccaaaaaagtcggttttgtgaagcaccacttcctccgtcgggataatggggtcaagttcaatctctctccaacaaagtaagattgggttgcaatcggtgagtccagccagctcaacaacgcgcttggcgtagcggtctgtcaaagcgtgatcccgaagtcgtcctggtgcacctcgatccccaggtagaaggagaggccccagatcactcatctggaaggtggcctttatctcctccttgaacgctgcgacctccgcatccttggtgccggtgatcaccaagtcgtcgacgtagacacccaccagcaaggcttttccaccattgccccgtcggtagatggccgtctcgtacgggctttgctcgaagcccatccccttgagcgtggaatccaacttggcattccacaccctcggtgcctgccgcaagccatagagggccttgtgcaggcgtagcactttgccctccttgccggggatcacaaatcccggcggctggtgcacgtagaccttctccttcaagtcgccgttctgaaacgtcgacttgacgtccatgtgatggacgccccagccttcctaagcagccagcgcaagaaggagtcgcacggactccatccgtgccacgggagcgaaggcatcgtcgtagttgatcccctcctgctgcacgaaatcgcgtgccaccaagagcacaaagagtttgtgcttacaaagccttttccagctaacttgaccaacaatgctcctgctgctcaacgtagggagcatgaaaagcgatgcaatgattatcttgatataagctgtctcatgcttgctactatgtcccctgagcttcaaaggcaatatgaggcattggatgctcatacgatattcacgggactacgtaacatgtttgaggaccaagcaagagctgagaggtttaatacctcaaagtccttatttgcgtgcgggcttgcagaaggtaatccaatgagcccacatgtggtcaaaatgattggttacaccgagagtctggataagcttggctttccccttagccgagagttggctactgatttgattctccagtcgctccctccctgctttgagccgttcataatgaatttcaacatgaacaacctgaacaggaccttggcagaattgcatgggatgctaaagactgccgaggaaagcattaagaaaaactccaaccatatgatggttatgcataagcgcaagcccaacaacaagaaaagtggtcaaaagagaaaggtaaactctgatgagatcacgagtactagcaactctaagaccaaggttcaaaagatagggcccgctaaggatgcagagtgcttcttttgcaaggagacaggtcattgaaaaagaaaatgtaagaaatacctagagtagctcaagcagaagcagcaggatggaaagagttccacctcaggtattaatgttatagaaattaatcttgctacttcctctactaattcttgggtatttgataccaggtcagttgctcacatatgcaaatcgttgtaggggctgaaaaaaagtaggagcttagcaagaggcgaagtggacattcgcatgggcaatggagcaagagttgctgctgttgcggtcggcactatgccattatctttaccatcaggattagttttggagttaaataattgttattgcattccagctttgtgtaagaacgttatctctgcttcttgtttgcaagcagagggttatggttttatatctgtagacaatggttgtttagtctattataatgacattttctatttccatgcacccatgatgaatggcttatacattgtgaatcttgatggatgttcagtctataacattaatgcaaaaaggcaacgtcctaatgatttgaattccacttttatttggcattgtcgcttgggtcatataaatgagaaacgcatggagaaacttcgtagagatggacttctacactcgtttgattttgaatcatttgagacatgcgaatcttgtttacttggcaaaatgacaaaggcacctttcatgggtcaaagtgaaagggcaagtgaactattgggactagtacatactgatgtatgtggaccaatgagctcaactgccagaggtggttttgggtactttattacctttactgatgactttagtagatatggttatgtctacttaatgaggcataagtctgagtcctttgaaaagttcaagaaattttagaatgaggtacaaaatcatttgggcaagacaatcaagtatctatgatctgatcgtggtggagagtacttgagccttgaatttggcaatcatctaaaggagtgtggaattgttccacaactcactccgccaggaacgcctcagtggaatggggtgtctgaacggaggaatcgtacattgttggacatggtgtgatcaatgatgagccaaactgatctgccgctaagcttttggggttacgctctagagacagctgcgttcacactgaacagggttccatcaaaatcagtggataagacaccatatgagatatggataggaaagcgtcccagtttgtctttcctaaagatttggggttgtgaggtctatgtaacacgtttgcaatcggacaaactcacacctaaatcagataaatgcttctttctggggtatcctaaggaaacgaaaggatattatttttataatcgggaagagggcaaagtgtttgtcgccccacacggtgttttctggaaaagaaagtttatacggagtcaaacagggggatata

SEQ ID NO: 15504 - DNA, 1203 bp, Oryza sativa
  unsure (1)..(1203): unsure at all n locations
tgtttttttctagtcccctttgagccaggtccctaaaacagtgttatttagcgggcagatttgggggtgttgtttgattaagaaccttaccttcaaaaaagagatgccacctaagcctttttactacagaatgttttccaagatggaaaactgtaaatatatttggtccatgcatgacacttagaagattattcttgatatgtgccttcttcctttagagccatgggnaaccttcaagttacactcttggccaagagaaaagataggtctaagcatgaagatgaagagggggaggtgaaaagaggagnaagaagggtggtagnagaaggaaggatcagaagncaagggcacactatggggaagaggaagaagcggaatatagagatgacccagaagcagaagatgattatgcaaacncggcgaggagtancgatggtggcgattcagagaaagccccaggtcaccttcttgctgctgcaggtcttgaagattctgagaaagccccaggtcaccttcttgctgctgcaggtcttgaagattctgatgctgaagaagatgacatggttagtgtttttttttttctttttcataaataacctgtatcccttcatttctatttacaaattatttgcttgtctgctttatcattgttgccactgagttttaattcctttccaagctttgcattgaaagttagtttgcctgttagatctagccttcgcactcttatgttcatttgtattacttttgctatttatcttcactagaaataaaaattttagatgctctggtgcaaagttgccttattttgtcttttcctggctgtagggacaccctcaatctgccatagaacggaagagacgagcctggtcagaatctgaggatgatgagccagtgcagaggccagtgcaacctagcgcaggcgagaacgatctgagtgattgaattagacggtgaagattatggccgaatttgggatcacttcatatatttgtgacgaagaatggctcctgggatgcggaatcaactatagggcgtgctcatatgcacttgtggataattcgatgttgaaatggagctcagacagatggttgaaccagaagtgttaaaaaaatttatctgggagcagagcagtcactgatattcaacaattaatctcgcgtcattctagacatgccatgggttggtggagctaacataagg

SEQ ID NO: 15505 - DNA, 2663 bp, Oryza sativa
  unsure (1)..(2663): unsure at all n locations
tgattccnncctgagcgccgtcgtgtgatggattcctatatataattgccacgtaagcgccacatcaatgccacgtgggacagacctaatcaaattagccacgtaagcgccacatcagccaaaaccgccctcaaaaccgccgagggacctaatctatactggttttgatagttgaggatctatactggttttgatagttgagggagtcgctgtgtctggttttctagtggagggacgaaaatcggattcgttgacaagttaagggacctaaagtgaacttattcatagaaaatataactgaggaataagttcatccaaggtcccttaacttgtcagcgaatctgattttcgtccttgaaaaataataaaatccgtgggaaccacatgtcagtttcacacacagaaataataaaaaaagtgggacccatgtgggccccacatgccatcgtcgctgctcccttcttcccactatcctctctcacttcttccctacgatgtggacacggacggggacaatggcgccggcgtcgttgaggcactcgactgtgacttgggtcttgccgtcgggcctgagctaggcgcaggtgccgttcttgcggacctcggtgaggcgggcgccgagcttggtggcgaggacgtggctgaggnnnnnnnnnnnnnnnnnnnnnnnnnnnnnnnnnnnnnnnnnnnnnnnnnnnnnnnnnnnnnngatctcctcggggcgcttggtgaagtggccgtgcacgccctgggcaatgtcgggcgactgctgctcgatgttgacgagcaccttgcagcggtcggcgtcgaggccgatgtcgtcggagacgaagccgatgttgtggcaggtgtcgcggacgatcttctcgtagtcgacggtggccttggtggtgatctcgccgaacaccatgaccatgtttgtcttggtgcaggtctcgcacgccaccttgccctcggggtcctgggcaaggcacgcgtcgaggacggcgtcggacacttggtcgcacagcttgtcggggtgaccctcgttcacggactcggaggtgaagaggaacgtctccgccgccatttctatctgcccactgcatcggttgcaaccaagcaatcagaaaaaagactccatttctgcagatctactgccgccgacagctaagtactgacaaaattttgcaaattaaaattggatccaccaacgctatatctaatatgttctcctaatccaccgacagttaagtaccttttttttctcctaatccagaactccatacacgcacaatcaaagattaaacaaaaaaagaaaacaagaatatccgccaatcactttcccctcccacggcggcggcggcggggaagcaggtggggaagcgggagctcgcccgccgccgcccatggaggaggccgcgccttatctccgccggcgatagagagagatgggggcgagagatgaagacgacgggagatgggggagagagaggaggaagaagaggagggggtgaggttgacatgtggggcccacgtgggtctcacctttttattattatttatatgtgtgaaactgatgtgtgggtcccacagattttattatttttctagatcgaattgccacgtaagcgccatgttagtgccacgtcatatgaagaccgagtcaaaatagccatgtagtcgccacgtcagctaaaaccgccatctaaaccggcaagggaacttatctgcaccggttttgatagttgagggatctgttgtatatggttttggggttgaaggacgaaaattgaattcgctgacaagttaagggaccttagatgaacttattcctataactgaaatttgtagtagtacgcttggggcgaggccttacatgtcggcacggcacggcccggcctaaatgagccgtgcctaatcgtgcatgggccgggccgtgccgtgtggcccattttgagtggtaggcgaagttactaggttaccctcgccattttgacgcctctgtggtgcgtctcctcgtgcagtttttgcccttgatttgatcccccaattcattccatcccgcgaccgagctgggcgtcagcgccgtcgttcgtccctgctgcttccgccgtcgcatcccatcctcatcctccgccaccgccgcctgcgccgatccccatccatccatccacccagcgaccgaccgaccgagcagggtcgccgtcgttcgtacggctgcttcctcgccgcatccatccatccatccatcctggtgaggaaccacatcctctttcccatctctctctttacccacgcacttttttttctcgaatttgcgtcaaaccgcttctgttctagaaattttccctaacccttaacactaataacagtttgatggttcccaaaaaggtttggtttttctttttttttttttaaaaaaaagaggtttgggtttgggggttcaactgaagtgaacccccatgtcccatgttaagatccgccactccttcgtttgaactagtgaaagctacgccattctcttgataaaaaaaataaaattgggggtaaagaaaagaactttaatattgtggggtgccgattcaacccttttctttttgaccacacccggtgtgcaccccaaaaagggaagaaattaagttctttaaaaaagaaggggcttggctttccatgaaaattac

SEQ ID NO: 15506 - DNA, 5581 bp, Oryza sativa
  unsure (1)..(5581): unsure at all n locations
tgtttcagctctaaaacctgcaaaagtgtgttatatttttgtaaaacaccgtattatgggccgtgggcttttttccccccaatatttaattcccatgtgcctcagattccaaagaccaaaagaatttcttttaacaaacccctttctttggggtttcgggttggttggattgaattaaaattaacgttttgggaattgtaagatccacaatgcttctttactattaaatggtccaagttttttaattcctgcacatgaggttgaagggggttattttagatgtgccaataagcacccttaaatgttctgttggttggtgaaataccttatacatcatgtcttactctaanttacacaatcgggttatgtgaaaaaaagaaagttactgatgtgttctgacataaattttcattttttttgncagtgcattgtgtcaaaggcattgggcaatatccttttgaatntgtgtttcttggttcatattgaaggactgttgacatttttgaggaaaaatgagtggtgcacccaagaggtcgcatgaggagggtagtcactccacaccggcaaaacggccgttggatgacagcagcttgtactcaagcccttctgggaaaattattcaaccaggcagcagtgatttccatggttcgtttgaacatgatgggagatttgccaaagttcaacgtattgagccccgggatgataagaggccctctctggcacataggatgcctattggcccctccaactttgtggaccactcaatctcatctgatggcagattagaatcaaagcaaaataaagatccatgggacactaaggtagatgttcgggaggcaaaggctgacactcgagatgtctacagtgatcccagggttgaatttccgagcaataaagttgagactgatgtaaagacggacaatagagcagatgacaatgacataagagccgacagacggatacatgctgactacaaaggtgatgccaaactggacaaagatggtcatcctacagcaatttcaaacatagcctggaaagataacaaagaacataggggtaaaaggaatattgagcagccatctgataatgcagattggcgttttccccgccctggtttgcaaggaacagatgaatcttccaaaggtccagttcctgcagatgagcggtccaaggatgctcatgaatctactggtgagaataaaactgaacctaaaactgaagataagtttagagataaggacaggaaaaagaaggatgaaaagcatagggacttcggcacaagagacaatgatagaaatgatcgccgaattggtattcagcttggaggcaatagtgttgaacgaagagagaatcagagggaagatagggatgctgaaaagtgggatagggaaagaaaagattcccagaaggacaaggaaggcaatgatagagagaaggattctgcaaaggagtcatcagtagcaactgaaaaggagaatgcaatactggaaaaaactgcatctgatggagctgttaaaagtgccgagcatgagaataaaacagtagagcagaagacacttaaagatgatgcatggaaatcacatgatagggatcccaaggacaagaaaagagagaaggatatggatgcaggagaaaggcacgaccaaaggagtaaatataatgacaaggaatcagatgatacttgccctgaaggagatatagagaaggataaggaagcccttggaagtgtccaacgcaagagaatggcgcgatcaaggggtggtagtcaagcatcccaacgagaacctcgatttaggtctaggatgcgtgatggtgaagggtaagtttaacaatacatcttgctatgttttttcatcattgattcaaatgcataatgggtgcttcctgaccttgatttaacaggtaaaaacattatttatttgatatgtttctgtatttgttttcttgcagatctcaaggtcagtcaaatatcttgtactacagaagaataaaatggaatagggatagtgacatgtccttcaaaactgtcacggaaagctttccagcagacttataagtttgcattttcttctcagaatattttaatgctataaccaatccatttaaaattttgaaacccctttacatttctcacttttaggatgatattttttgttacactgcatgtgctagtgtgtgtgtctattttgtggacaaaatccagccagagaggataaatagggtaatcggggtgtatatttatgaggattccgttgcaactttcaaattgagcataatgataatttatctaaggtaggctggtaaggaagttgctgtttttgtattttgctatcttagtttcattccattgcaggtaaatctgaggcatcagccattgtctataaagctggtgagtgcatgcaagagcttctgaaatcatggaaagagtttgaagcaaccccagaagctaaaagtgctgaaagtgtgcaaaatggccccactcttgagatccgcatacccgcagagtttgttacgtccactaaccgtcaagtaagtgttgacttttacaggtggcatatgttaatcccttcatcaatctccaagtttgcattccagaatgttaatatattaacacacctaatactgaatgattgtgtaattcacttgcaagtgtgcatctgtagatttatatatttacaggagattattctattgtgatctctttgaaccagagatgtatattctatttatctttcctcttgaaaccatatatgccaattgctacatatttgctgctcatgtagttgacaaattgcttcataaattaatgaagctaattacttcctttgattttgtttgtttcttaaaatcactgttgtgtaggtaaaaggtgctcaactttggggaacggatatttatacaaatgattcagatcttgtcgctggtaagttcttgattattttccaagcgtgaaacgaacctctgaaagctgatttctaaacggtctttcttttagtgcttatgcatactggttactgctcccctacatcatcacctccaccatctgcaatccaagagctacgagcaactgttcgagttctaccgccacaagacagtaagccttcattctttgtcagtccaattattagacttaaaaaggtcagagcaatatggctaaattagtagtacttgtataacacttgatctaccttccaggctatacttcaactttaaggaacaatgtccgctcacgtgcttggggtgctggtattggttgtagctttcgcatagaacgctgctgcattgttaaggtattaagactgtataagataacatataaggctactgtgttctccttttgctttgagcaaaatttcagtgctttcttttgttttaatctgctgatgtaaaaaccttttattgaccactgctccatagattgtttgcttagtttgtattacatgctttgcagaaaggtggtggtactattgatcttgagcctcgcctaagccatacatcagctgtggagcctacacttgctccggttgcggttgagcgcacaatgacaacaagagcagcagcttctgtaattttctacctcctctttctgttatcaatgttttcatttcaaagacattttacttcactttgcaacatttagtttttgttatcatgagcaatctttgtctatattctgtactaaggtttttttcaatataatctatgcagaatgcgttacgtcaacaaagatttgttcgggaagtcacaatacagtacaatctctgcaacgagccatggtactttcttgacctaccttctgatgctactcatttgctcatgaaagttccatccagcacgtactgcagccttttctgttgcatatgagtgcttgtttgtttcagcgctcaactcctcagcttttagaagcctttgtctaggtctttgttgagctaaggttgctcctactaaccttgtacctgattactttacttcaggttgaaatacagcataagcattgtggcagacaagggattgaaaaagtcattatatacttctgcgaggctgaaaaaaggcgaagtcatatacttggaaacacattataataggtatgagctgttaccgttaactatttggccatcacctgaagttatatttttgacttctgtggagcacagttccttcatttccccccctcctgttactgcaagttttcacaggtatgagctgtgcttcagtggagaaaaggctcgtcttgttggatcaagctccaatgcggcagacgcagaaactgagaaacaccagaatagtagccaccatcactcgcaaaatggggacagggcctcttcagaacatgaactgcgggatttgttccgatggtcccgctgtaagaaggcgatgcctgagagctctatgcgctccatcggtatcccgctgccagctgatcaacttgaggtaacgtcctgctttctaacattaaaatggtggataattcgcatacagaaaccacaattctcacacggttttcttgttacctcgacgcaacgcaggtgctgcaggataatttggaatgggaggatgtgcagtggtcgcagactggtgtttgggttgctggaaaggaatatcctctcgcccgagtgcatttcctatcatcaaactagcccctgcaagtccttcaagttgtcgtagcagccggttcatgaactaatttctcgcaacaatttaaggcaggagcttctctttggtccatgtcgcggttttattgtacaatgtacaatgcatccatgccatgtctgtgtataaatcaagaatgctcagctgctgtaggctgtgttgtgtgtagtattttttcccccttttttcataaactatttgagttctagttgggctgcttctgccccatgtcactgagatgtagctgttgcttcacaatttagctaacctgatgattattgttgaatggttgatgtgctgtaacttaattcagtgctgtgttcatctggggtgtttcctgaccgggcaggttcagacgtaggctatttgactgaacttctggaaattacatgtgatcattcctacaagaaatttagccgaactctgtccaaaacaggaagttgttgcaccgatgttgcttgcttcaaaaattttctcctgcaattgtagctagagaatacatgtggtggaatcctacatagtagtagttcgtaagaataagggtgtgtttagtttcatgccaaaattaaaagtttgaagaaaaaagctggaagtttatgtgtgtaggaaagttttaatgtgatggaatagttgaaagtttgaagaaaaagttgggaactaaacaagggctaagatggccgaagggatattttctgacgaggcgatagacatccatgagtggtgtaaacaatagacgcacacatcatggctatggaactttgttgtgtgtgctgctgctacagcaacatttccaggtgcattcgtgtctcatgctcgggcagtggtagtcgtacttccattttccagtagccctgtttattctatgtactactaagcttcgacattcttctgcatctgtatctcctgagtcctgacacctctcatgccgatc

SEQ ID NO: 15507 - DNA, 9543 bp, Oryza sativa
  unsure (1)..(9543): unsure at all n locations
ggagttgcccgcattccgcaaagcttttgttccgtagcctaanaaaacctatgncttggcccgggaaggccccggttggggccagggattgccaaagggctacgttcaggccggccacggtccgaaagncggcggtcacgccggccggggaccgcgcgaaggccccgggtcgagggcaccggtcgcggcaaccggggaccgcgcgggggaccccgttcgagggcggccgacggcacgaaggncgccggtcgcggccggcgacggcctagccaacacgagagacaaaccgacgactgacgaggcaagattggtgcggacgaggagtgaaggaggaaagtgggtgggtcccacggttggctagtgacttttggctggccaaatttggctagtggggggagggttttggccagccaaatggcttagccatctggttggagaggctgttggatgaacttttttggttgaaatggctaaaattcaacttagagagtcacttggagagactgttggagatgctcttaggagttaaagctccaaatcaccacgacgacaggagaaagctaacgaaccatggctacagttctcttttgtcttccttgcacaaacgaactagtgcaattgtgcctccggtaggccatctgtgatagctgtacttcgttgttcgtgtactctccaagaccaagcaaatagactacatcattgtttattctttttcctctcgatttgtgttgttatcctgcatctatatctcctgacgactcccatgccgaagaaaatcggaggaagaggaagaagaaggcgggaaggtatgcatgatgcgtccttccggtgatcgatggtaggaggtaagtaaaaatgcatagcttttggttcttcaggtttaaaatgatgggagcttattagagacgaggcagagcatagaggagtaaagataagtgatgcatttaatttggcatgtgccgatatggctaggtgtattgctccctctgtcccattttaagtgtaccataagtttctgtgtccaacgtttaaccgtccattttattttaaaaaattacgatttttttaaaaattaagtcatacatatttgaaaaatttatgattttttttaaaattaagtcatacataaattactatttatattttattatctaataataataaaaatactaatcataaaaacgatttcaaataagacggaaggtcaaatgttgggcatccaaacccacagggagtactcttagtgcactccactagctggattaggtatggagatcagttagtactcttgacgttttggacagtgacatggtcttaaaaaaacaattttgaccactattttttataacaatatatataaaaatataaataaatatatgattttatcaaggtattttgtaagacaaatatttttatgttatttatagtcaaagtttttaaagtttgataatagactcattcaaaacgacaaaaacgacaagtattattaagccagcgggaaacgacaaaaacgataagtattattaagccagagggagtattcatccacctgtgagtagtctgcatgtcgatctgagcttctgtttaactgagtgaacttgtgggaactaacatggatttaggtgggttttaaactctgtggcacttccaaaatcgccatagaaggttaaaggtttatacagtacggaagaaaagtttactcagacaaattttcttcacacattcatgataatttcaaacaacgtctagatatgatccgaaattaaaggtggctggacaattgggaagtcatcaggaacctccaaatcttaatagtttcccgtagtctcagtagtatcattacatgagactagtctttcagagagcgaacaaaccatggctgtgtgaactttgtttcctcctcttgtctgtaaaaattaaaaaaacaaattaatgtctcaggtacactagtgtcttctgcatttgtatctccggtagctagccacacggacgattgcactcatacttccgtcatgaatcgcttcgcggagaaagaaaattgatcgaagcattgcttattctaccttgctcgtaggctttaatatatttgtgtatttttatctcctaacaccagtacaccacccatgccggtcgaaacagtcggtttcactaatgagctagacccaagaagaagaagaagaagaagaagaggaggagaaacagaaagaagaagatggaaggcatgcatgatcaaggttggaaatttcggaccaaaatttcggaaatttcggtcatttcggtgacccccgatacgatattaattcggccgaaaattttgaatttttcaattttttttcatgaatttggataatatttgttcaaattcaactaaattttgttcaaaattttgaaaatttcagaccgaaatttcggtgacccccgatagaaaaccctgaaccgatatagtgaaccctgtgcatgatacatcctcccagtgaaggagggataagaagtaaagtggaaatatgccatatgaatgtgaggtagtgcaattgtggctagagaattgaagtcatataatacatgtggtgaaatgctacatgtattatatgatggccgaaggggatattttctgacgaagcaataggcatcaatgagtggtgtaaacaaatagcttgcaactttttagacgcacgcacacatcatggctatgaactttgttgtgtgtgctgctgccaggaacatctcctggtgcattctcgtctcaggctcaggcaatggtagtcgtacttccttgttccattagactcccagagaaatccaacaaatcacagcactgtttattctatctactactgatgttcgacatgatcctgcatctctatctcctgacacctcccatgccgatcgagaccaagagcgtttttttttttttttttttttttttggaaacgagctacccaaagaacgaacaggacgacgatcgaagaagatgaggaataggcaagtgaattggctgtgtacgtacgtagatatcagctggttcaggtttaaaacgatgggagcaagagcaacagttaaaagatgagccagagaagacatgagtagcatgccctgaatcgagacaattatggtggtggacgcttcaggcgataaggagtccgaactgcttacctgtcaatgagccatctttaacaattggctctgtgagagccgaatgaagattggggagcggcatcgtcgaggtttcgacactgtcgtgacactggtggcttggacaatttggaaggaacagaacaactgaatcttcaatcaacaataaaggtcttggaccgaagtggcgaaagcaatggcagaggaggccatgctttggaagtcggctaatcacgagatccccgctgtttggcctttacgaggtcgtggtagccaaatttagcgcgagatattcctatagttttccatagtgtcctgtatcggtcctctgcttgttttccttttatcactgtaaataacttttatttctcttaatgaaaaaaatgcgctccttgcgtattcctaaaaaaggagtaaacacaagcctttggcatgtatacaatatagtggtatgtagtctggattaggtgtaaggctgtgttcgtatgtaagtgctgggtgttgtgcacggaaaatggagcgatccattagcgcgtgattaatcaagtattagctattttttttttcaaaaatagactaatttatttttttaagtaactttcgtatagaaactttcaaaaaacgtaccatttagtagtttgaaaaacatgcgcgcgggaaacgatagaggagtgctgttggtgcactttgtaaacatagagagaagaaataaagttgttatctactttgagagttcttcgatttgtgttttctcgggtgcggcggtccaactggcgggacaccgacggtcagaccgacggtatcacggcagtcagaccggcggcggtgacaggagctagcggcagatttcggcggtttgaccgatcgatctatatcggttagactgacgtgttccagacagtcagaccggcgcaactacttcggtcagaccgctatccatcgaatttgagggtaactttttattccgcaaaaagattaggtttttgggcataccaaccattcactcttctctggttggcttacttcttgtgtttcgatcctacagaaaataatctctctaggcaacataagctactctgcagttgatattttcctcttcgttacacatgtgatactcgttctccttttcttaattatctctaattactatatatctctcaatatgtgtgcagtagttgtgcttgcaacacaaacctcagtataccgatgctgctacgtgaacaatgaacccgttgattccataccaaatattcagctgtctacatgtctagattgttaattaattctcatccatgaattcgacgggtggcatatctcccaatgtctcccatgccgaaataaggatcgggacattgacgtgctagcaaggaagaatagaattagctagggaggaattaaaggaggccaagaaatggcaacgacctacatgaacatcgatctgatctgtaccctcactgtgtcatgcattctgatcgatcgcgagcgctgcttgtatattcggtagctaaatggtaaggaagatgcaaatatatgaacgtgtaaaagaagagatcttcttgaatactttaaattaattagaacccttgatcaataatgatctaacggacagagagagaaggtactagaaaaaaggtattaaaggagtgggccaggtacgaaaggtggaagggtaaaatagtaattgatttttattaaattatttttcggtaaatggcaaaagcggtggacctcgtttccatgatctccatggcggatggcgcgggaggaggtgttctgattagggccgcgtcaattgatttgagatctccggtgatcgatctggtcaatctatctgcaggattggattgttcgcttgatcgcttcatcactagttggtcagttggtgtcgtttttctttcgtatcctgtagctgtgatctcggctgcctgacagcctgaggcccttgtgcttctgaaacttctgattaatttgatgatccgaacctgagatgagattgactgccttgctgttagttcgatcattcaagatgttcgatcgattttgattgtctcatcaatgtgcatgatcgacctgctcgagtacccattaccctttgccttcatggtgaatggatttgtgcagtgtaaaaaattttgttcctaaattaccctttgaagattaacggtggataacaatttattaaggaggtacctcaggtaccttccaagcactgtaaaagacctcgtaaaagaaagaggaggagagcgaggtagtgcaaatgcaggtaggccgtaggcaggtgagaatggtttttacttaccctctgtatgcattctgtggtatagttcaggcttgacatggccaaagtaaaagtttgagtactggtgagtaaagaagagggagggaagatgtaaagaaatgcataagtgccaaaatgtactcaagtggcagcattgtcagtggtgataaaaaaggatcatgttttttttttccagcttcttgaagtgcagggcagcccagtgaagtactcttgactctctacagctatatatcttggatgtctgcggagtgtagacttaattattccttgagatgttagttcaattcgatcaattcaattgcattgcatatcaaactttggttaattaatttatgcctcagatgaaggaataatgatccacatactgctttccatgcagcatagtgtagaccaagaagcgtgaggttaagatgttccatgtcttgaagaaaaggggaaaaaaatcagacaatcaattgtactaaaataaagtttccggcagtatatatttgaaacttaccaggatacaacacagccatagtaagaacattacaaaataaacatgaagttaagttagccaaaggttttaacagtgtctggtgttgggattagcttcttaagtcacaaatcatatgccaattaattaaagaaaagcttcaataccctgtggaatgagaaggcaccatgcacaaccacaaaatttcaagaatttcatagagcggtgaagttagtcactgcaacgatgcttagtctccctggtccttcctacaggatgcaggtactagacaagcacgcagcactgatacagaagacaggaagaccgatgtgtgtgtagctgcccaaaggaagaacgctgcaagctgctcaagatttggtggcgaatcactgcatccgtgctactcccagctccattcttttttgtttgacgttggttagctcaaaatcgaactaaccgacgtcaaacatttgtgcaaggaggtaatacttagctacatgtcaagacggaacgtcttggaacttttttccagtcaggtactcggggataggggtgggcgtgcaccgggacggtccgacgtagactcgtctcatgcgacccacctaggttgtaaattaacggtgtcaaacgggggttttggtgggtacaatgagtcgatccataaaaaagaagatcatatcctgattacacatataacatgccaaacaaagtaaaagaatgtagtagtaaaatataacctattgatttcttgatcagaaatgtttgatttcaactgatgttaattaatagcaacgacttgagattatcttttctatcaccgacgcatcatcagtgctagcacatacaactatagtagcttcagaaattacagcaatgacaataacacttagttgaagttccgattcataggaccagatcgaatacctcaggagcacaagaaagctacgagtagattgaaattaagaaaaacaagtgctttctggatcaaaatcgataaaagaggaataactcagaagcatgaggaagcagcagatcgagtagatcgaaatttagaaaaacaagtgctttccaatagatcgagtagattgaattttttttttaaaaaaacaagtgctttctgttagaataaatgggttaggcccgatttatttctattaaaatctcaagggcccataataaatgttaaagataataataccaccttgagaattaaaagtggagtatctcaacttaaatagagagttattggaggctcccggttgaccgattgaggtggggatcggaaagccacgcgcgccgggacggggcggggcgggcgcaccgtcgatcagattctccacgcattctttccatcgctggttggtttctcttcctctgtgtgcctgtgctacctctgttctgttctccccgcaagtgattgggacgagcagggcctcgaaactacaccttcgcctgagatctgcacgcgtaggcgggtgatcaggtttttggtttgcctgagatctgcacgggtaggcgggtgatcaggtttttggagagtgcttccgcatgactgctccgctcgcttcttcgtctacgttcggttaaaactacaccttcgcctgtaatctgcaagggtaggcgggtgatcaggtttttggggagtgcttccgcatgactgctccgctcgtttcttcgtctacgttcggttaaaactacaccttcgcatgtaatctgcacgggtaggcgggtgatcaggtttttgggagtgcttccgcacgactgctccgctcgcttcttcgtctatgttcggttcgttctgcatcacgcgatgtctactggtggtggtgcttccggtgcggcaggagatggggcgccaggaacaggaggtggcgcgcacggtgcggcaggaggtggtgcgccaggaacaggaggtggcgcaccgatcgagaacaccaacggaggcaattctgcctcacaatccagcggagggacttttatagggtataaacatccttctgctacctttctctttgttaaatctgtcagtcgcaatgttattacgttgtctcaacgttaatgcttattttacccttaagcatgctcctggttatgtttagctttattactagatcatttcacactgtgcatgtcatgtttatagtcttaatattttggattaaaatatgccgatttatgaccatatttccaacactctcttgatcatatcaataaaagaggaactctaggttaattggctacctacaaagaagagcccaagtgttctcttccttgtcaaatgattgtgtcaaagtcgagggagagaactgataggacgtactccctccgtctcaaaaagactcaatttctgggtttccgtgtctaatgtttaaccatccgtcttatttgaaaaaattatgaaaaaatttaaaaatataagtcacacataaaatattaatcatgttttatcatctaacaacaacgaaaatactaatcataaaaaaaattcatataagacggatagtcaaacgttgaacataaaaagactgagtctttttgggacagagggagtagatgagacgctgttgcaccattgtggaggaaagcaacaggtggcgtcggcatggaggactagactaaacgggaggcactgccatcacgcaggcgcggatgcatggaggacaataggagggaggaggcgctgccatgccgatgttggtgacatgagaagggatgaggagacaccactgctgcgtgcttgtacgaggggatcgatggaggaagacctagcgaagacgtgaggtttgattaatttagtcaaacttgttaccctttggagccagaattttgggaccggccaatgaggctggtgggtcagtccggaccatgcccatcccaactcgagaaagccaaagggccatcacctttgcatgtctcggtgcctcccatgccaatctactaagcatacacattttggttggaattataagataggtcgggttagatcgaacctatttttaagggtgtttggtttagctatgaacgagttaacaaaaggaaatgactattcctcatgtgtcgtggtgatgatatatgtgtctatctatcaccctaatctgaaacgattgatagtaattaaccaacagcatagcaccactagcatgcagctaagggacaatgagatagagcatgaanacttgcatatactgtatanaggatcacannatgaggcaagaagacatacngttgggtatgtgaaaactataagaggtgtaagcgtgtaaattaaagatctgaaanagtcttatgttttccgaaaaagtgcagtagaaaaaagcttggattggtggacgtattacctggttattgactcaggccccgtcaaaagaagtcttgattgattgagaaagtttgggactgggaaagagtaaaaaaacccggtgcacatctacctttttatggagcatggacaaaattaacttgtaggcagtaattgagctagcttctcggttcattaaagctcgacttgttttgagtgtgtatttaacgagcttagncaattgggggcatttttggagattgggctttaagtcatttgctctttaaccgaaccttttccccctgtttatttctaacttcccctttttctatgaaaaca

SEQ ID NO: 15508 - DNA, 14059 bp, Oryza sativa
  unsure (1)..(14059): unsure at all n locations
gccgtgtgatggataacaacttttaatataaaacggagggagtattaactattccatccaatcatatttatgttagtatttatataaacttttcaagcagtaaccattaaatatctaagtctggaggaagggctggtccaattacacatgttcgagtcgtttgttaatttgtaaatttcaccagtcgaatgtagtgataatgacactacataggagggagtatataagagtttttttaactgatatcctggctatctagatttaaaatatttttgtgaaataaaacgattttactatttactattgataatgttgccttaaataatccttggtaatgaaagtatatatgcatccgttataaaatataataacggaggcatatatactttcatagctaaatgttattatattttagtactttttttagtgaagttttttagaactgtacttacaaatcgacctgccattctgattcatgtataactttcatatctcaccatgttattgtggagttgtggagaaggggaacaacacaacttttcggatagagatggaataaagttttgcaaacaaagacatcggttgaaatggattcaacttgttctacctacgatttattttgagaacgatttattggatctttatttgtccattgtgcggcaggttacaaactttctactagtacaattatgtttttttacattgtttagtacaatcatgttgaataaataaaccgatgaatgtccttttaaaacagttattgttattagtactacctggcatattttatagtctagcagacgacaacagttagtactgaagcaaagttatcaatggatgaaacgatgtttatttaagtacaggtgattaacaaatcttttgaaaatgaaggaaatatcaggagaacaaacaaagctggaggaacagggcataaaacaaagtgcgccgcttatccttatacttatcaactaaaatttaaattttcaaccttaaatttaaaagtgattttaggttttttaatcgaaatttatttttgagtctttacttttggatcgctaaaacacatatataaaagttatattcacagattactttttatctgcaaatataccgaaacaatggggctgaaagtggaaaaaacagcgcacagcacgtgaaatggcacttttgcagcttgaaccttctaaacatcattaatttggtacacgcattaatttgacttatgactccttttcttttcaagcacttcaattcattttgataattgtacgacaaaagtgcccgaatttttaagattccctacaactggtccatcggttcccgtcaaaaaattttaagattcatcagcccacagactagtggagtactactgtaagccaacattaaaacttaggaagtactgctgcattaaaaaaaacaatcatatcaacgaatctggattagtgtttatccgagtttataattaggatttattatttgagaaaattccctatatacccctaaaaatttactcaatcccttcaatacccctgaatttgacattatcccttatatacccctgagttttcattttgatctcctctatacccatctccgttagttgaccattagttgaccgttaaatattttaaaatgactatattacccatcctatacatatgtgtggtacctacccaataaattttcatatgaaaaataaacttatacaaaatacaagcaatataatcatttaatgcccaacttaaaaaataaaacttattattttttattttttaaaaattatgattaaatccatacattagtttcaccataaaattaagagcaaaaactaaatgttatttaggtttaaatttttgggaagatatacgaaattcatcaaatttgatctgaaatttatttaaaaattttaaatttgttttctaatttgtgataaactaattatatcccctttgttttttcacaacgaatcttttttcactaaatatttgttgaaaagtaattttcaaatcttatgcagaacttttttttacaataaatctttttttattttaatgaaataatgttttattttcaaaaattcatcacaaatatttagtaatttattccttattggttttcacaactcaaataatttacacataaaacatttctagcttttaacaatataacaaggacaataaagtaatttctacaataactaacggtcaaactaatggtcaactaacggaatgggtatgtaagggatccaaataaaaactcaggggtatataagagatcaaacaaatttcaggggcgtagaagggattgggtgaaattacatgggcatatagggaattggcccttattattttaggaccgaggatcggatatactactatttatttatttatttattgtttctgataaagccgaacttaaaacttctggtacgagcatgaagtctgtttaaaagatatatttaggttgcgacttagtacctccatttcaaaatttaaatcttattttacaatataggtatttctatcaccatctacactacttattatatcatttacttttcattcaaatttcttctcatactacccccaatcatctttttacttaaccctctcaggctctcacatttattgatgaggcatcaaagtcttttcttctcaactttaatatctaatactaaataacatagaaatgcttatattttaaaacagagaaaatataagtcgtgagtcagatgtagcttaaaaaacagttctgaataagcttatgcttgataggttgatcaactacaattggtaacatgtaaaacataaatgaagcaacaaaacataatttacataaaaaaacttgtatatctgtgtttgttagtggtttaatagcctatgtaaaaaatagtctacgattaaaaaccatgaaaccaacttaaatttcaaaatttaaaatttggttgtgactatatgctacaaagaagatgatgagaacgttctatttttttttattttgaagacaaggttatagtgataaaactaacttaagaaaactctaaatcaacactgaaaattggctctaaaattgaaaattggctttgtcttactcttataaccgttttttctctcgtatggaacaatctactacttttatatcctaaaatagtaatatataatcggattaaatgtaacttaataagacgaattgatttgtctaatttcaatttgggactctttctaggttgatttttttacggagaaaatattttaccacgaagtaaaatatttgtatatgattatcaatattataatagtactacttcattaagtaggcaacgcggtgatggagcgccgcgtcgcaaactcgcatggcgtacgtgtggcggccggcagcgagccaaccgctctcactcacctgcacctgcacggcacgcggctgtatggacgacgtgtcgcatcacgtgatgttggcggcagcggcaacaggcagcaggaggaggaggcagcaaaaggtaagaccatatttagatgggattttaagtccctatcatatcggatgtttagaaactaattataaatattaaacgtagaatattaataaaactcatatataatcttggactaattcgcaagacgaatctattgagcctaattaatctatgattagtctatgtgatgctacagtaaacattctctaaatatagattaattaggtttaaaaagtttgtctcgtgaattagtttttatttatgtaattagttttgcaagtagtctatatttaatactctaaattagtgtctaaatatagagactaaagttaagtccctggatccaaacaccacctaaggccctgttttctccaactaaacaaggcgttaggacctgtttagttctgaaaaaaaattagatgtcacatcggatgttggaaggggtttttggacacgaataaagaaactaatttcataacttgtatggaaaccgtgagacgaatttttcgagcctaattaatccgtcattagcacatgtgggttactttagtatttatagctaattatggactaattaggcttaaaagattcgtctcgagatttcccctctaactgtgcaaatagttttttttaaaaaaaattctatttttaatgctctatgtatgtgtgcaaagattcaatgtgatgtttttggaaaaaaaatttggagaactaaacaaggctttagttcccacgaaaaaaaattcgccctatcacatcgaatgtttagacacatgtatggagtattaaatatagaaaaaaaactacttcctccgtttcacaatgtaagactttttagcattgctcacattcatatagatgttaatgaatctagacattagtttcacaagtaagactttctagcattgcccatattttgtgggcaatgctagaaagtcttacattgtgaaacagagggagtaattatatagattgcgtataaattacgagacaaatcttttaagcctaattactacatgatttgataatgtggtacaacagcaaaaatttgctaatgatgaattaattaggcttaataaattcgtctcgtagtttacaggtgaaacatataatttgttttgttattaatctttgtttattattttaaatgtgtgtatgtatatccaatgtaaaacgcacagacttttcagcctgaagctaaacaggcctaagcatccgtcgtgcagccgccgtggcagcgactcggcgggcggcaatcagggcttgtttggttggtgccctgagcactaagcctgacaaatttgcatgcctgagaggcacataaccagttcatgaattttgcctgtccagacagcctgtgaccttacttgtttggttggccaccatggcctgagaaaaaagactacgattatgcttcacacaattacagctaaacatgtttatggcaaagaaacaaatcttaccataaaattgcatcgtccctccaaccaaaataaatctaaaccatggaaaaatcaagcgaatgcatcaagaagagaatcagaggagaacatgagaaaagagatccccaaatccaatgtatctgacatcaagaagaaaaagaaagctgaatacgagaaaagagattcccaaatccaaccgcatcaaccttccattatttctcacatctgcatgctaagcctaagcaagaccataggaattcctcacatctacatgttaagcaagattaggacacaagatccagcaggcggcggcagctgcttcgtgtggacggccggatccaacgatgcagcagagaagacggcatctgatctgacgaggcttcgtgcggttgcggtggcgccagcatcacacgttgtcgtcgacggtggctgtgctggcttcactcattgtcgtcgtcggcggcggcggcgacggcctcgtgtgatgtcgacgacagcggctgcataggcttcacttgtcatcgttggcggcgacaacgacctcgtgtggtgtcggcagcggcggctacgctggcatcggcggcgactcgtgtggtgtcgatgcgacactggtcagcagcagcatcccgcggcctgtctaaagaggattaggaatgtaactatagagtgctgctacgcctggagctcaggcgaccgtttttggtcgcctgactcaggctaatcccacgccagagggattcaggccaggcgagggagaatacgcgtcaggctagtaaccaaacaaccacatgctatgctcaggcttgtatcaggtcaggcaaattttcctcagggtagcaaccaaacaggccctcaatcgatcactttgttttctcgccggagcaacagtggcagtgatggtgtctgtacatagacaactatggcgtccacgtgcagctaattagcctgtagtaggagtaggagtatatactttggcagtttggcacatgctaggtgcagatccttcagccacatttcgccgcataatgcgaccaaaagctgacttgacaaaagctgcctgctttaccctagtgtttcgtgtgtgcttctccactatttgtactcccttcgtcctcctataatattctttaaaaaaagttcaaattacaaacaaagaattatccctctcaatttaaatccaaacattattttacactctaaatattttaaattggtcaattatccatatatttaatctaaagtggttttgattgaccgtgatgtagacgtggtagtccagtcaagaaaaaaaaagttgtcccacacattagtggttatacctcggcgcaccatgtcctagctgacgtcgacctgccgctgcaactgtccacgggtgagctggacttactgtttacccccgtgcttttctgtccacgcatgttgtttttcttttatgaggtgagtccacgcatgttgttgctagtggtgcccaccaccttcgcatcccagactccgctcgcttagtggtaattgggcgccaatgccggagttcaaagtccttgttggtggtactggtactagcaccactccccctgttcatgatcggcccgcctagtcggcaccacatcaaacgtcaacaacggtggtggtgacttcaccatggctgccacaaccgtcatcacgggaacaggtgatggagccagctagctaacgtgacgcttcttcttatttgttcttcttcttggccttgtcttgcactagagaatcatgtcaaatcaaagccaaaaatcactaggaagtaggagcttgaggtggcctttgtcgtctccaaatcgagatccacttttagtgccttcctagatttgcctcagcctccaaattgagctccatctctagcgccctccccaatctgcctctaggctccacagtcggctgcttcctccaaatcaatctccggctccaccttctccttcttgacggccgcaccgtactcatcatgatgcatctcgatgaccctcctccctgacaaagccgggtgccaggaccaatctcggatagccacgacatcaacgacaaggagtaatgccatcaccattaagatcctcatacatgagttcctcccatctggtcaggtagccgatcgagcaaaaatacttaaaaactattactggctactaaaattaatctttgctactcagtttcgaagtgttattggtaatacaacactacgtctatgttaacctaatgaaaaagcgctagtgtacaaaacaacgacaggatgaactaagaatatcctcacaaatgctactagaagcctagaacccctattcaaaactaaatcattcatccctattttctaagttgcaatcgacacggttgtacccttgttaatcgtaatcgaagggatatgcccacgaagatgccaatgtcctggtggaagaacaaatggactaagggacacttgacgtggccattgtggatcctgctaaaggattttgttactctacaattagtaggacatacttttttttttgtccatgaagaaaaggtagcaattattcttactactttacggaagtgtacgcagagcatgtacaataatgatgattcataatccattctatagtttgggcttattttgctgaggatgagagagaaaggagcaactcgagcatgagttaggagcaaacatagttatctgaaatgttgtattaactccgtttttaaatatatgatgactattttcttaaactgtaatcaacatatttgttcaattagtcaggtatatgtaaagtgaaaatagtatcgtcagatctctctaaaaataatttaagctttatttgcttatttgcataaatatttttataaaatacaaatagtcaaacaaatttaaaaaatcaactgcatatatatttaaaaaataggtagtaccatccttttatacagtacataacttttataaatactaagaatatttaaatggtctctgaatgacatggacatcaaccaatcaagtgccttatatatatatgattaattaaacgtgccaaatcaacttttagtgaaagtgccaagggaattcaggccaagttagctcccacctacatttcacaactcacaaaagagcatgtaaaaccaatcatgctttctaggattactgcagatgctctgtagccccaacggagagcgcgcgggtgtccttcataagtatataggtttttaaatcactaactcacatcccttcatttttcgcactcgcacttttcaaaccgctaatcggtgcggtctttataaaaattttctatataaaagttgctttaaaaaatatattaatccattttccaaaaaataattagtaaatacttaattaattgtaagaaaatggtcgctctgttttgcgtgcgcgggatgtgagttcccaacctcacctcccgaacacagcctaatacgtacatagaaaagatatctataaattatttcttttatatataataagttgcactgcttataattagcatataaatgaaatgctccacgtgtcatgttgatcatatggttccaaaccaagcttgttaggttggaactagcaacctcgatagtatgtccttatcgtggatggaatcatatataaatagttgagggaggcacacacatggtattctgcttggaaactactctaaaatattattatgcttaggagttaggcgtacataatttaatttaaggtgtatttgagagggggggggggaaatggaatattgagaaatacataaaacgggatgagttattagcacataatgaattgagtattaattattttaaacttgaaaaataagttaatatgattttataaagcaaccttttttaagaaaacttttgtaagaaaacaaaccgtataactattcggaaaacatgaatgtggaaaacgagagccttttctcccctttgttcttgtccctaatttgtgagaatatggctaagtagtattcataaatgttgctagggttacaacacattaattgattgtagagcattgctcagcacaataaggtatgtcctccacgagattatgcaatttcgttgaattataacatagaggtggactggaccaattgcaagatggtgtcgtttaatttaatttgtctctttcagtaggtttcaactatttttaccactatgccgtgactttttggttgaactagatgtgttcatgggtcaaacctgatctttcgatgaccgagatcataccttcaagtgttctaactaataaacccaaaagaccaactcaaaattttctcgtaaattaatgaggctctggttggaactcgagggaatgtcgctacggaaagagaattatttgctatcaaaactttaacaaaaatgtttggtaaaagctatacatttgtcgataaattttctcttaaaaatttgataaatataatatgtaactatcatacaatttgtatgtaactttcaaaatcccatgataagatgttaatttcgcgaactagaggtgcacgctatgattttttcccaacttgcatgaatcttgaggtaaattaaacggtttaaaattatgtgaaaattacatacaagttacattgaagttatttatgtaagttacaatgtaattacactataattaaattgtatttacatttgacaattttttggaagaaaaattatcaacaaatatataccaaaatcaaaatgttttccatattttgaaaaaaaaagcttctaggctatcatcagcctatcatgttgaattcatgatcagtttgaagagagaggagaggagagagaatgaagatagaactgttttgaatggagaaataagagggggaaaaacaaaaggggagtgaagagaaagatgaaagggatagactacgctctctgagaaggacatggaaaggaaaaaataaattactataaaacattagaacggtatatactactatctccgtcccatattacttgtctttttgagtttttgattgtcaatgtttgatcattcgtcttattcaaaaaattttagaattattattaattttgtttgtcaattgctttattatcaaaagtactttacatatgacttatctttttttatatttgcactaagttttcaaataaaacgaatggccaaacgttgcaaataaaaagtcaaaaaagtcacctattatgggacggagggagtacattttagtgagttgaacaaattgtactatttgataggcatataatgtgaatcaaattaaagaattaagattctatttgatctgatgctgaaacaagccttaccaacaatgttttctttttaaaaaaaaatgcgaagaagtgcccaacccattccattgcaaacgaaagttatgtgcattggtttgtattaattaatcaacctcaaataaaacaacacaccacacaccctaccagtatttttgaacagatcaaacatactgacttatctaatttttgacttactaacatgataagatatatcttttacaaggtggcaatgcacagaggcaataacggttgttggtgaaaggtggtggcatagagtgaaagacctagttaatctagtattgaggttggtaggggctggctggcgaagaaggaaaattggtgtgagggtggacacgtgctggcattgtttggtggttgttaagcttgtgggcgtttagggcacaactacaaggtgacatacgagttctaggagaaagcccgatctatagtattctaggatagcagtggcaatgcctttggatgctgcaactatcttcaaggtggtgtcgaggtgcccttcttcctatccgatagaaatttttagatgaaatgatatccagatatccttggacgggcaataataatgtcttcatcgtcgcaactttcttggtgttgtcggtttggaggatacgttttttgagtgcgatgtaggccggcgatgattggtcttgaatagaggttggttcctaaatttgtgctatgctatctccttcctagcggtgtggtctttttccccctttctttcaggactatataggtcttgtttggatttagggactaaattttagtccttgtcacatcggatatttgaacactaattagaagtattaaacgtagactaatgacaaacccattccataaccctagactaattcgtgagacaaatctataattaatctatgattagcctatgtgatgattcagtaaatatgtgctaattatggattaattaggcttaaaaaaattgtcttgtttattagctctcatttatataattagttttgttattagtctatgtttaatacttttaattagtgtctaaacatataataatttataatttagtccttgaatctaaacacgacttataggtagtctaatattttttcatgctacgaagtaccttgatatggaactttgtacagtgcgttttattccaaagagaaagatgactataaagtagtaaaatcaaacatgtgcttgaaacttgctttttcacaagttcatccattatcccgaactagaatctgctcgagcgaaagcaatctatcctcctagagtcaaacatgtcataatccctgtcctcctcagttcgtatccaagaatgcgatgccaatctccaggacaaaggggaaggcgaggacggatgatcccgagatgccaccaccgttgtcgccgtgtttacgtatattattacttcgtcgggaaaaaaaaatagtaagaccccgacagaataattaactatctgtcacttttataagtggtgttaaattatttatcaccagaccatatgctatagatcctatatgtaatagacagcgagtgaaaaataattaattaccatcttttaaaagtgacgagaagtttaatgtcctagccccgacgcaacacaatcacataaaaaaaatttccagggggtctgggtgtaaaaagaaaaggtggaattatgtgggagacgcaggggcgtggatgcaaaaaggtgggtgcgtgtcctcgaatccagcgccgcgctcgcagcttcccttctccccgtcgcagcgggggtgatgactcagcacccccatccccacccccccaaatctcctctctctcctctcctctcctctcctcgcgtataaagccggcggccgcttctccgtcaagctccccccctccatgacgcctcgctcctccgccgccgcctccgcctccgcctccgccgccgccgcggcacagcgtcggaaaccctagcctgcgcgggggcggccggaggacagggaggttgtttgtttgtttgtgtgtatcatacggatacggcggcatggccagcggcgccgagtcgtgcggcagccgcgggggggagtcgccaccaccgccgcggacgcggggggcgtcggcggggggcaggcggcggaaggcggaagcctaccgcgaggttctccgccggatccgcgggggcggcggcgcgctcgacgacgacgagctctgggcccacttctacagcctccccgccaggttgattttattttacctagtataataccctcttcttcttctctctcgccgcctctgctgctgctttgggatttcgacgcctcgggtttcgtgcgcgatgaagggaggagcactagctgctactgcgcgtgtgctgtggattctttgggggggtccagcggatcgcactgcaggtcaggagctgtgatccatggccgctacagctaaacatcatgtgtgggtgtgtgtgtggcttgcctatgccctcttccctttgctgctgttgctgttgctggtggtggtggtgaaaagattgcatcggcggtcgtgccgtaggtcgccgtggtccacgcatgctgccactcgcggatcagggattcagaggtcggggagatacgcccgctggcatttctctatctatcgatctctctctctcctcttcggttccagctcttcttgttgtttgtttgatggccatcaggccaagctaccaccaccagcacctccagcaggagcagtagcaggctagcagctagctcggtcgtgtagcaatcactagtacaagcagtacaacacctcgtagtacaagttgctgcctttttgcaaccacgtgaggaggaccatactgttttctttctttttttttctctctctctctctggataagaagagtagaagactgagctatgcttgtcggcatacatgtctgatattaattccatctctctcaagaaaatgaaaagatgtttgatattgactgtttatcaaaacaaggcttctttttatttttttcccccgtgaatagttatccttgtccagtatatgtttgttctttcgtaacaagtatattttgagctagcttgccttttatcatgccagaaatgtgctgctttctgcattcctcgtaacgattggcactgctttctggcgtgatattacacctttctcgtctctacttcctttggtcattttgtctctgtgttccatgtgttaaattctgggcttgtcttgccacagtacatagcattagtcattagagtagagccttaaaccaagaaactaagcaaagcttgttagataaagtgctgcagcattgcatacacatgcctttccgaagcccttagcttgaataagcgacatgctgagaacttgctacttgctagcattagcttgaataagccatgcatgttattatgatctaattgcagacatgcttggcttcatgcattgaacaggtatgctttggatgtgaatgtcgagcgggttgatgatgttctactgcacaagaggttgcttgaccaggcccgtgaaccaatgaatgggctggtcttcgatgttcgtcgttcgcaggtgattaatgcataacatgacctgtctacctcttttctgaaaccgactaggcatcgcttgatgaccgtcgcatgctcgtatattggctagtgtctaggataagacctcaacattttcataaccaagtgctgttagacaccacagtaccatgtgacgtgttgtgtaatacgatgtaccttttgtgccatccttacaataatcagttaatcactatcctgtagaagtgtaaatcacatatccttgattttgaaactgcatttgttaactgctggttatttttattttatgtacancagctgnnntnngnttttntaaagcttgtctcactgtttcaatt

SEQ ID NO: 15509 - DNA, 5671 bp, Oryza sativa
  unsure (1)..(5671): unsure at all n locations
cgataaaaactatattgggagacaagataatagaggctagatagtatagagtaccacgagaacgatggatacccgttcaaggtatagattaggaccaggataattttccaacgcgagttgtaagatgaccccgagaatatttcattataaaacaaccggcgccatatacaagatgacacatatatgtcataaagtaatacgataaataagatggaagaagccccccggttaaccctgaatggtaagaggatttgaacccattttattcccttgtggtaaataaatattacacaccccgtcccctaaatggtaaattccccccggaaaaacggttaacaagcccccatgcccttctcnaggaaagatgttaattatgtgtccaaatttcgctttttgaaaaataatttcaatatccttttgtcaagcttctgagaaagtacccaaaacaaacatatcttgtatgattccttaaaaactgttgcatctcgatgtccttattggaattcttcgcatttaagtagctttttggtcgtactgatcctagggtcagtattttctgatatgtgatatcattgcaggtgtttccatgaaattatatttgcatgtgacgataagcctaagcttcttagccaggtaaagtaataattcttattttgagatggaaaatatcttttctttagtagtagcatatcaatttgtgctattggtatgtgaattacattttttatgtgacaatttgttatggccaataaggttgagcctcaaattgctgaaaattctgcccacgtaatgccattaatgcatgcagttgatgttgttgtgaacttcaggttcttagcaatgaaataggtacttgcatttgtaggctacagccaacgtgtagtctgttgatgttacctaggtccaggatatacagtttcgttcagtctaatatgcagaatgacatgcaggcaccactaacatgcattgggtcctatatcatgttgcacatttctgatgtactgatgtgtttggacgttaaatatgctgctagagcgaggtgagcatgattttctatggacaacaggattagtatgattgtgaagatccttgaaaaagtagagttcagtcagatacaatcatacataagttgacagggagattggattattatgagtacattatagaaggtcaactatagaaagttgtaacagagtggtcccttttgcgttcatctgttagttgtggtggactggtgcttttatgttgtgtgctgccatctttagtgttggtaacaatgtcttctcaatactgatctatttgtccacgtgctagtcaaagtatgctaagcacttcatagaaattaaagtacctggttatccataggttctgctctgtaaggacacttaattggcaaacacatgtacactctgcatgagagttcagtattttcatgagtgaaggtaatattaggtgggttgaaagttcacttgtacattctaaagataaacccaaataagaaattaagttttattgcacctgaacttatttccagcttaatttgaagacttgcatgtttttatctgcttttccccaacaatgcgttcacatcattttaaacccaaatagccaaatctgtggttcagctgctcacattttgcagaattcacaaagcatatccagttatatgtggagttgtgtgtgtatcatgatatcacattgcagactttatggttttataaagttgtgttttttttttggtttgttttgcctcagttccgcagtgtgaatctgttcatctgtatctgaaagcataacagtaacagtttattgttctgcaaataataattatgaaactttatcagcttcaagcaacacaagggaagaataaaaaagggctgttatgttcaaaagttatattcttgataaacttggttctgttcgctagcttcgcatgattctcagtactgatgtcattatgcccaagttatttacttaattactttgttttggggacaatttacaaaagatctgattgtttttcatccagctaaccgctctacttggggaacttggccttaacatccaagaagcacatgcattttcgacgagtgatggctattctcttgacatctttgttgtcgatggctggagtcatgaggtaacttaatatttatcaattgtagttcctgtaatgaaaaaaggaaccatctctattcttgcttgccaggtgtatatatttcttattcatcttgaatgtcaggccatttaaactggtattgtaatgctcaactacaatttctaccaatgtaaataaatatttagtcaagtaatattgtatattctcagggtaagattgtgaattaaattcagatagtgcgttacacttactttttttctaacctaaaagctgtacaataaatatcagatacttacaaaagcctagagcatacaaaaattgttaaattttaaaacaagaaaatgttcagaagttttataaacctttatggaaagccataaaatttctgaaaactgtacatatatatttgaacagttgcaaatacaaaaattaatattattttcttcgatatttaaaatttttgagattctagttaaatatctgcgtgttacaatgatcttgcaatgaatatgtcgtaaatccattttgatttgattttttaaactaatttgcacaaccactgtatagtttattttagtaataggaacttgtattatacttttagctctatgttcaaagttgctagtagtctattcattatactggatgtttttggaaccacattaaattgtcacgttatgctatatacagtatactgttagcattttctaaaattagctgaaatgttacttgtatctatcttaatataatggtaatgctatttgaatattagcttgtaaagaaggcatgcaaatttgagtgttgctaccaattgagcaactgtagttcaagctaacctaaaaatttcttccattccattgttctaatgctcttgttacccttttgaaaaatatgccaccaccaggtatctatgttgtagttattgtttgacagcatgctaatggcacgaaggaagcaaaataaagttggcatactcagttgcatgtaatgctttgggccctctagtgtactatagcaaatcaagtttgtcatatttgtcataattgtttatagagaaaattgcaatattaggactgcaaacatggtggcttcgttgttttgacactccgtgtggatgacaaatgggcccatctgtgtctatgaaatgtgggtccagtgtcattatagcaaaggttaatgtttgcagtgtcataattgcaaatcccccataagaaatgactcatactgtagcaaagatgcaactattgcagccacttaaatactaacaaaaatatatgagcctatgtttgcaaattatgttacatttttcatacttgtttcttaaaatgaccaggtcgatgttctacgagatgcattaaggagaggagttgaaaagataaaggtaacaagatcaaagaatgcttttcctctaatttggtctgagctgttttgcctacagagcaccaccagtgattaagatcttgttctcagttgttacttttgttcagcaattatattggttcaacaaataacaccctagactcttcggtaaactgaattagcatggacccatataattggcgtacaccagtgtaactgttataataattagtatactttagggggtgaaaattaaatggttctgagttcaggatgaaaattggactttggaatgtaggtcgatggctgtagatttttttttactttaaataaccatgaggaccaatctgcaaacgaacaataaaataagccctggtcatgttatgtgcactttagtatttaaagtccatttctgtgtggatttgcgtcttctaagttctttttaaatattaatgcagtacaaagcatggccattggttcagtccatgcctactaggacaggtcacgagctaatggaggattctcctccagctgattttgtccagattccagctgatgcaactgatgtttgggaagttgatccaaggcttctaaaatttgaacgaaaattagcatctggatcatttggtgatctgtacgttctataatcttaattaacaactccacttttcatgtaactaaattatagctgtgttaatcaccagataccatgggacatactgtagtcaagatgtagcaatcaaagtactcaagcctgagcgggtcagcgttgatatgctgcgtgagtttgcacaggaagtatatataatgaagtgagtgatgagctttgcttatgctgaatcttgtctgttagtttattttaagccgcattttaatttcaaaaagttttccaagaaaaacttttctgtagggtatgaagattaaactttgacctttaatttattgtagaacatattcttagcagctataaaactaatattatgttaaagtactttcaaatatgaatctagtacgtatgattttagtacactgaatgtactggtaatttgactaattgcttgtcgaaatcaacaaagtttgatcttaatgaaattaaaatatgccttatagatgtcatggagggagtaataaactttggtcatgaaatacatctgtaagacattcattttactgatgataaaaactgcactctcgagaataataaatatgttaaagtagttccatggttatattcttaggaaatgaataattcttttcatagttcattacgcacattttaggtttactaaccggggacaatattattgttaggtacttagccaaaacttctcaaatttagaggattattactggaatagtcttaagacacaatgaaaatttagaggattattactggaatagtcttaagacacaatgaatacactcgatttttgttttttcaaattgataagacttgccacctttctacttgatgtatttctttacttaatcctattttcgcagaaaggttcgtcacaagaatgttgtgcaatttattggtgcatgcaccagaccacctattttgtgtatagttacaggtatacaggtctaatgtgtaatagtacttgtgcagaataggccttaaagtggaaacttttctgtttaaattgttcaatatttctaccgtgaatcatgattgatgtaagttatttagttctattctatttcattcccagagttcatgcgtggaggaagtattttcgactttctttacaattttagaggaacttttcagctccctgatgtgttaagaattgcctctgatgtatccaaggggatgaactacctgcatcaaattaacattgtccacagggacttaaagactgctaatcttcttatggatgaccaggtactttgactgcccatcttgttttcttgtcctgttttgcaacatatgtgccaactacagtccccacatcttgatataattgatcacttgaatcttaggcttgtagcataagctattatttctgataccctgatcctgttgagatacttttaaataagatcgaagatggtcaaactcagtatctgttgtttcttatatgtttgcaaagaggccacttgcccatttgtcttttttttgtttttccttcttcctgccccttgctgttgactagtgccacaactgagccactatactgctaacacagg

SEQ ID NO: 15510 - DNA, 2351 bp, Oryza sativa
  unsure (1)..(2351): unsure at all n locations
caaacccccattctctctcaaaaaaggaagcggggggaaaaaaagagcccccccctttagttcaaccaaaaaaggttgcccccggttaagtctcaagataaacccatgtttaaaatataaagtattactccttggcccgaagctttccagcgtgtaaactatccccttaacccctaaattccggaatgacccagttcatcggccttataggagttttgatattttaaacctattgtttattccacaatgccaagaatgttttctttatccttgtaaaggcttcaggagtccagggtttgtgcataaggaaaaggcctacttaagggatatttggtttataccatgcatggtggacttattttcgattccaccttagcaagaaaaatagtgattgcaccattccaaaagcatacatncccncagattttagatcaaancgtggtatagcagtcactnccagnccacaagaagagcaagacataattacggtaccatgtacaattgtaaattgacccgatatatactaccaacacccttaaaagacatcggggcatataatttttattaacatcatatgctgctaagttggtcagaaatcttgtcctgtgaaaggaaaatagtacaacttaccgcatagcttggtctactagtcttcgtggaatcctcagatcttccaacatgctggaagtcaggaagagaacacataagagaataaaatcaatgaatttgatgtcagattgagtatggctggtatcagcagatatcgtcattctaaaaaaatgtatataaggacacaaatcacctacagaagccattgcaagtccatagaaaatgtcatatttataacatagcatattatcgaacctatataagaaaaggaagacacatgtatttgctgcaaacaaggtttaccatggctcattttacaacactaacacagaagttccaatggtcattaactatacatatgatttggacattaaatatagaacaagaaggttttcaaaatagatggaaaacaaaatgctaggatcaatgattcagaaaaggcagagacacggtgttttccaagacccaaacatgtcatgtcattggcataaaggaggaagtacttggagacaaagcaagacaagaagagcatatagggcatgaactagattgtttagcgtacctcagcacgagggagatccatttcagtctcgagcattggcctgtgaggtatctcatcagtgaaggaagtcaaaaagcaagtaaagctagatcaattgtgcttgggactagctactaaatcagcaaatcaacaaatattgcaagaaagggcactaacctgtgatgccaatgcctgtaggtagcatagagggatagcgcaaccaagataacaattaggttccaagtaacgatagtggagtaactgatccgtgttggggccttcttcgtcttgctttgaattagcaattgcttcggctttatcctcgccatctgctattctactcgtgcaggacaacagcgctctctaggaagatcccacaatctaggaatgaaaaaacaattgttcagtagaagcagccagcagcaagaccttgaaaaaacttaactaaaatttgcaacattaggtcagctaaaaaggctgccgttttggcgtcgtcggcaagcaatctgaagtagtaggatataccacaatctatctgaaaagcaatctacccaaagaatcggtagcttctctaacctttttcgcggtggcaatttatccaacgaccagttgcagcagcctcaaacctcaaagtgagggacggtaccgagaccttagcagctaacccttacaatccatcacgctagctaaaagagagggaggtgaggacccctnctnctncttctttatcagtttncccaattcttctagcctnctctatatgtgctgcgctagagcaacagcgaaacccatccacgaagatagtgtgctncaactgctcccccatcctattagnntnccctcngngttcacgccctaagcaccgactgnctcctaactnnnatattntttnttgagaggcnnnnnnnnnnnnnncnncnnnnnnnnnnnggtaggggtttnnncccccgcgggagtgagagggggggccccctaagatnngagagacctcgctcccatcttttttctccgaaattttttattttctgacccctgggagggtgtaaacccccccatattagtggaaggtctctttctctagagatagccaaatattggtatattactattggggggtgggttggcgccacccctcgtctttatattnccttcggcccattctttatttttcnttggtgtcttattgggctgccttttatta

SEQ ID NO: 15511 - DNA, 1232 bp, Oryza sativa
  unsure (1)..(1232): unsure at all n locations
cgctgacaccctttgatgatcgccaaattcaaggctcaagtactctccaccacgatcagatcatagatacttgattgtcttgcccaaatgattttgtacctcattctaaaatttcttgaacttttcaaaggactcagacttatgcctcattaagtagacataaccatatctactaaagtcatcagtaaaggtaataaagttttattatttttccgggtcgaattgccatgtaagcgccatgtcaatgccacgtcaaacaaagaccgagtcaaattagccacgtaggcgccacgtcagccaaaactgctctcaaaaccgctgaggaacataatctgcaccggttttaatagttgagggacccgttgtgtctggttttctgatcgagggacgaaaatcggattcggtgtaaagttaagggacctcagatgaacttattcctcataactaactatgaattccaagttctatgattcatgatccaaatgggcttcaaatttacaatgaaacaaccaagcatcaaaatacactgtaatgcctgcaaaaactgacagccgaatgacaccagggataaatttatacacaactactccatgagacggaagaagcttttagctgccaggcaagaataagcgccttctttctttgcaacccatgggcttctagaggaagccataatcataatcaatttcagcagcaattggaggcgatgtatggaccctcttggagtacagataagtcattttcagtaaggacaacaagctatcagctcaaagctttgctgtttagcgtgatgttgagtatgccgataggggtttttggcttgtaatgctcatcaatatcaacttcttcgatctcctgttaagtcatcaaacaagcaaaaagtctcattaaaatgacatactcagaaaatctaattcaccaggtgaagcacatgcgtctggatcacttgagaatatgacacttgaatagctatattctttcatttggccacctattaaaccatgtctactcttcaaatcctcatgcatagcactactgaactcanaataggnnccatttgtacaatctaatatgaggtaggcatgacacttcactgaaaatttgttttggaaaagttttatttattaaaaatgaagttcctgttgttgaactgccttataaagcttcgaggaattaagtaaaccctgcaatattgcttgtaattgccaaaacacaatgtttcacaggaatgg

SEQ ID NO: 15512 - DNA, 11366 bp, Oryza sativa
atagatgataagtatccaaatgcactttctatgcttggaagtcttgaactccaaggtgatgaaacctggcttactgcaaaggagcatttccgtgaagctaaagatgcttctgagggaaaagacacatactctatgcttcaattggtatgtgagcttacttaactctagtacatttatctacttatcactttactggtttgattaacaaccttttgttcgaaaaaggcagatggtttgtgtaccaaattgggaacaaacttgttatagactttgttcttatttttcttttgaaaactaaagcccaaatggggacttaaattacacaggaagatatggataagaattgttatggttaaagtgaagaagtaaactcctcgttatgaattagttgcctgtaattactgataactttgtttggcgtgtaatgtctggacaagtgctaccagctggcaggagatgatgcattgagctttatatattttgaatcactagcatatcaccaaatttaccattgagttagggcatgctagcataatcttagtttgatgttttcccacaataggtttacatctgctggtttgatgcaatcattttatgtaactaatcaattgttttttctctattttaaaaacgatttttccatgttgttacaggggaactggaattactttgctgctaatcgccctgagaaaaaggccccaaaatttgaggccactcatagggagaaagccaaggaactgtattcaaatgtatgttgctttatgctcaacaccaatttcagaggatcaggattatattttgtgtaggttggctgattaaatatacccgatcacctgctcagattaatcttgcctttaacggtttgattaatttgtttacttggtcaaaggagcaaatttaactattagtagctttttaggaatttagcaaaaagttcagttttagcttttcttttttcctttttgggtaaagtctaatgtttagtttaacttctattttcttgctatgctaaatcatcgactcctgaaaccatggtttcctagaagttgcaactactctccccaattgaaaacaatgaaataatagaattggtgtagtcaatttatgatgatgtccaaagacatcatctacaatatgtttctgggattcaagaaaatggtgagtgaatttgtcataaaagtacttccgtaatactacccttataaatatattcttttaaatatatgatattaaaaactagagggtaaggtggtatctcattgaatttgggaaatcataaaagtcacttccatttgaaatgcaattatgtagtctatagaaaatcaaggaaatgaatagcttgatttggagctattgtagtacttcaataaaatatatggcacaatgtgataatatgtgcactcattgtttggatgcactttggtttgatttgttgtacacatgagcaagtattgcttacaaccaaatcttgtttggtagcagaagcatttggtggggatagtgtggccgcattaagtgcttgttttgctcacttttgagatctcaatgtctgatgcaggtactaaagcagcaccatggtaatatgtttgctgcaaatggtattgggatcttatatgctgagaaagcccaatgggatattgccaaggagttatttacacaggtcaggggagactactattcatcattctatatgattactgtgaattatgagaaatttacattagcaatttgaaatgaattaggtacatgaagctgcttcaggaagtatatttgtccagatgcctgatgtttggataaatttggctcatatatattttgctcaaggtttttttcagcaagctgtgaaaatggtactactctctccacatagacagacatgcatgggcagataaatatttaagacaggaaagaagttgataaaagttactgattctttcttgcagtaccaaaactgcctgcggaagttcttctacaacacagatgcaactatacttctatatcttgcccggacacactatgaagctgaacaatggcaagactgcaggaaaacattgctgagagctattcatttggctccatcaaattatttattgcgattcaatgtaggtgtttcgatgcagaaattctcagcttcaactctacagaagacaaaacgaacagttgatgaagtcagtactgctgctttcctatagttggtctctgtttatttgatttttgaaataaataactaaactggcaaaaactcatcaaattgacctttatgttattttaggtaaaatgaattggggaatcttcagccatagttacttatatatctgaattgattgtgtttagagatgagattatgaattagagttgtaatatagaaagaaatgagtacttgtcattctgattgatatttgaaaaatgtatcatcttatatatttactttgaaaaccttatctgtttaatcttttttctctatttccaggttcgtgcgacggtctctgagcttcagaatgctattagagtattcagtctattgtctgttgcatctacataccattcccatggttttgatgagagaaaaatagaaactcatattgagtactgcaaacatttgcttgatgctgctaaggttcatcgtgatgcagctgagcaggctgagcagcagaataagcaaaaaatggaagttgctcgacaaattgctttggctgatgaagctcgccgcaaggctgaagaacagaggaaggcccaggtataggtcttgctgtatttacttcattgtcaatatgctgatgataagattacaagtttatgcctaatgggatggtgttaacagttagaaagaaggaagcaagaggacgagctaaagcaagtaatgcaacaggagcaacactttgagcgtgtcaaggtattttatatgttattcatattttagagatattttcttgtttcccaaggatcaacaggatttttgctttacttagagcctcatctatcactgattaccatgacatatggtctcatcaaccctggcctcttctcgtagtttcgttattgtgtataatattttttttaaaaaaaattgcacaagtatataaaagatatctatctcaaatgtaaaaaaaatattttttcccatgaaagacagatttctctatgctgtttgaaaagataaaactgtttgttcgtttgccccatttttggtgagaattggctactttcttgccatgttctatcgaatgagtttgaaggaacctttaggctgtgttcgttacttgtagttgggagcaaatctctcccgcgcagaaaatggagcgatccattagagtgtgattaattaagtattagctaattcttttttggaaaatggatcaatatgattttttaagcaactttcgtatagaaaatttttgcaaaaaacacaccgtttagcagtttgaaaagcgtgcgtgcgaaaaacgggaggtgtgagttgggaactaacacaaacgaactcagttaggctcttttgaaacctgataatcttcaggaaatcaggtactagtctggcaagagattgatgcacattctacatagaatgggtattaggtttaacaaacttacaagtcagctgaagataagccttcagatacttgccagttgccaaccttaagtttgtagtttagaaaaatgtcaacgtctcttttatatgggcctcaggcaaacctatgataaaacggctttagttttttctgagtcactttgagccaagtccctaaacagtgttattagctggcagattttgtggtgttgtttgattagtaactttacctctaaaagagattgcaacctaagcattttactacaggattgtttctcagattggaatactgtaaatatatttggtctatgcatgacaacttagaagattattctgatattgaccatctttcattaggagcaatggaaaacctcaagtaacactcctggcaagagaaaagataggtctaagcatgaagatgaagaggggggaggtgaaaagaggaggaagaagggtggtaggagaaggaaggatcagaagacaaaggcacactatggggaagaggaagaagacgaatatagagatgaaccagaagcagaagatgattatgcaaacacggcgaggagtaacgatggtggcgattcagagaaagccccaggtcaccttcttgctgctgcaggtcttgaagattctgatgctgaagaagatgacatggttagtgtttttttttttctttttcataaataacctgtatcccttcatttctatttacaaattatttgcttgtctgctttatcattgttgccactgagttttaattcctttccaagctttgcattgaaagttagtttgcctgttagatctagccttcgcactcttatgttcatttgtattacttttgctatttatcttcactagaaataaaaattttagatgctctggtgcaaagttgccttattttgtcttttcctggctgtagggacaccctcaatctgccatagaacggaagagacgagcctggtcagaatctgaggatgatgagccagtgcagaggccagtgcaacctagcgcaggcgagaacgatctgagtgattgaattagacggtgaagattatggccgaatttgggatcacttcatatatttgtgacgaagaatggctcctgggatgcggaatcaactatagggcgtgctcatatgcacttgtggataattcgatgttgaaatggagctcagacagatggttgaaccagaagtgttaaaaaaatttatctgggagcagagcagtcactgatattcaacaattaatctcgcgtcattctagacatgccatgggttggtggagctaacataaggcaatttgtaatttatgtctagtttacgcttaatcagccagacttttgtcctgtgagcttctaacgctgtaccaattttagctcacttacatctcaggatagctgatctcctactttgttctttgctgctaggcaagcgtgccaagaaaagatttccaaaagtagctgatctcctactttgcacctaatttttcagacacttcggtttggcaggcaactgtacgtgctcattggcattcgctaatatcgccctgctctcgtccaaacaaagtaatggatatatagatctaaagtaacggattttttcatgcgatttgttttcaagttgcaccttttgggccaaaagatttcttgatgactgcatatatgttgcattcatgtatttatttgagaacctctgttggtgaagtaaggaaggaagaaagaagaatgtccttcgatgcttcagttgcatacatgtctcgttattaaaaacttacgtaataagaggaaatacgaatggattcggacagcagaagagtgaatgcgagaagaaagacgaagaatacgaatagtcttgacttgacactactttcatttcgtttcatatcataagttgtatttgacttttctaatttaaacttcttcagctttgatcaagattatagaaaaaaaacaacaaatatttttcacataaaacaaaaacatcaaaatatattcaatattagatttaataaattaatttgttcttataaatgttactaattttttctacaaacttaatcaaactttaaaaaagtttaacttaaaaaatcaaagtggcctacaatataaattagaggatttaataaaattaattttgtgctataaatggtattatctttctataaaattggaaaattttttaagaagtttgatttaaaaaatcgaagtgacttataatatgaaatatgaatcggagggagtacaaaacaatatttattcttcctataaaaaaggtttttttggtcaacaatgagtgcgttgcatagctaagccacgcccttcttttgccagaaatcaacatccgactcctttgatcgaacataacaaacttactattcggatggctatgccgtggaagcgagaaataatgtggtttcactaactagtaatctacaaaccagacggatttttagcaccaattcctttcaaattcttacatcgctagccaagcccaagattgcattcaacagattcgcacaaaaattgcaagaaagcaaattcgttaatttccatttcacccacatcaactgcgaatcaagtccttgggatggacttcgatgggtgtatgtgtagtcgtgccgtcagacagccagagaagaatagtcgggagggatggagaatgaggatgtgatgcttgtcgttgtctaggacctggagaatacgtgaattacacagaagagcacttttggctatgtacaaatattctactataattccataccaagcttgttaggttggaactagcaacctctctgatagtatatatgtccttatcgcggatggaatcataaatagtttacgaaagtacacgtaacattctgcttggaagctactccactaaaacattatacttatgagttagccgtacatgatttaattcgtttgagtatggatacactaccacatagcatctttagagattataggtactgtacatgggcggagctagaacaaaatgtagagggatgccacttgcttaatttactctacatcaagtccttgtctaaatttgtatccaagggggtgcacacataatgaaaatgggtgaggtacagctctaactttttttaccgggttcctgggcaccccatgagatactctacctccgcccctggtacctataatcgtttaaaaaaatgattgcattgatactcgaatcaactgtaacccggctcaaagcgtcagctcgatgcttcgagcaccccctgattcccagccccatatgcaatttccccatccatattacaaatcaataagaacacaagagcatatgcacatatcaacaacaaagacatcacagatcaagaagacaagaacaagctaatcgcattgcagatcagaacaattcacataatagatcaagatcttccgccatgaccaaacattacatgttcaatatatcagactcatcgttacagtggatctgtcaccgccgtcatcgattctcttgctgctcgtctcctttgagccgccgccatcaccatcatctccttctagcgaccgcaccagctctcgagcgcaaacaaggtgatccacggtggtgaggtccaaggcgtctggatgcgatgagccccgaactcaaggaggccggatccagcggcccccgacctccggacggttggatccagtgggaagagagagctcggaggtgacgaggaggagaggcaccaccaaggaggggaggaggaggtaaaggagggggaggtctgcggacggaacatccttcgtcccaaaataaattcacttttaatttatttcacttttgaatagtttcttgaaactataatcagtgtattcatgaatgattagagatgagggtacacatgtttatacactgcttccctgatagagttacaataactaatgttgattggtttcagagcattgctcgatcggtacaataaggtacaaacaaactctatatcagcaacaaatgtcctcaccgagattttgcagttttatcgaattaacatagaggtggactggactaactgcaagatggtgtcatttaatttgtctctttcactaggtttcaactattttgaccactataccgtgactttttttcaactagtagatgtgttcatgggttagacctgatatttcgatgatcaagatcatacattcaatctacgtgttcttactgataaaacccagaagaccaactaagaattttctcgtaaattaatgaggatatggttggaactagaggggattttcatgtcactatggaaagcaaactatttttttcaaattttgaaaaaaatatttttcatatattttaaattctatagcaagtttattccttcatcgacctatcaggttagattcatgatcagtttgaagagagaagtgagtgttggcaacgtttttggtcgcgccgccacgatgaaaacacctaatgctctacagtgatataaagtcatcaaccaccttgatctagacaaaaacaagacggattctgtaagtcaaaaccggctaacagagccaatttagatgaaatagggataaacactcttgcagaatttcgggacaaacctataaagaggattcgcactcttgcggcaaggacggacgactttcagcgcaaaccgatgaagatggacaaaaactagactagaactaggcaaaaagtagatgcgatattgaagattcgattggctaattgtgttaaaagtagattgtgtgcatgattgaaccgaccataaccttttattgccatagctcttataaagaaattggtttgcctcctgtagggtcttctccatgtcttacacggggtagagaccaattagaagtcgaaaaacctcagcccaagcaagtaaacccaagacgcaaaaaatcaacttggaggcagagttagccgatttgatcagccacatgcctcagtcagaccagccccacaccgctgatcagaccgacccataggcggcggttaagccgaccctgtgaaggaaacctagtccctttcaaattcagcaatgttttcctattatgtttctaggtgctaaatttaggtgttaacaaagaggagagagtgaatattaaaagtggttcgaagggagaaagaagaggggagggaaaaaagggaaaaaagaaagaggacaataaaataatacgctctttgagaagaaaatacaagggaaaaaacctaaagagtggaaatacactctttgtctttttaagtcaaacttcttaagtttatagaaaaatatattaaaatttataacaccaaattaatttattgcatctaacattgaacatatttggatagtttatttgtcttgtgttgaaaatattactatatttttctatgagtttagtcaaactaaaaaaattgagaaaagtcgaaacaacttgaaacggagatagtagttattttaccaagtttcatttgtaccaccacatatctaatgttttcttcacttataatgttaggtattgttaccgatctttgcaccttggaccaccttctattcatctctctaactatcttttcgctttctccacctctggttcatgaagattgtcgtcatcattgtcagcgtgcctcattgcttaagcttgagctatgtctctgctcacataatagctatatagcctctgcttccttcagagctttgagctcaagctctaatggaaaaccaggtttgtctctagcagaatttgtatttcttttctcaatttctctttatgttggttcctctttcttttgtctgaaattgtacctcacggcacacctgtgatcaaagatgtatttcaaagatgatagttttctttacgcaaaagatagaaaatctaccttatatccattggattaattaattgtgagtcacattgtagcatagccaaatggcaagaaaaacaacagagaactatctaaaggacagaatttcttatattccactaaaatttcatgtagatttaacacttggtgtactatttcatgtagcagttaatctataagagatgacccctaaactaaattaaatataagatatcagtaaattttgtagcaatctagaagagatggcccccctaaactaaaatttccattctccctcgggccaccgggtaccaaggcatattcttgcagttgcatgccggcatacttcaaaaaataacaagtaatcatattttttctaacctgatgtgatcttcgcgaggctacgagtacgacctccaaacaagcatatcccctcttgatttacttaactaatcagtagtacgtaattaaccatctcctctcctagctttagcaatgcttgatctcgtataagattctctattattattagtagtactctagctattatactaatcgccaatgatactacatgttgatataattaattgtcctttttgtcatctacccctcacatttgttccttctgatcttcttgccggacgccgggtgatcaatgttgctagctagggaccgggttgtaaaattagttagcacaattaattaataatattgcgttgtagggtcatatacaaatttttaattagtatttgttttggtgctcaatactactaatattatactaatgtacataatcttatccactgatcatccacagctagcacaagctttgagtggtacaatcgaggagtaatataatgattaagcaagttaattaattaatggtcgatgtagcggtcaaggaggtcttagattattcgcgataaaattaccttaattatacaggctgtgttctgacttctgatcatacacaaggcaggtctgtactgtactgcaaaggcaataaataaagttgtctctactactgtcaaataaacttttttaaattttttattacctggagggaaaaaacacctcaaatacagatttttctagaaaaaaaagtgtaactcgcatcaattatattggtttatatgaaagaatttacctgtagtcattagtattatttatagatgatgtatcttatgctaaagttttctaaaagggaattagtaaatattttttggaaaaaaaaactttcaaatacgactattttatagttatggtgtaattatattgtaactacattataattttaataaaaaaactaaaagttacttaaaatttatattgaagttatatgtgttttcaatatttaaatataagttataaaagttatagtatatagttacactatatttaaaggtatatttaaaagtttttgaaaaaaacttgtggcagtttttcttaagatagtctcatttagagattctcttgtagttggctggtgcaaaaatgcaaattctctatattagtatcacttggcactggacgagcccattatcaaatatatgctgaatatatttgactataataaatcccttggacttgcctgcccgtattcttttttcctaggcgggtagtttaaacaactactttcctttatttagaaagggtaaaacataattcatatttttagttttcctaaataagtggtttttatttgtaggcttcaataccatcaaaattttaaatgggggagggtaaattaaattttttgacccaaacccccaataggcccttttaatactcaatggggtggatgtatggcattttggaactttggcttccgggaaaacaggagttaattttcttttttaaccttggtaaccaaaaaaaaatgtggtaactttttttgtgaaaaaatgaggttttttaaatgaatttattccttttgtgtttccgggggggggtataaattaagggggggagaaagatttgcgccggcaccacacaggg

SEQ ID NO: 15513 - DNA, 1341 bp, Oryza sativa
  unsure (1)..(1341): unsure at all n locations
aaaaaacaataagggtgttttccataggccgggacagggggaccaacgggggggttgtgctaggacactccaaggtttttcataggctttaggcccacaaccgaatcccatcgattttgggtaagagcccctgaatagctataaaaataccttgaactactgaaaaaatctaggaatttgttcttagtttatgaagcccagaaagcgctcattgtaattggttccattgacgcaagcttccaanccgacaaagattgattttagttcgcagtcggaatttgtgttcgccttgaatgaagccgttgtaggttgaaagagttccaagaaagatcaagtggttgatcctccaccagagttggaatacattgcggcttttgaacaaccaaagaggcttgtttgaataaagaaattcgttcctcagctagttgtgatgactagtgcttctagccctatggacctctattgcgatatagtggtgccattgcgcaagccaaggaacctagatcgcatcaaaagttcaaacacatcttacggcggtattacctcattcgcgagatagtgggtagaggagatgtgaagatatgcaaaatacatacggatttgaatgttgcagatccgttgacaaagccactccctcagcctaagcatgaggcacacactagggcaatgggtataagatacgttcatgattgactctagtgcaagtgggagactgttagtgatatgccctagagtcaatcatagagatgattgtatcacatactatgtttacatatttatccgactttgttccttgaaatagataaactcgttattggttaatgaatatgtgattctttcatgagactctttatgttatgtgttgctatttctaaaggatctctgatcaaatatcatatgtggaacaaatatgtttagatgatcagcacatgtattaattgatgatcatgtctcatagatcatggtatagagataccaaattaataatgtggacacatgttagtgaacatgttgttggatagacccaacataagacacggcccgagccatatgagttgtgtcatcagggatctcattgagtgttggagatgaatccttagacctaaaattatcatggttctcaacatgtgtagtagcttacttacggactgataaacgctactccgcaattgcgtagctataaaagtagctttcgggtatgctatgaaacatgtagtgggatatgaaaaatcaagatgggatttgccccttctatggagagatatctctgggcccctcgatggtgcagattatggaagtgcatggccatgccaaaggtgatngangagtcaatcaccaagt

SEQ ID NO: 15514 - DNA, 18175 bp, Oryza sativa
  unsure (1)..(18175): unsure at all n locations
gtcttgtcaaaataagccctaaaggtgaaactctcgggtttaattgtcaaatatttcnaccgtgatccatgatgaatgtaagtanttgagtncatatcnattccaatccaganagttcatgcgtgaggnaagtatnttcgactttctttacaaattttagaggnacttntcaggctnccgtaatgtgtaaagattgcctnctatgtatnccaaggggatgacttacgtgcatcaaattancattgtccccaggactttaagcactgctatctttcttatgaatgacaagtactttgactgccaatctggttntcttgtcgtgtttgcaacatatgtgcaantcaggtccccacatcttgaatataatggatcacttgaatcttaggcttgtagcataagctattatttctgataccctgatcctgttgagatacttttaaataagatcgaagatggtcaaactcagtatctgttgtttcttatatgtttgcaaagaggccacttgcccatttgtcttttttttgtttttccttcttcctgccccttgctgttgactagtgccacaactgagccactatactgctaacacagggacgtacatactggacttagggcaacgcctgtaagtaaagattgagtcaagctgcataattgattagtgattatcttgaatctgtaatgtctaatgtgacacttcttgttgggcatgaattagcatgcatctatgctttaataaagaagaggtatttaattcccctcataatttgcaggttgtcaaggttgcagactttggagtagccagagttaaagaccagtcaggagttatgactgcagaaacaggaacctatagatggatggctcctgaggttaccttttgtcattttctttgaagaatctttgtgaattttcatttcattgcttgtagtttatcacaaatcggtgagctatatactgaacgcgaggactgcagaatcccttctgcaatctgcttgctcacactaccgagaggtttttgaacgttttggttcaagtggcaaagtcattgggggcttatcatatataattagattgaaagagcaatgactaacctactctgttctctggggtacttttatgctagcacataaccctaacctaagccttttgtgatcaatcccttcccactgctactttgcttgttgtacaacaagacagactcctataatgtgcttgaatatagcttgtttactgactgcaccatgtgttgctgttcgatgttgtgtttttaaggatagtagaatcaaatcctcatactatcagaagtacgaaaaattctaagagacttttgtgggtttgcacccctggaacttttaaaagagacttttgttagagtaactagtgcattgcctattgaaaagaaactagattggcagttcgcacataacctatgttcagaaatatatcattaattttgcaattgaaaatattatcataaagtagcaaatttataacttactgatatatatatatataacaatagaggtctgtgttgcatgttggagacttggaaaaagtttcttaagatattgggatgagaagtccgttaatttgatggcacatatatcttcttaaagctgtacatacatgtgtcatcttcattatgcagtttacattttgcctcttaatctcttatggagcaactccttgttattgttgttgtttttgagatatgttttaatagaaatcattgcaggtcatcgagcacttgccctacgatcagagagcagatgttttcagtttcgggatagttatttgggagctgctgactggaaaggttctgttacacatgccaagcggttatgtttagattctctgcacttgacatctgtgctgaacttttgcttttctgttttctgctacttttttctcagcttccttatgaagatatgacgcctcttcaagcagccgttgccgttgtccaaaaggtacgagataacaaaccttacttttgccatcttatagttctcccaagaaagaaactgtgctgagttgggacctggcaactaaatatgcactctgcaatacacgagtcactaattgctgtaagtttagagaagaggaatctggggattgaacagttgattcattgaaggcccaaaggaagcatatatacatatatatacacacacagtagatgagaaatgatccttgatattgcactttcatgtttgcaggatctgagacctatcattcctgctgatactcatcctatgcttgctggtctacttcagaaatgctggcagaaagatccagctctaagaccaactttttcagagattcttgatatactaaattctataaaggaggtttgtatatttgatgggatgtctataaaatttctcagttcgatttgtgttttcctttcatttgatttttttttcattttgtgcaatcagcaggctgttcgaagttctggacatcagaagagacactcaggtcgatcttattccaggcagagacgaagcggttgatgcagcaattttcctttttttttaaaaaaaaaatcttgtttcggtttagtttctgaaatgcggcaggttttgtttagcgttccacaccctcccttttgttatggtcatttccacggcgagcaatttttacttggttgtatctcagcggtaacgttggaatataatctggtgagtttcttgtatttttttttcatgtcgtgagctggtgtaaacgattgttgattataatcctttcagttcaaccacgagatgtcatgacttctttttttttaaaatcatccttttaactctctcaggtcttttgatgtgtgactttgaccataattttgtattaggataaatctgataagtttaagagataataatatttatcaaggcaagcctatagttttcttaaaaaaaagaggcaaacctatagcatttttacgtcttgaaattaagtattttattaaaagttattgatgattaaagtttcgaaggtttgtttccagaacgttaagaggagaggtcttatgaaccttcttttcgagaacgaaaccacgtatgtctaacaaatggcataccaaaaagggaaaagaaaaaaggtaggaagagtggctttttctgatggtacaaaaagtccaaatcgattcaagtgcctgtttcaaatttcaaattcaaatgctgcgtttgttcattcgtgaggtccatgctccacctgtttgtaatcttgtttaggaataagttgtcgtcccttaacttggtttgattgacatttctaatttcaaatatcagaaatcttcaactctaaactatacaaaatcgtacaattagagtcccatggtagtatagaccccatttcctcctatttttgtttacgtggcagatatctgagcccacatgtcaacatgctgagtcacccatgccgtttcaacgtgctctcgttggctgtttggcaggatgtcctcctacgcctgcagcgcgtccactgacatcgattgatagagacaccgacgctgtgatgatggtgtgcatgaactgcatctccctcagctcatcaaggtcaaatcaaatcattcacgtcgtaacgagcgggctagagccggattgcaccattcacgctgtaacgagagggctagtgctgggccgtcactctacctctagggccatcaccactacgctcaaggccatgccgccacatgcatccaagccgcctaagccggcgtgccattgttgcgccttgagggcaggccactgctacgcgttgggcccgcccagacgcgactgtgcctcaatgctatccgattctacgtgtcggggccaaccaaccgatgcgctgttgctccatctaaaggctgcaccgtggctcgaccatgaggctggggctgcccagccaccactccggcttgagatggcgaacttggcgctagcggtggagtcatcatcaacctctatgcaaacgctgctgccgtcaggagctagcaaacaggcaacgagagagctcactccgttgacacggcattggtgataacatgctgataagtgggcccaaatatctaccacgtaagtgaaaacaaggaaaaatatgatctatactgctatggacctaaggtgcatggttttatacagtttagggtatagacttctggtatttgggagtatggatgtcgatcaaactcgacataaagttgagagttggccggtggacttatccctcctgtttataccaccgtgttgttgtgacccatggtcagcccggcccaataaacacacgaaggcccaatagcccaaacaatctaaaaccctagaaatccaatatacaaaggtagtgtgctcctgcctccgcgtggtttccatccccgcgcgcgccgcccctctccgctgccggcctccgctcctcctccggcgccgtcgccgtcccatcggcctccgcttgccgcccgctccgcgctattcaccccggccggcaggtgagcatcggtttccctctccccgttttccccccatggtttgggtttctccgaggcaaggggaaccgcgtgcgtgtttgttcttgccgttcggagtcgccgttgatgccgccgcgagtatatagacataatcactgagatgcatgtaatgaagtatctggagcgagcgaatggataaaccctaatctctcccggctcctcctttgaaggagtgaagaaaaactagactgttattatcattcaattgtgactatcattttcttagcttcgtgctgcatgattgttttgattgacttatctgtatgtattgcattctgtggtgcctatcatttatgggattgtgctgattgatttatcaatcctgcagtgacaatggcaaggcttgcagctgaagacccattggttcgcgatgaagccatattggatgatgatgatgatgatgttgataccgacgaggaagagtccgagtcggaagatgattcaggggaggaattccatgccgagccttccaagaaagctgtctacaacaaggaggggatcctggagaagctcgaggacattgcgtggccggagaatgtggactggaggcacaagctcactatcgaacatgaccagggggagaaagtcgatgtgaacgacgatcttgctcgtgagcttgcgttctacacgcaggctttggatggtacgaggcaggcctttgagaagttgcagtctatgaaggtccggtttctcaggccggctgattactatgctgagatggttaagaccgacgctcacatgcacaagatcaaggggaggctcttgtctgagaagaagaagattgaggaggctgaggagaggaagaaggcgagagaggccaagaagagggcgaaggaggtgcatgcacagaaagaaaaggagagggccaagcagaagaaagaacagattgagtccgtcaagaagtggaggaagcagaggcagcaagggggctttgccaagggaaatgatgatgggccagatctgaattttgaaggtgacgaagggttcaagcaatcaaagaaaaagaggcctggtgtttctcctggtgataggtctggtggtcttgctaagaagggtaaacaaggaaagaacaggaaatcaagggattccaagtttgggcatggtggtcggaaagggctgaagaagcaaaacactgcggagacgacaaatgacttcagaggattcaaccagatggacaagtcacaaaacaagaggagaaaaatgggttgacgcgatattgtaagaatctgcgtctgcttccttgagctgtattactagttgtttttggtaactttattttactgcagtacatcgttgctagatgcgaacgttagttgagatagattgtaggaggcagttaaaacaaaagaccattttatgttttaactatgctgttctccacaagatatttgcatgtatctggtgatggccctttttcgttgtgtgatgtggaagaatcaatcttaccctggaattatcctaagagtgtcttaaggatgcttggtgcacttcctgttttgatatgttatctttctgaccgttattttatattgatgcaacaaaactgaaacgtaaacaacactttcctattgtgttgtaaatttgtttattggtgagtcaagtctccctctcttctatcttagattatactccaatcagcataactcatttggttaccttgtttctttccctgtagtttctagtgaatgatatcatttgtgagtttcctcactgcattagttgtgatggaatttcagaaagagcttgcttttgtactgcatttgattgtgatgcttccttgctcttcatggtggatgtgcatgtccatgtggagtggataccatttcccattaagatcgtgaatatggtagtagtacttttgcattatagctacagtgtccttttggtctttacctcgattagcttggaatgagctatactgatagtgatttgatgcatggaagcccatgcttatgttgcttctttgctggtgatggttgtctatgatttgaaagcaattgcctactacatgttacaacatatcctctgaaaatatctgctagtattatataacctcttgcagctgcactagtgcgttaagaagctgctactataattcttgtgatgtgtttttttcttgtatattatctgtccgatcatgttgatagaaatttttacgcgaactagcaaagtgcccatgctttgcttcgcagccgaacagaccttataggtaaaagaaaatatacaataatatgtcatagataaaaaatatttcttattagtattgcttgtttacttatttaaatacatggtatttatttgatttaaacaaatattagagtattgcataatatcaaaaaaaaaatattagggactaatttgtaaaaagtgctaagtagtggtggtggcaggaccatcaccgctagtggcttttatagtagtatagattatgaagtgggggaatgttttgatagtccttgaccgtacatttgaggtggaggaaatttctatcctatgtcatctcagtcatttatttgtttgtatccaagtctgtcacttatatgtgatgaagactagattgcatcatgcatgccatggcttgttattattatgatacagctacttctttggatgctttaaacctattttctcatgagtaaacctgtaagtgtttaaaagaaatgccagtatccactatccagtcatcgatcatctgttttaacagtgagtgaaactattttactaaccttaacggtgagtagttttgaagtcaggagataaggatgatatatgtggcgtatctgttatatattttccatcttgagtgtttgcttattcagtagagtgttttttcattagagtttgagtcgatgctcctggaatcatggttaattgttatcaagcattgggagggtgacttgcctaaagtcctatatgtagaattgggagtcaatttattattctagaggatgctttattctactctccattttaaatatacggtgtatttttgtttattaggagtaggacaggacttttaccaataattattttattagtaataatttttatgaagcaaaattgatgctattagatttgtctccaaaagtatttttgtatgaatatatatttatatcgcataaatgatattttaggggagtaattgttagtcaaattcttttcctaacaaaataagaacaacctatattttgaaatagagcgagtataattttggcgagtaatctggtggcactgtgcattagataacttgccacttgcctggatgcacacttggcaattattattttttggtcacgccaacttctttaaggatccgaccaaacaaaataattgagctccctgtgccttgtccacatagacttcaaatttttttctgacttttttcatcaagttccaacagtgcacctgatccattataatcttcttgatttatgagcaaggaaaagattgctattgttattgttatacatgctttctggcaagaactatgaagtgtgtttggttgcatatgttagacccatttgtcagttaatgctgggagaaattccctttgacagattcctttcacttcaagtcttcaacagtctacactctacagaactatgcgcaccggtaaggtatactctcaaataaattgtaggttgtaacgggacataatctaatacagcgaattcgaaccggtcaaaccaacctagattatgatgggacataatctaatctaatacaaaacgaatctgacagcctactattttgggaccaagagtataaatctgttccatatcaagaatcagttatagaacagtaatgctatgttgtgttccaggcgttttgctttgacatgcacgttcacataataaaactgaaactaatgaactggttctcgcatatattttcgttccacattgcgttattatactatatggttcaaagttctgtgccttggtctcgatcattctgtttggtttgattgtctattatgtatttcactgatatctgaaggtaactcaatgctgatacatctgcacaccgtcaatagtctagtattcgcatggaatttgttctatttctgatgatcaggtggggaagtttagattcttttgtttgaacaaaggaatataacttctgatgaactggcctatgcattaactaaaaatacacccaaccatttatatttgtatacgccaggatttatactttgatgaatagagtcatgcattcacgactataccatacttataccatatttatgaaggtctaagggtaattgatcacttgatccgattctatgtacgtagtacgatttatttggtacgagaaacagagtgagttcttctatattgccatttcattgatcaatgatacatacttgtaaaaagagagagaggtaaaggtatcgggaggtaccacacactttatagtgtaaaatttggtaagtgtgaaatttggtatctccagatacttaaaaaaaaatacgtaccttgagatcttttttaagggactataaaatttctctttaaaaaaagaagagggtcatccatcccaaaccccaaatttgagggataatttgtgatatggatgaactcatttaaataatataaatggtctaatccctaaagggaatcaacaagggtagctgtatttatccatcaaaaatgatgatgggatttgagaatcagagtagtcgaataaagccggtttgctaggcttttccagatggaccacgcgtacggttcgctttcttctacgccccctagcgttggcctaaccaaatcatgagtccattttcttcttctcgatcttcaagatccaggcaaagctgtcattgcaccttgctaattcgtacgttgaacatgtccttgcatgcacgtactctatctgatcgtaatattatgcatatacaaggtgactttgcagtggtgtttttgtgcgcgtgcacgtcctctatataattgatatttttaaatgtttataacaagatgtttgttcaattttttttaaaaaatatactataccattaataactgctcaaatatttagttaaaaacatatgtgagacttatgagattttaatttataaacttttataatacaaagttagtgatcaaatttcaaaagtctaattgaatctaaccctaaacataaaaagatgaccagaaggagaaaataatcatatatagtattttaggtccgaaaatttggttttccggaagtatctttaatcgggaacacatacctgtcttctttatgaaaagaactagcatattacccttgtgttgcaatgaatctattaccgcattattaccataattttgtacatatattacatcttaatttttacatatatttgttactaatatagactctttgcccatattatccttttcccttacaaaaaaaaagggagttgatgaagggggttgacatgcatgtgagccctgtagccccatagtacttttccttttcaacaaaagtaagaagttgatgggatggatggtggcatattcactactcgctactaccacactttttaagggaaaatttgaaccatgccacacaaattttgcaaaatttgtgatatgccaccctgacccatatgtcattgactcatgtgggtcctacatgtcattgagatacggaaatagatataaatgttttagaaaagcgtggagttaaaattctaatatgttactacaaacaataaacatacaacttaagggcccctttgaatcgcagggtagaaaaaacggaggaataggaaaacacaggattctgacaggaattgaagtgtaaaacagaggattgcaaaacacaggaaaaatacaggaatggtcgtttgattggagcgcaggaaaaacgcaggaatcggataagagagatagactcaaaggaaattttccaagaggttagagctcttgctaaatttcctccaaaatccacatgcaatgtgccattccataggaattttataggatttggaaagcttcaatcctttgaatcaaaggaccaaataggaaaatttcctataggatttgaatcctataaaattcctatataaattctttgattcaaaggggccctaaacatgttgggcgcaccagaacagaacatttgatggtttctgaatttccaccaaattcagacagatagtactgctgtcctgacaagttggagcttggaagcaaaaaacaaaaacaaaaaggagagaaaggggaaaaaatagatatgatacgaagaagaagaagaagaagaagaagaagaagaagagcagatgaaacaaatggccctaagcaatgcacgtcgccattagggagcgagcacatgctacccttgtgatggagtcgccatcgatcatattcataattttcctttccctctcccaagaacgatatatatcgatcaaggatcacgacaatgtgtcacctttcatgttccagctgccaattccgttagataacaatttgcaaattaatacagagtacctttcttccaaaaaaaaaaagattgtgacgctcctgactgatctccaagctcgatcgatcgatctctgcatacatatgcatgcccacacaaggaaaggggctaaggtatgggttcccaaatgcttgtcatgacggctaaaggtgtaggtgagcaacttaacttagcccctgctagggtttgaagcaggccttgattaatttgatattgatgtccatccatttgaatatggcacaatcgcattcacctttagggcatatatatgtacaatactacaacatgctctcttagatctagtatgatttaggatctaaaaatgcaggattaattggagtgtcatggcatgttgattactataggaattactgctttcaatggctcgaagaaaaaatacaagaattttagattatatattaatatatatatatatatatatagagagagagagagagagagttgcattagacttctcgaacgaaagaaaaacgccgaggttagatgacatgccataaatcttatggaattgaggtataggaatgcattccattggaatttgacaagtttaaatcccatcatccaaaagaccccaattggaaaaaaacataaggatcaaaggccttcatttttctatataaatcatgcatgtccaaaggagcattaagagagtatctcaaaacatctatgcaagagtctaatcctctaatactccacctgttcctaaatacttgacaccaaatattatttatatttaaaatctgactattagtatatttggaaaaaaacatacttaataatttatggatgcccattctccaaaaagatcttctatgtatgataatttcaaacaacatctaggggcatgctatcgtgttttggagtactgacaagcttttacggaacacatcactaaggaggtgtcctggcgtagtgatagtcgtgtttgctaggtacgtgcaacaaattataatgtaccaaaatacatgcttggtacaaagtatatatcactatcgttctataaaatggagcaacaatgtgactattaatgtaccccacatccatctacactttgattacaagaattaccacgatatagtcccaagttggatatgtcgatgtagtgatacatatgtgccctgttttgtcccaacatagttcctctcctgaatggtgaaggtgggcccggcacaggcagaagctaacgacaatgttcaattacaaatctgaaaggaaagccacaccaacaacaatcttaaagggtatctcactctcaccacattcctagctgagccccataagtctctctctctctacccatcatgcatccatttcagaaaaaaagaaaagaagaggaggaaatatgatccacttaggatagtgacattctacagaaaattcgccttaaataatgtacatatatgggaagcaggtcatatatattgatatatatgtgtggatgatgttgataaactatagactagcttgggctttgattttgggttagtttgttggtcagtcagagtaggcagctcccatgtgctctgctccaggatgaaggcaatgtatcacctgaaatcttgctagctagctatagttgacatctgcacgcatatcctccttacgaaaatacaaattaataatgatatattattgttataatgcatatcttgatcttaggtttatatatgtacatgcgtattaatatctacaagcttgtttgatacggctttagctcataaagttaactccaggaacagagtttagagtgaagcaggccaaaccgtattcaccagttcattctgattctggctggaatacgtagccaaatataccattccatcacaaaaaatgacatagagaatgttgacgtatccattccagccccaggtttctttagaagacaccaatagagaaaaaaaaatcataaaacttagttgcattctctgtaaaattcctcaaaaggtctaaatattgtctgctacgtaccgaatattaaagccatcttacatatgtagataccaggtaaattataggttataccttttatatatgattccatttatcgaatattattaaatgtaatgcatttttgaagtaatgcatccatttcaaaataaaagaagctttaggctttgacacggatattaattaaaatactaggtggaactaaataggagaggattgtgactggttgagaagaaaaaatagatgaagaatttgaataggggaatattgtgattagttgagaaaagaatgtagccggataagttattatattttggaaaatgctaaaagttagtataggacgtagagagtacatataaatgtcatacttattattaatatatcgactgcaacagtaagcctagctagccaaacctaaatgatgtctggaatgggatcgacaagtaatcatatatatgtatatggtccatggttcatctgccagatggttggaccttaattgcatattcattaaacttactaagtatgtttctacaatataataatgataaagctgagaactataaagctgagagatacttatcagaaaatgattgaaatactaaaatttcacaatctagtacagctggagataaactgtacttgttagtgctactagctagtagcttagccaacaaagagaaatacaactaatattccctccaaatcaatcaattaaggcctcatttccatttgcactgtctcatcttataaacacaaaagaaggaaatgtgccacacatattacagagatcatacattgcaaacataattacacactgatgatattacaaagtacgtactcacatctagaaaattcaaagccggatataaagctaattaagaagatatgttacatcatggcagccagtacatgccctcctgaaaacatgcaacattacgcatgtaacgtgcacatacaggcacgcgttaaactcaccaggagggcatacaaaaaaattaatgaacatcgatcaatagcaacaaatcaaacatcaccaattctcccaagaatcaagtcatgcatggatcaccaatccgaacacaaatacctagattaattagatcatcaatgatcagcttcattctcctccatctccaaaaggatcatcaatccatcatcagagagagagagagagagagagagagagttcagactttcagagctatatatatgtgtactaccaaatcttggtcctgccgccggcgcggccgccggagccggacggcggcgagcacttgttcttgccggaggcggagcggaaggcggcgaggatctggtggaggcggtcggcggagcaagggagcacgatggggcggccgccgggggagccgaactcctcctccgccgtgctgaggagctcccggaaggtgtcgctggcgaggcaggcgatggggacgaagaaccggctgccgtcccgggtgtacgccgcgaagtgcccccgcgggcacgccgccgccgccgccgtcggcgacgtcaccttgctcgaccctgacccgctccacttcctggagatctcggctagcctcagtgagctcaccatgatcgatcgatatatatatatagaaatgacagagaaattgttgctaagctaagctaagcttcttggagcttggagaagctaagcttggagtagcttgtggctggtgatgtgtgtgagagagcagtggagctcaaggggggtataaatagaggagagaagctagctatggtctatggtgtgtgtggggctaggttgctaggtatgtggggttgttgcatttgcatggagaggatagggatggatatagctatatggagagagagagagagagagagagagagagagagagagagtactagcttagctacagggtgaaatgaaatgaagatgaaagaagaagaagaagaggaatgcattgatcattgctaattaagttgccagtatatctgtattttgcatgttaggatgtgtaggccagtcaagtgggtcctgctcatgtcaatcatgcatgagagttgagaggagtggtgctcgtctgctgttgtcccaaaataaaacaatgttgatcctatacctaaaaagattgccttttatttcccccctgtggttcgtaaagagaaactggttttgcttcgtactgcacatgtgatctaagttatatatatttaaattcgtgcaaatttttatgtggatatcgtgacttagtgggtttagctacagagcacagcgaaatgcctctggccccgcttgtcagattcttccttgtagaggcagtggtgcatccattgcgtgacaatgacctccccatggtacacagccaaggagtgtggcggcattagccacacgcccaatcttcgcggtgaagtcggtgaggaagtggtcatacggatgagcgcgggttgttggggagggaagccaggatgtggaagaagcataccactttcagccgacacatggtgtccaggtcagggcagagcactagggaagtaagccccctccttatactgcactagagatacatcgattatgcactatggtgagcggacggagccccattgttgatagatagactagacatgatgtcacaacgcatccctcaggtgatgacccaataaaggacgcaaattcagtgatcttcggtaacagggccctcgcttttgacacctcgtccatggcccacagccttggcacatataatcaacagattagccgcacccccatgtgtctatcgccaggtcctgctcctcctccgctgccactacacaccacaacataaatgtatagaagcacttagtttgttggaagaaacaattgttagcagtgaattggtgaaatattttacctacttttgccactagaaaattttcacctcacgtactttttttatgctttccgtcggttggtcctgctcatatggtatcaattttgactgacgcctcttaatataccgacaagcagtgagtgcttaccggcatatagtatgccatgttttttttgagaaaattcgatccatagcacagaaaaaaaaatgcagtaccaaaaaatagcacaagaagtttccgctttcgattcatagcacagaccaccggtttttcttcgtcccgtagcacttccgtcgcattttgaagtaacggtgttagattggagtggagaaatttttcatcggactcatttgcccttcgtctcatctccaacgacggccgctcaacacaaccgtccgcctcttcatgctgtccggcccaggcatcagcgtcgacgacggccgcggccgtggcaggttgtcgctgatgctgtacttccacggcggccacaggtggggaaaggaagcgacccatcggtggctccccccatccgcaagagctccagcatggggaacctttccctcatatcctcttctccgccgccgaatctaaaggccaagaatgatgttcagttcctattagaagaattgagcaattctctgttaaagaaactgacctgagctcggcaatgcaaatcaatggtgtccttggagttcggaatttaatttttgcaaatcattgattaagcagtacacaacaaactagttcatcaagagttactagccaccaccgccgagcaagccgtgacattgattccgctggctgccgagcaagccgccgccgagtatcctgccagccgctgccgttgtcgccattttcgccccgtcccatgcgccgcctagccggctgctctcacgacagaacaatgatgaacaggcaatggtccagcccaaagtcatgtgtgaatacgggaggactaagggcaaatttgtcattttttattcctgctcacgaccaaacgcttaaccctcacggcagatctgacggaaataccatggatcgaaaaaaaacaagtgtgttgtgctaccagttgaaagtgaaatttttttttactattttttggtaccagcttaacttatgtgctatagatcgaattttctcatgtttttttgccgccagatagtctgacgaagcattatttttttaggaaaatgtctgaattacgccctgaactattattgtggtagtacggatcccctcaattcaaaaagcaaatattctttactcttaactttttataccggacgaattacccccttgatagactctagagcggttttggttttacgtagcgcacaccttggtggttttcatgctatcaaaacaagttttctacaagtttatgtactgaattatacccatataatttacgctttttcggatgtctaacgggtttgcagcaactaccgaattgaaataagtcaaccctgcagtctctcctctccctcaaatgacaaatgaaacgatacccatttaatcaatttctttggacaacttatttcatacctcattttcattgaaaccaaatctatacatgcatatgtactcctacatgttacaccaaccatgacgcatacctgtaacctgcttccacgggtagagaaacaatctttagtcggttgacccaaatccacaatagtcccggttccattaaaaaccgggactaaaaatgattttttagtcccagttaataagaggaaaatctttagtcctggttgttgttacgaaccgggactaaaaatcatctttagtcccggttggtaactctaaccgggactaaagttcataccaaccgggactaaagatcatttttagtcccggttgattccatgtcaggccgtgtcagggccctaggatctttagtcccggttaataacaccaaccggaactaaaaataggtttttagtcccggttttcctctctaacttcttatctctttccttatctctaactcccctcctctccctccttttcttcctttttttccttcaccccacagcaccctcgtctccttccttttttcccgaagaagcgtgcaggctgccggcgccgcggcggaggctcggggggcggcgcacaggctgcggcgcggggggccacgcggaggcggcctgcgcggccgcttgggtgggtggcccgcgcggcggcgcttggggcccggcggcggcggcctgcgcggcggctcggggggccaccccgcggcggccgcgcggangggaggaagggagaccgcaatgaccgcccggcccgattttttttagatgggaatctgggattaatttttgctgaaagtgaatctgtgatgaatttttagaactatgtgatgaaattttttaagagtttgtgatgatttgc

SEQ ID NO: 15515 - DNA, 4664 bp, Oryza sativa
  unsure (1)..(4664): unsure at all n locations
cagcttgaccgctgtctagctatatgatggacctattggatttataaaatttagtgaggtccacggcaatggcagagcttgacttaaaaaagattaattaaggaagcaagacatatatcactaaactacacaaatacatatattgaaggagcaatttgagaattgagagcttaatcaatgctaaaataactaataatcactaaactacttaatagggactgtttaataactaatgatccactttaatctacatgatgtttcactcctgtccatagatttatagttggtctccacctgttgaaacatgtgttgaaaacacacttatcggggaaaaaaaattatgatggttttatgcacggtagtaatgtggttgcatgaatgttggtgcgtgggatattaattttctcggcataattcatccatgttggttactagaaataaactctctccgttcaaaaataattataattttaatatttaaattttatccataaagaatgcatctttcccttcaaccgcctttattcaaaagttctcatcatcttatccctaaccagcatccgctctcccaatcatcaatcgtttaatgaggacatacaagtcatttttttatactaacctttttcaatactacctccgttttttaatagttttttaatagatgacgccgttgactttttatcacacgtttgaccattcgtcttattcaaaaaatttacgtgattataatttattttattgtgaggttttttatcactcaaagtactttaagcatgatttatatctatacatttacataattttttttaataagacgaatgatcaaacatatgttcaaaaatcaacggcgtcatctattaaaaaacggagcggagcgagtatattacaaatgtaatttttatactgagggagtatgatcctaaatccacaaataatatagagtatataataatatatcttcggtccaagtggccacagaggcagcaacaaggccagcggccaggagaagcagagtctgcaactctgcatgtgtggcttgcttgctactccacggatttgaaatatctgaaaatattccatgaaaagtacaaatgatgagaatacgactcccgcgcggtgtaatttaccaggttaaaaaatgccaccttaattacaatgttccaaacttttggtgctacaaaatgatcgtccttttttcttcagataaaaaggattttaaattagacttaccacgaaaaaaagtaccctagagatgtaccctctttatattattatcaatttagcattgaggtggatagtgataatcttattttgtggaataacttttagatattgtggggtttgtcaagtgtttttttaataaatgttgcgaatgataatgttagccattataaaaatatgaaacagttaggagagacatgataattgcataaaatatttatctaaccttaatttgatatgtgattaaactataaagattatataatcttttacaatactaaaaaaaaagaacaacacaatataactttacttcaaacgggaccttagtgtgatagcaaacaataagactatagggtggtcactacgggtgtctcgtaaagaataactgacatatcttggattgaccaagtgaatggaagaaaccacgaaacctttcaacaaaagaagctttcgccgagcagcttgctgacaaaaatcaacggggaggccaagacatgggccttagtgggcgtgagacagctgagatggcttataccttaactaactcggaccaaaggtcttgagttttgccttttctttttatactgtacagtttactccttccctattctatgaaattggcgactcaccgattcgctaaaaaaaaaccacggacatcttatgatcaatggatacgacgtccactgctaaaaagatatagtacttgaatccatgtgtgaacaaattttatcacataagaaacctaaccagttaaagtatgatcattccataacaatttaacactataacatgacatatatatatataacaaccataaactacttcctccatttcacaatataattcattctaacatttcccatattcatattgatgttaatgtataaatgtgaaaaatgttagaatgacttacattgtgaaacggagggagtaagtattaatgtgaaagctcccttgcatgtgattcggtttcacatcacagctagctacatatattcctatttgcgaattgaatggttacaatttttaggatggaggagtgtgcactggccaccacacacccttacacgtacgcatgttagctagcgtatcgtgatcgacagtgaaacgcagagccacatacatacatatggagacaattccacagccactactactggtatacagggcaaatccaaatccatggtatacgtactgcacgcgtatatacgtacaagagagaatgatgtatagtaaggctgcgtttgtttgtgtgatatagggtgagaaagcatctcgtttttcatgtacacgctttctaaactactaaacggtatgttttttgcaaaaattttctatagtaaagttactttaaaaagtcatattaatctatttttaaaatttaaaatatttaatactcaattaatcatgcgctaatgattcacctcgttttacgtatcttcccaatctctctaatctccttcttctcaaacacaccctaaatcgctgagaggcggatacgtacgtacgagagtgcagtactagatagcacgaattgtgcgtacgaaattgaagtggctgatctatctgatgatcccctggccggatagagaccggccggcagcagccaatgcgacccatggagcccatatgggtacgatcagcagcacaatccatcatggcgatccagtactgtcaggtaggcagtcccagctagtgtcatctgggcactccatgtgtgcctgcctacatggacatcacaagtgtcaatggtggtggtccacgtcatcaagcctggcaaatcttgttttcatggatagctacctttgtaaaaagattatatatatttacatgacatgtatgagatttgctccagtaaaaaaaaaagtaccttgatgtaccggtacctcacggtacgtatcaaattgtgtaagatccaacgatcaaaaacgatttggtaccgtgaggtaccgatacctcgagatactttttgttggaccagagcaaatctcatagtacaaacatatgcgctcatatcactggtggagaaaccatttttggtcggtcggccgaaattcacaatagtcccgattccactaaaaaccggaactaaagatgatctttagtcccgattggtggctacaatggtcatatttgatctttagtcccggttggtaacaccaaccgggactcccggttctagacctgtcagaccttgtcaagccccctgggatctttactcccggttggtgttaccaagcgagactaaagatcctaactttactcccggttggtgttatcaaccgggactagagatctagaagatttttagtcccgcttggtattaaaattcaacgcttaatatataatccttcttccctatcctctcctccacaaccgcctcgcacttatcctctagaagatttttagtcccggttggtattaaaattcaacgcttaatatataatccttcttccctatcctctcctccacaaccgcctcgcacttatcctctcagatctcgatctccctctcctccctctcagatcgatctccttctcctcctccccctccgcctcctccccttccttctcccatccctggccctctcctccccgtcctcccttcccatccgcttagatcgatctccctctcctcctcccctcctcttctcagatcgatctctctcctcctccccctccgcctcctccccttccccacccatccccggccctcttccttcccctcttcctttccacgcaggccttttcttccccttcttccttcccacccaagaagcgggcggctaggccccgcaccggcccaatggcgaaccgcggcaggccgcaaccgctaccggcattttttttttttttacaatttgtgattcactaagatgtttaattttatgatttggtgcatgacctgagatgtataatctgtgatgtatttggtttgtgtgtaatttttttaagatttgggatgctattgatttgtgtgtataagcaacttaagatttgtaatgtgaatgttttgggatgttactttgatttgaggtttgaattgggatatgtatcccacttgatttgggagaaaattaaggattaaactcttgctaaaaaacaatgaaaaaaaaagaactaatgggactgccgctaccctctctttagagcccgttgtnnnnnnnnnnnnnnaanntntaancantttttttntnntaacaatatantaataaaactttatttaaaaaacattttaataacaaatatttttctnacccatcattatccccttttttacccccccatacatacctcttcctaatctaacacaccttccactattaaatcatcctnctctactcccaccccataaaactttctcctcccttaataccatttnctccaccatctttctcatctccccccccctaatccatatttcatatccccccctcttcctcc

SEQ ID NO: 15516 - DNA, 951 bp, Oryza sativa
  unsure (1)..(951): unsure at all n locations
tagtttgcctgttagatctagccttcgcactcttatgttcatttgtattacttttgctatttatcttcactagaaataaaaattttagatgctctggtgcaaagttgccttattttgtcttttcctggctgtagggacaccctcaatctgccatagaacggaagagacgagcctggtcagaatctgaggatgatgagccagtgcagaggccagtgcaacctagcgcaggcgagaacgatctgagtgattgaattagacggtgaagattatggccgaatttgggatcacttcatatatttgtgacgaagaatggctcctgggatgcggaatcaactatagggcgtgctcatatgcacttgtggataattcgatgttgaaatggagctcagacagatggttgaaccagaagtgttaaaaaaatttatctgggagcagagcagtcactgatattcaacaattaatctcgcgtcattctagacatgccatgggttggtggagctaacataaggcaatttgtaatttatgtctagtttacgcttaatcagccagacttttgtccttggagcttctaacgctgtaccaattttagctcacttacatctcaagatagctgatctcctactttgttctttgctgctaggcaagcgtgccaagaaaagattttcaaaagtagctgatctcctaccttgcaccctaattttttagacacttcngntttgcaggcaactgtacgtgctcattggcaatcgcttataatggcctgctctcgtccaaacaaagtaatggatatatagatctaaagtaacgaatttttcatgcgatttgtttcaaggtgcaccttttggggccaaagattttttgaggactgcatatatggtgcattcatggatttaattgagaacctttgtggtgagttagggagggagaaagagaatggccttcaagcttcaa

SEQ ID NO: 15517 - DNA, 10945 bp, Oryza sativa
  unsure (1)..(10945): unsure at all n locations
tgaatggggnnnnnnnnattgagcgcccgtcgtgtgatggatctcacctagatctgattggtatcggcttgcggcactaagtgcagacaaaacatgtggatggtatcagttnnnttgaacctctgccgacatgtgggaccactacaccggcgcaccccgccggccagccttcgcacgtcgaagaccgcgccacacgcaccggcagctcctcctcgcaccgtagtcgcctcctccaccaccagtcgcgcctcttgcgccgcgctggtcagatgtggccgtctgccacacccttggctagccgtccgagtctgccatgcttcctcccaccacaaccacggtctccacagcgctgccactggctcgagctcgccctccgtgtttcctctcacagacgccgtcgccagcctcagccatcgccgccatcagccaccgccgctgccaccacgggcgctgcctcagccgctgccgccgtcgtccatcaccagccgcgcctccagccgctcgtaccaacggccggccaccgttgtctccgcaagcctcgcgtcgtcgtcgctcgccccgctgccgctgactcgtcgctgcgagctccaccgccaccaccgccgccagctcgccccgcctagccagatccgcctctgacgcaccactgccttccccgccgccgtcgccatccccgctgccttcgatccagccgcccggcacagctcgcccctaccgtcgccgtcgccatcccagccgccagatccggccggagcgacgcggatctggcggtcaccgccgccaccacccagagtggttccccaggccacccgggcaaggtctgacggcgagaaacgaggagccccgccgccgccgtccttgcaaccgcgtggctttgccggcgcccgctcagccggcggcgaggcgttgaagaaagatggggggagggggtggccggcgctcatcgcctcccgtgccacctctgataaggaagggcgaagcgagagcgtgctcgttcctgccttgtatatttataaaaaaggaaaatagaaagtgttacgatgtacaagcatgtggtgccaaaaaccatctctatgaacttatgaatgttagaaagtataactcgctgatggtatcttttgttctagaatcgtgattatacaactgatttagtatttttaatttctaatgctgataacgagcatatatacatgtaagctaatctggaaatatacaaagtgaagaaaaaccaaagccaaagtccaaactgctgcatgcctctatcttcttgcaacaaggacgtcctgtggggtgtaaccttgtaaatgtgtgatcatccatcaaagtcgtcatgatactgtccaagcacacacgttcataatcacaattttactaacatgaagatgatataaaaaaaagtatccattggtagctgatgaaaaagcaagataatattatcctcgatagtctactaatgatcaaaatataacatcttggttagaactaccattgtcggtgaaatgaaaaacaaaatcctcatcgctagcgactcagggcatgtctgcccccagggtgctatcctcatgggttgtgctcgaggcacttcactcctcgggacgaccccttgtgggttgtgctcagggcacaactgtgctttgcccccaagtgctcggaagagcaacagcgcattgttaactctcgcaagctcagacttcctcacgtgtgtattctatcaagcctcacactcagtgcgcaaggtgtatatgccaacctggtgtgcgaccggacaacacgcaataggacgaagcacacctatcccctgtagcacgtgtcaccctggaaaaacttttgacttcttcacttcactcgttaatcggcatgtgaaacagtcacctccgctaggcctaagggatatcgacaagaccaagcatgccgaacttaaggagtagggcccactctcatatgtacatattggtaccgtggacccccccccctccccgtttataaaaggaggatccacaccacctgtaagggggcttgcttttttcgatgtcagattaggcggagttaattagactgattcaagccaagttagaataaactcacacttcaagagaagaagagttcatcatctcctacttagaacaacatccacccaatctacattgtaaactttatcaccctcattcataacaagaacacaagagtagggtgatacgcttccgagcagcctaaacttgtctaaaaagaccatatgttcttatttgcatgattcgattgcctcgtttccgctcacccattccatagccaaatcttccttggggggtgccactcctccccgctgaaggagctccatacaaccattgatatacataaataaggcttgccaccaatgcaacaaaacactaaagtgattctctatctatttgtagcctgccaatagataactatttttttcatatatccctattaaaataaaacaaatcatagagacgtgtgaaagatatatgtgatataataggaggtcaattatcagaatccttagagataatttgagatgaaccgtctcatattatgccattgcaactacaagtgctcaattatcacaaaacaaaatttaaatcattttgtgaatgttgctataatatatttattgaaactacagggaccatctaacatccatgatgatcggttatttcataattttacaagtagggatatttaggatttgatactcataaaggtggcatttcaggatcccaaaaaaaaacctccgtgcctatgacatggtggttgttctgatcccacaataacagatgcgtgagtggtacatcctaaattgtaactatttatagatcaaaaaattcaaaatccctcttttaagtaaggaactagttgtgataatacatcacaatggattgagaaatttttcacgccttaagggtgtctcatcattgattcattgtatcaaaatacatgccaatactagttatgaaaaaaaactggtagcattggtataataaatatatgtctactatccgaagatttgaggactaattaagttcgactcacaatgagaaacataaatgacaaattcaaattgtaaatattgcactattcatgggtatatatattttgccttctttttcccccatttagttggttgagagtcgtagtagatgcaatatagtactctatattgttgattttttttcagaatttttatcactatttgtcttgtttttaagaagcagagctacaacagggctgggatagggggtaaaaatccactacctggtggaataaccttcacaacaaaatctggggtgacccaattgatgttcttgatcacaataaatcaaaaatatccaagtttacatgcatgcatgaactcaataccagcccccaattctccaaaagttgaaaaaacaaattctgaccatgactataaattaaatgtggggggaaaaaatcagggcttgtgctagctaccaacaaaccatgaatatatatttctagaagggaaaaaaacaagacaggaatattgacaaggcgagaaaccaacaaaagtgcatgggcaaaataatcagtcccccccaacttgaaaaatctcagctgcttgaaaccccccagccacaaacccaatcctgaactagtggctgtgtggatgaactctgattggattccagctactatttgccatccatttcttgctgaattctctcttctttaattcatcctctcttctcctcttctccttcatcactaggcagtagccacagtagccagtagctagctagcttgtcaagctaggagctagcagctgtgtgtcgtcgatggcatccaccgccgccttcctgtccacgctcgccggctcgaccagcctgggcggcgccacgccggccagcggcggcgggagcgggaggagcaagacggcgaggttcttgaggaggcggcggcgcggcggcgcggtgagggcggcggtgtccggcacggagcaggcgccggagacgacgaagaagaagggcggcggcggcggcggcggggacgagcgggtggtgcaggtgcacagcgcggaggagctcgacggcgcgctgcgggcggcgaaggagcggctggtggtggtggagttcgcggcgagccacagcgtgaacagcagccgcatctacccgtgcatggtggagctgagccgcacctgcggcgacgtcgacttcctcctcgtcatgggcgacgagtcggacgccacccgggagctgtgccgccgggaggggatcaccgccgtgccccacttcaccttctacaagggcgccgagaaggtccacgaggaggaggggatcggccccgaccagctcgccggcgacgtcctctactacggcgaccaccactccgccgtcgtccagctccactcccgcgccgacgtcgagtccctcatctccgaccaccgcggcgagggcggcaagctggtggtgctcgacgtggggctcaagcgatgcgggccctgcgtgaaggtgtaccccaccgtcgtgaagctgtcgcgcaccatggccgacaccaccgtcttcgcccgcatgaacggcgacgagaacgacagctgcatggagttcctccgcgacatggacgtcgtcgaggtgcccaccttcctcttcatcagggacggcgacatcgtcggccgctacgtcggctccggcaggggggagctcatcggcgagatcctcagatacaacggcgtcaaggtcacctagacatatacagattcatcactacgcagctcagctgcatgcagcaaccgtaattaaattaattactgtactactctcttgatcatgattgtaattttacaccaccacactagcttgagaagatcaagcttgttttatactggggacgatttgatcaaacctatctcgttgatttggtcccgtgtaatactagaattttggaacgtcaattgcaagttcgagacttgattttgcctatgattgtatctgtatccatccatctatcataggtggtgttcttatctctgaagatgaagattaagtttttttacgcaaaacaaggtggtattaacatatgattgattgagttttgattgttacaaacttaaaaaatagattaatatgatattttagagcaactttcatatagaaagttgatcatcactactgatcgatgtttttacacttaatggggacgatttgatcacactatctcgttgatttggtcccgtgtaataatactagaattttggaacgtcaattgcaagttcgagacttgattttgcctatgattgtatctgtatccatccatctttctatctatatgattgcccagttaatttatcttctgattaccttctttcttaattaattaccccatgtctcaaaaagaagataacaatgatctgctcaccaagagcaatggaagccacaagatgaccaaacaagaactgctcacaggtttgccaaacatttgtcaaatgcccaaactgaatctgaagatatttacaggcttccattttcagacggaaagaaacagagggtagcgtagggaagctgcctacgccgtaaagaaaagatcaacagcaatggcagcttgtcctccacaagttcacatcatctcacagcaagttgctttcacttccagatcttatgcactacttgcaggtggtaatgtcggtcaaaaactggacaaaattgccttccttggtttgctctgctgactgctggtcctgggatgtcatcacaaggaagcaatccagatcactagatttacatagttgacacaaaagggttcagttcagaaactgctcaattagtgcatgccctaacgtaaaaaaaatgatcttctgttcattggtactgttataaattagcggctgtcagcatcagttatgtcacagcaacggaacaggctcctaacagaagatgaccaagttgcagataccacagaatataaattactgacattctagctaaaaaatcctataaatctcttactgcacaaaaacagcaaactagagaaaggagtagcttgggactattcctctgcctcggcctcggcctctccttcctcttcatctgcagcccaccaagcaagaagaccaagaccgtctcctttaatgcttccctgcgaaagcattagtcagcctagttactcatcaaaggacactaagccagaattcaaataattgagcataattctcaaggcatacaataatttgcattggagcaaatgccctgtcagtctccttttgctcgactgggataggcgggtattttatgctagataccaagaatcgtatctgcgtagcaatcaagttgatcatgagcatacagagaatggtaattgctttgatttttttttagaaaaaaaacagattttgtatacctcatcatctaaatcaagatagagctcatcaccatcttcagtcttcagcatccacctaccatctagcgccctgggggaaatgagcagcaaagaaaataaagcaacataaatttatgtagaaagtactttcctcatgacaaacagaacaaggtagcagtgtgtactcagcagtctcaggtgacatccactgtcctcagcagttgtagagtttgtttttaaacacagataaagtaatccagaacgtatttaagccattgcaaagattctgtatttctgattctgttttagttcctgactgaactaaatttcaatagtatttttttttcataataaccaatctggttgaagtacatgccaagcagatgcaaacataacaagttaatctaagaggaatcaaaatcaaaatgtatgatataactccagagaagagtaagaacctcaagttttcaaattatagtagttactgctgtacaggaacaacaaaacaaaacattacctagccgtgccatactgcatcaagtgcccgggaatgcttatatcactgaagaaatcaagtgaaactgccaaacagatgtagccatatcagctcaaccaattgtttgtgaatgaggcttttcctactaactagtaccagaagaggaaggggccatttgtaacttttatacacatgtgaggcacaaatagtccaacagtaaagaacaggaattagttaagagtacacgcttgtcaaagataaaatttacatattcagtttaacaggatactatgttgaaaacagataactatagttcagaactaccctccagatatttagctagcaatggtttgtgtaccccaagaaatgtaatcactcttatgcaattgaggatgctgattccaggttagtaatcaggtctacagtggcaaagaagcatactatgatattaatcaacatctatttcattcaaacaaaaggatatatgagaaagtaaactagtccattgtttcgaacagcatgacctcaggataaaatagtgcaacagatacagagttaaacatcatatacaaatttcgtagcttattcttagaagacataagacatactatgacatggaaatatgaacataaaaattccatacagtacaaaatgttatccgatgttatagacaactgctacaaaaggaatggaatattccaacaggcaagataactagataagagattgccagcaaaccagctctttaaatgtcaataagaaaataagcaactcaccatgcagacccttttcatcatatccactgatcttcccgacaagaacctccccaacgaagggcctgaacatcagcaacctaaaggaaacctatacaggatggggaaaataaggaaatctaagagtgatttgcaaattgtaggaatcctcagaactaaatgcataagttcactgagacgacgtgttgcacacaccacactaacagaaatactgtaagaaagagcactgatgttaatagacacaactctaatcacaatgggtcattgagaacatgctatgttgtcatcaagtcgatcgcaactagtacataggctcgaaatacactaccaacatgagtaacagaattaatcaacttagagcttaaataagtctccaattgtgctgaaatatttttcaggcattcacctcctacagaatcttatgagacaagtacaccaccaagcagacatgtatcatacatatatcgcaattccatcaccaaaacaaaagggtaaaagcaatgggagcacaaattactttgtaagtggagcagccctctcctggaaagatgaagcctccttcgacggagcggatgtcgtagacggagacgcagagcccgaggttcgcgacgacctacatacagcacaggtggggggggggggcagaagcatgcaacacatcatcataatctcttgtacacaaccgtccgtgagcgagacaagcatcaacaacaggggtgactgagctcgtggtagttgattaccttgtcgaggaagagcctctcaagctcagccttgatggcgtcgacgagtggccggctcagcaggtgcggcggcatcggcaggttgtgttcgatctggctgagcacgaacatctctgcgctaaagtggcggacctaggatttagaagctgtgtattcaaaataacatgggttttttttctacacgtctacacccaaaatcctaataattagcttgtataatatcacgtactagtaattatatagtatatagtatatgcaccgtaacattgagcataggttcgtatagtatattgataaaattggtcataataacatactaatacacaaaatgaacattaaattctctgaattccaaacgattgtgtctcatataaaaaatatagtgaattactgatatacacttagccacacttaaccatatgctagttgaatccccttagctaactagataagcaagtgttaaagttgaataacaataagcggttaaatgaatcctcgattcctgatggctaactaggctaatcattcagtcgaatcggtaaaatagaacttcagataaaatcagcaaagcaaatactaagagcaaagcagcaagcctctatacagactatactaagtgctaaccacaagcgaatgcgccgaaagcgggaagccaagagcaggactaccgctgccgtgcggccgtgccgccgcgcgcctgcaccgcccctgctgcgccgccggagcagaggagcgcacagccccaccggcggcgaggccgagccgacgggggtgggggcggcggcgtcgcggcgaggtttgagaggcgagggcgaagggaggaggggtgtggtttggggtgtaatgggctgggatgggccgcggggcgactaatagctctgatgggaaaaaaaaaggaataagtacatctgaggtcccttaacttgtcaacgaatccgattttcgtccctcaactatcaaaaccggtacaaattagatccctcggcggttttggctgatgtggcacttatatggctaatttgactcgtcttcaactgacatggcactcacgtggcgctgatgtggcaattcgattcgaaaaaataataaaacccgtggggcccacaagtcagttcacacagaaaataatttaaaaatggtagggcccacgcgggccccacatgtcagcctcactcctcccttcatccctctccctcggcttcctcgacaccattgacctcaacggcggccgcgccgtctccctcggcacctccaacatctacggcttcctcgccaccatcgcccccgccgcagcgcacaccaccccacgcccgccgccgcgcctaccaccaccaccccaaatgcggcggcacggcggcggccaccccgtctcctcctccttctccccaatgttgggatccatgtcacggcggccggaagggcgacacgacgagcaatggccggcggggaaaaaggacaaagcgcgccgacctggaagatgccgccgccgccgctgccgcttggtgccaagatctggaggctggccgcccgtcgccattgggagcctggaggcctgctgcctggtgccctctgttcggcggacctcgctcctggggaagacgccaccgtgagccgatggtggggagcgagcaggcaacatcgggagtggaagatggctggcgggatggtgagctcgagctcgccggctcccctcccctcttcctcacctccgtcttcctcatcggccgccacctaccgcgaccccctcctcggcaaccgcctcccacctgcctgtcgacgggatggtaagctcgagctccgcctctgctcctgcggcgcgggggcctcggccgagttggagccgcacatgggcaggaactcggcgccactccccgccgacgacgaggctggcgccctccgcttggctccgccgccccatcggcttcgggtgcaaccacttcgccctcgcgtccaccgccgctgcccactctgccccgtcggcttcacaccgtcgttcgcccgccgccaccccccactcgaccccgctgctctaccacccacgcgaagataggggagaagaagggtgagagaggagaaataaattgctactgactgacgtggggcctatgtgggccccaccatatttatttgttgtgtagctgacatgtgggccccacttttttattattatttttatgtagctgacatgtgggcccacggtttttattatttttcctatatataattgccacgtaagcgccacatcaatgccacgtgggacagccctaatcaaattagccacgtaagcgccacatcagccaaaaccgccctcaaaaccgccgagggacctaatctatactggttttgatagttgaggatctatgtctcaatatcaccctgaatttggtaaaagtttgattgagggttataaacaagagtagcaaccaaaaaaatccaaggtttcaacagagagaacaagtaaaagaataaccaaatagtcccgtgggtgtatgaacagagctatatcaccatgtaatttggtccgatctggctcagtgatagaaagcatgtatttcaggagatgccatctcacagcggcgctcatt

SEQ ID NO: 15518 - DNA, 1564 bp, Oryza sativa
gaggcctcattctttatgtggcttggagccatgaaattcgaaatagaatccatgcatgtcaatcaagttcggaactaggtagatccacctgatggtgtaaaagccattgagtgcaaatgggtctttaagaaaaagacagatgtagatggaaatgttcacatctacaaggcacgattggtggcaaaaggtttcagacaaattcaaggtattgattatgatgaaactttctcgccagtcgccatgctaaaatctattcggattgttttagcgattgctgcttatttcgattatgagatatggcaaatggatgtcaaaacagttttcctcaatggaaatcttgatgaggatgtgtacatgacacaacccaagagatttgttgatccacaattagctaaaaagatatgcaaattgcagaaatctatttatgggttgaagcaagcatctcggagttggaatattcgttttaacgaagtagtcaaggcgttgggctttgtcaaaaacgaagaagagccttgtgtatacaagaagattagtgggaacgcactggtatttctaatcctatatgtagatgatatattattgatcgggaatgatattcctatgcttgaatccgttaagacatctttgaaaaacagtttttcaatgtaggacttaggggaagcagcatatattctgggcataaggatctatagagatagatcaaagaggctaattggattaagctagagtacatacattgacaaggtgttgaaaatgttcaacatgcaagattctaagaaaggtttcttaccgatgtcacatggcattaatcttggcaagaatcagtgtcctcaaacgactgatgagcgaaacaagatgagtgtgattccatatgcctcggcaatcggatccatcatgtatgctatgctatgtacacatccagatgtttcatatgcacttagtgcaacaagccgataccaatcagatctaggtgagagtcactggatagctgtaaagaatatcctgaactacttgagaagaactaaggatatgttcctagtctatggaggacaggaagagctcattgtaaatggttacactgacgcaagcttccaaaccgacaaagatgattttagatcgcagtctggatttgtgttctgcctgaatggaggcgctgtgagttggaagagttccaagcaagatacagtggctgattctacaacagaagttgaatacattgccgcttctgaagcagcaaaggaggctgtttggataaagaaattcgtttctcagctaggtgtgatgactagtgcttctagccctatggacctctattgcgataatagtggtgccattgcgcaagccaaggaacctagatcgcatcaaaagttcaaacacatcttacggcggtattacctcattcgcgagatagtgggtagaggagatgtgaagatatgcaaaatacatacggatttgaatgttgcagatccgttgacaaagccactccctcagcctaagcatgaggcacacactagggcaatgggtataagatacgttcatgattgactctagtgcaagtgggaga

SEQ ID NO: 15519 - DNA, 9218 bp, Oryza sativa
  unsure (1)..(9218): unsure at all n locations
tgagtccntttaanccttgggtaagtacgaaggaataaaaaagtacggtacgtacataagcacgcccagccccacgtctttattttcattttttcttctttctcacttattagattagatgaaaaacaaaactaataatttaagctcatatgtaaaaatatatgttattttgagttgtattataaccatatttatgctantcggatcatacccataaaagataccaaaccaanantnncngnnaanaaanaaannaaantttttaaaatttttnaaaaggggngnnaaaaaatttttttttttttttaaaaaaaataattgtatatcactttaagaaattagacttgcattttcaaaattaaaaataacatagtaacattcccaaatgtcactcaccctatttaaaaaaaatactgatacaattaaacaacattactaaatactgattctgctgcccccagactctctctacccgtctctgtgactactactctctggactactttttttaactcatccttccattcttccttgttcaatcgggctaactgtagcaagatgttcccgatctattcgcagcaaaacatcatacgctccaataattctctcagtttttgttttgttcacaagtgaataaatttgtgctgcactcaaaacctgttcacaagtgaagagttgactagttcataggatggagcattttctagtttttatcccattacgtgtctgagtatttccctttttcctggtgagacaagaggcggcaacatgagaactttgcaattctgtccaccccaagaagcacaagaaaagctaggcttgctacattttagtgtaccatagctagcagctctctgattggtatttgatctcgaaccgtagcccagggaggaaaccatgatgttacttggacatatgacgttgatatgcaggcaagatgtatggctaacttgctcaaaatatgacaataatgtaactatttttaccagttttttagtcacttaatttggagttaccgacagatccatacttccataagatctcgacaaattccatgcatctaatccaaaacaaactaattgaatttttataacaagctttagtctttttttttcgaacggctggtcagaattgactggcgttatattgatagaaggacaaaaagtacaaatagccaaagggctaaaaaagagaaaaactgtacatgacaacatgcaaacaagcttgcacgtagccttcctagctcctcatggcaacattctcccaatgtgtttagcgccggccatactccaccaacctaattcctcttggatgcgactaatcatctggtgtactgtcgcctcctttgctctgaagattcttgcatttcgttccttccagatttcccaagcaatgagcaagaagagagctctgagtcctttctgttttgttgcttccgggtcgcttgttccttgtgtccaccaatctaagaggtttctacttgtgttccatttcgggatgatgtgcccttggtgcagccatgtgagaatcccaaaccagatttgctttgagaccgggcattcaaacagaagatggtcgattgtttcgagatttcgaaagcatagctggcagaaataattatttggccatcccctgatctgtaaccggtcagttgtccacacccggttttgaagaaccaaccaactaaagattttgcactttgccggagcccatgcctcccaagacaactttgttgatggcgagagtaccattccattgaattggaattggtacgcggattttgcaccgtattccccattagttgtccattgccaaacaatcgagtcttgtaccccctctgttagttgtggggtgtcacgggctaaaatttcccaaacatggaagaattcatcaagaagaggaatggtgaggctgtggcggacgtcgttaatccatcttccttgttgcagggcgtcctagacggtgcaggttttcctcttcgaatgcctataaagattaggtgcttgactttttaggctttggccaccgatccaatttgattcccaaaagctcgccttttgtccgtcaccaatttggactctcgttgatgccgcgaaaagatccttatccaattcatcacagggtgtttcagtccctatccaaggcttctttggcatcctccattcgaaccataaccatctcagtcaaagagctctggcaaacttttctaagttcggaacccccaaaccaccgtaccggacaggtgagaaaactttaagccaattgaccttgcattttccgccatgcatattctcattacctacccacaggaaccgccttcttgctttgtcaatttcttgaagagattgtttcggcggtttcagcaccgtgagggtgtaagttgggatggcacttagaactgagttcaccataattcggcgcccccccatgtacaacaatgatggcttccatcccgagaaccgacctttgatcttatcctggagaggctggaaatgcaccttacgtaggcggccaggagtgagtggtagccctaggtaagttagtgggaagctggctcttgcccccgaataactacgcaagacgtcgtccagatctacttcctggcatcgaattggtgccaccagactttttccaagattgacgtgcagccctgttgccttgccaaagtccctaagcatggtaataagaacatccacctcgctttgtacagggttgagaaaaacagctgcatcatctgcatcaagcgaagtcctcaatctagcatggcgacttccgatgttggttagttgcccaccttcggtcgatagatgtagaagcctttgtagggggtcgatagccaggataaagagatagggggatagggggtccccttgcctcaagccacgtctgtgtgcaatgcattccccctggtctccatttaggactaccttggaagtggcggtggaaaagagcaaacagatccaatttctccactgggggccaaaacccatgttttgcatcagttcaagtagatattcccaggagaccgaatcaaaagctctagcaatgtctagcttgagaaaaagtgttggctttttgctggcatttaggttcctgagcacgttccgaacatacaggaagttgtcttgaatgcatctttttttgatgaaggcgctctgtgcaacagagatcaggccatccatctgcctggcaagccttattgctagaactttggatatcagcttggcgacggagtgaatgaggctgattggcctaaaatcggtcaccaaggtaggggcattcctctttggaagcaaggtaattgctgctctgttgagtgctccaaagtttcatcctgacaggttatacaaacactggaaaacatccatgatatcctgtttaattagctgccagcatttcttgtagaaggtaccattaaagccatctagacctggggccttttctgccggcatctgctttaaagcggcccaaacttcctcctctgtaaaaggttcatctagttcatcggggttaacctgtggtagatccatcgcgttccaatttagggtgcaatttcacgcctccttgttgcctaggattgagttgaaatggttgaaaagcgcgtcacttttttcctcatgttctgtcaggatagcacttgttgtatggagttggtgaatgtggtttttccttctcctcgagtttgcgtgaatgtggaaaaactttgtgttggcatccccttctttcagccatgtcaatcgcgatatctgccttttcttcgactttgccactgctgctagccccaaaattcttagcttgaggtcattcctgagctggtgttcatcagtcgcttattatacgattgagttacggttataaattagagatacatagctggatgcatgagttggcaaaatattcagtagtcattgttacatatctaaccaacgaaacaaaaatgtacataaatcaatcacatgtttttcccccttttttttccctgaaaactatccacgcgtctacaccaaattaagttcataacctcaaggagtgatgagacccatggtggtttacagcgcgtcgcagccgttggaaatctgtgccagtgtcagcctgaccgcaacgcaaaagccggtaagaccatgcttgccagattgccactaatgctgcagcaccaagatgtcaagtgatcgatggacttgaactgaacgctccagcggtaatgctctcggcgactatttcttgagcgacatcttcttttcccgtggcctctcatttctatggcattttttttgttttcggtaagcaataacctcaagctgatgcaatcgtggaagtatatatatagtttatgagagttgttctatatagcatataaatatggtggaaatatgggaatgtgccacctgtgagtattcctttctcattttacatcgtctccgtttgttccactcttgcaattcacactaatgaggaaggcccagcgtacgaatgggaggacgacatatgaacggtcacaaatgcttagttaccggaatagcaacagtctcaacatgaggagttgaaatcttacgaaagaacagtggaccgacaagctacaaatgttgaaagaatagtataacaaaaagtcaaaaacttgatgagcagatagccatatatttctcaccttcgcctcttctaacggagtttctgttagatttaattgggtaatttatccatttaaatcaattaaatcaaataaatttcaaggctcattatgctaggaattcatgtgtattcattctcttatgggacatcaatgggacgaagaattttcagaattattccatttgattagggaattggtaacttatatcaattactcctaattgatggatggttgatggttgtgtagtggaggatggttcatggctagatgatgacaattagttgctctattcctcttcctattccattgcattggtaacctacactaattactcctaattgatggttgattgatggttgtgtagtgaagaatggttgatggctaattgatgagaattagttactctattcctcttcttattccatgactcttactcttcatcttccattcctcctataaaatgagaatggatttgatctccctaaggagaagtgagacacactttcatccatttccaaggctgttgctgctacggtaatcccatcccgacgagtgtatgcacacgcgttgggagagtaggcctccgaaaccacgcactgctgcgacgtatgcacggacgggcgggcgatcaggtttttggggagcgcaagacgagactactcactgttcatcaacgtctacttcgtcttcaccaacatatcgagcactggagacaacggcaacactagagacaaggagaaggaggttcccgtcaacaccaatgaaggcaatactgcctcaaactccagcggaggaccattcggtataaccttcttatattatttcacttagaagttttaatgttaatgttcatcgcaatgtcaacattgcgttattatgtgattgttgatgcttattctacgttaagcatactcatattgattacattcgccactatcattggatcaaatcccattgtaaatatcatgtttattatcttgctattttggattaaaatatgccgaattatgaccaaattctcaacaatccaaaaacctgataggtccttttaggtagttggctttgctgcaatactgaaaccacatgtttttgatggttctaactataagagatgctaagcacgtgcactactgtggttgacagcgatgcaatgcttctatatttcacggaaaaaacgaagtgaactgcctctctctcctgaggaggaggctaggttcgaggattcggattgcctgttccgtggaacattgatcagtatacttgctgacaatatagtggacgtgtacatgcacatgccttcggggaaggtcatgtggaatgcatttgaggccaagttcggagtttccgacaccagcagcgagctgtatgtcatggagcagttctatgactatgagatggtcgattaccgttctatagtggaacaggctcatgagatttagatgctgacaaaggaacttgagaacaaacaactgcgagttgccgaacaagtttgtggcgggtggcattattgccaaatttccaccttcttggtcggactttgctacttctctagaacacaagaggcaagagttcggtgttactgatctcattggctctttgggtgttgaggagaaggcgagagcaaaggacaacagggcaaaaatatcgagggaggttctagcgccaatttggtgcaaaagaagaaccctcacgcatcccacaacaacaacaacaagaaagtcaagcctgatgtcaaaccaaaggctactaccaattttaaggataaaggcaagggaaaggccaagggcgactgctttgtgtgcggtaagcctaggcattgggccaagaattgtcctaatcgcaaggacaagaagtctgccaacatggttattagcgagggcggaggaacatcggggtatggtaaatttttacctacaattctctctgtttttcattcacctgattggtgggttgatactggtgctaatattcatgtgtgtgctgatatttccatgttttcttcttatcaagtcgggagagattcctccttgttgatgggaaacgggtcgcttgcggttgttcatggtgttggtatggtcgatttgaagtttacttcgggaaagaccgtgcagctaaagaacgtgcagcatgtccctttaataaagaagaatctagttagcagctctctactgtgtagagatgcttttagacttgtgtttgaatccaataaatgtgccgtatctaaatatggaacttttattggaaaaggttatgtcagcggagttctgttccgtttttctttggatgacatgcgtaataataataatgatgtgaaccatattagcgagaatgatgagttcaatgtgtggcattcgcgactttgtcatatgaatttcggttgtatgacacgcttggctaatatgagtttaattgcaaaattcactttagtaaaaggttctaagtgccatacttgtgttcaatcgaaacaacctcgcaaacctcacaatgcatctgaggcgaggaatttggcacccctagaacttgttcatttcgatctgtgtgaaatgaacggcgtgttgagtaaagagggaaagaaatatttcatgacactgatagatgattgcactagattttgctatgtgtacctattgaaaccaaaggatgaagcattgtattactttaagatctataaagctgaggtagaaaaccatcttgaaaggaaaatcaaatggttgaggtctgataggggtggagagtatttttccaatgagtttatgtccttttgcgaagagtttggaattattcatgagaggatgcctccctattcacccaatcaaatggggtagccaaaagaaagaaccgcactcttactgagatggtgaatgccatgttagacactgcgggacttttcaaggaatggtggggtgaggcaattttgactacttttcatgtcctgaataaaattccagtgaagcataagaaagtagcaccgttcaaggaatgggaaaggaagaaactaaatctctcatacctacgcacatggggctgtttggccaaggtaaatgtacctatagccaaaaagcgtaaacttggaccaaataccgtagactgtgtgttcctcggttatgctatccacagcgtgggttatagatacttaatagtaaactctggagtacccgacatacgtgttggtataattactgagtccagagatgccacattctttgagtgaatttcccatgaaaaatacacctagcacatctagtcaagaacctgttttaccccatgagcactttgcaccgatagaacacagtaatcaaacgcctgaggaaaatcctgaggaggataacattgtatactcgaaagagtaagagacaaagggttgcaaaatcctttggagatgactacattgtatacctcgtggatgacactccaagaactatagaagaggcatattcatctcctgacgctgactattggaaggaagcggtacgcagtgaaatggactcaattatatctaatagtacttgggaagtcgttgagcgtccatatgggtgcaagcctgtaggatgcaaattggttttcaagaaaaagcttaggccagatggtacaattaaaaagtacaaggtaaggcttgtggccaagggttataaaaaaagaaggtgaggacttttttgacacctactcaccagttacccgcttgaccacgattcgagtactacttcatctggtagcctcttatggtcttctcgtccattagatggatgttaagataggctttctaaattgagagctggaagaggagatctatatggatcaaccagacaggtatgtactagaaggtcaggatggaatggtgtataaactgttgaaatccttgtatggccttaagcaagcatctaagcaatggcatgagaagtttggcacaacacttacatctgctgacaaatgtgtgtactatctctatggcgggggagagggagtgatcttgtgtttatatgccgatgacatattgatttttggaaccagcctcaatgtgattgaggaggttaaggactttttgtcccaaagctttgaaatgaaggatttgggagtagctaatgttgttcttaacattaagctactgagaggagatgagggtgggattacactcgtgcaatctcactatgtggacaatgttttgagtcgctttggttatagtgactgcaagccatctcctactccttatgactctagtgtgcttttaaggaaaaaccgaagaatagcaagggatcaattgagatactcccatatcattggttcattgatatacttggctagtgcaacgagtcctgacatctcatttgctgtgagcaagctgagcagatttgtttcaaatccgggagatgatcattggcaagctctggaaagggtcatacgctatctaaagggcacagtgagctatggaattcactatactgtgtacccaaaagtactggaagggtatagtgactcaaacttgatatctgatgctgatgagataaaggccacaagtggatatgtgttcacacttggaggtggcgctgtttcagaccatcttaacgaggtcaacaatggaagcagaactcacagc

SEQ ID NO: 15520 - DNA, 3352 bp, Oryza sativa
ggggaaaaaaaccccccccgggggggttttcccccaaaaaccccccaaagggggcccccccccaaacttttaaaaaactttaatcgtggcaatagcagtgcccacttgcagcaataacaaaaaaaatatagtggcgatagaagtggccacctatagccaccaaaccaataagcgtagcaataccgatgcccacctatagcaaccgaaaaaattcaagtggcaatagaggtgcacacttgtagcaaccaaacaattctagtggcaatataggtacccacttgtagcaaccaaatattttgagtggcaatagagggtccaactatagcaagagacatgtgtagcgtggcaatagtgggatctatcagtagcaaccaaaactgtgagcatggcaatagaggtcgacctattaccacgtttgaggcttgttgtaatacacgttttgcaacgcccaaaagcacttattaccacgctttgctgcgatgcgactagttcgtacagtaacgacatatgacgttgcaatacgtttctattaccaccaacccaccattgcattatctgttaaattgccacggtttattcagttgcaaaataagtttttatttgcaacggcaaagtgatcaagtggtaaaaaccctattactatggagttttgcgccatgagccctaacgacaaaaatccgttgcattttctcctattgcaacggttttgggcatattgcaacgaattctagccattgcataagtccgatttcctagtagtgtcctacaacaaattattctccaagcacaagtggaactatattattttgaaataaatatgcattataagcatagctaattctcctttattatagttatattgacggtcgaaattagtctatagcgatcatcaacatacattacctttattctatctcttttgatcaaaatattgtgttagtgactatttctataatattgtctggaaagcttaaaaaaacctaataaatgatattacagccgatgggacatatttagggtttgctttacttaattttcaactcacagccgatctggggaaaccaacataggctagatctactattgatacatcatcggcttatcggccaatcatctatcggttatttaactctgttttcttgatttccttgttggttgtaggataaaaccagctggcatgcccttgacccatgaggcaagccttggacctgaacatgagttaaccagatcgcccaagccgccttgttttccgtcaacaaggttttaacgaggaaacagatgcatcacaatattcaaagtgccatgcactcttttctcccaccttcttttccactgggttttcaggtggagtttttgacgaggcatgtgcataattcaaattcgtccaaggggggagtgttatgaaaactattttgttctggacaaattaagatattagtgaaaagcttactgcagaaggaggcatacattggaagccagcttccaagagaagccaacttatgacgtaagctggcttatgagagaaggcaacttacgacgtaaacggcgtaaaccaagtcagcttgtaggagaagccagcttagagtgtaagccatcaacttcctccgccaataaataggaccctgaaggcactacttggaaaagcattatcgcaagcggccgaaaacggtcttcacaggcggggcggccgtccgcctgtaagccaatgactgtgaagatcgccgatcttcgcaagcggtgcggccgtccgcctgtgaagataatttttgcgggcggacgttggctagtccggtccgcctgctaaaataggaatcggccgcctgcaaaaaaaaaaattccgcctgcgaagtttggtaggaaatattggaatttaataataatttgctcgtaaattacttttaaattatttaatagaaattcttgccggtagattattatgtacatatattggaagattatcaaacatttggtactgataaatgtacatatattacataactcaaaagtgttgccaaaaatattacaatatttttttacattgtcacttcaaatacgccatctaattaatacattatggcatagcactgttccactcccaaagatccttgaattcgtcacttgtggctagggcaccctctgggtcgatgaaatctcctttcacatggtagcactcatggtggatgaaatcgcacagatcacgctgaacatttctgatgcctgtatcttcaacgcttgttcgacgttctaatcttggcatctgcatgcattgaagataaccaatatattagtatcataaatatgtgaagctgtctagcacatagtatagatacttacatcctttgcgttagtcctgtacctcccattaactctaaggaattcgcaagcgtaatacccacaaaggaccgttccttgcggttgcttgtgacacttcaggacatatcataaaaaaatagttaaaatttgtaattagtgaaacaattggtatacattaagtgagtggagtattaccggccaataggtacgtactagtagcttctcccttgttcggtctgttctccacccttgaacttgtagtactggtacgcactgtacggatgtcgtaccgtttcacattaaggaggatatttacttataatacattcatataaaaatgcaagagtcataatcacttactactgtaagattattagaaattctttgtatgactgttgtttttaatcgggagggtccaagactaccacggttcagtctttagggtggatgagtaaacagatataatgatcgctaaaataagacatatgcgtagaagataaatgtacgggacgtacttaaaattataagctaccatgacgactctcttattttgaaagtgcaagaaggctcgtccaatgtactgtgcgatagtaatcaacttctccttgtgcaagcccttcttgtattcacctatctcttttgcagtcttgcccttcagctggtcagaccctggtgctagcctcacggtatgttgtgtttggcagatccgagttggatctaagaagccgataggtttcttttttcttcttagtatccatgtattgcatcctacagaagaagtttgttagtaacaatcacatggatttgtattgtacatatttttcatataattaattaaaactcatacttacatgcaccaaacaccgacatagttgacgtccatcttatcccgacgatatatggcatggagatctgagaaatctagccatacgtaaccttgttcgccgaaacaatatgccggtgatcgagctgttatattgcccaagcctttcttactggcctccatgtagaaggtatgttaccttctcatctcccatgg

SEQ ID NO: 15521 - DNA, 4420 bp, Oryza sativa
tacagctagtgagctcgcagttgctcgggttcgtcttcgagcagcaccggcactgcaggcacaacggcgccgccaacgtccctactacgccgccgccaccgatggccaccaccaccggcttcgccggcttcgtcggcaccatgtcgtccgccacctgggcatccagcgcccatgctagttgattgatacacgcacacacaccgtggtaaattaaatgtgtaatccgtcaagaattacattacaagttcagagatgaatccagatcgagcttagaatatataccttgggattgcacggcgacgacgatgaggaggaggacgggggacgaagctcgagagaggggaggtcatgctcctgcagtagttcgccattgctgattcgatggatattacgctgttgaatgatgtaaatttggaaatgggaatggttgaggagaccgagtggcgagtgacgacgagatatactcgtttatataagcgaggaggcgtttgcatgccaaggcaagaattcatttcctgctaacgttgatatgcataaatttagaggggcgtttaatagattaattctatcctaatttgagcaaaacgctacttcatcgaattcatgaagctctgcgaaatgtatcgattggagctcattgtagatagacgattttcaaatggaccatcaaagctctgctaaatgtatagattccgtgcctaagtgcttatctcgaacagtttccataccagctttcttcttgttctgatcacttctctctttggagatatgcaattagttccttccatattgcaaaaccttatccatttctttagaggaagaaacttactttcttgacgattcaaaacgagctagatggaggtgggggctaatcgaagcccttaattacaacttgggcctaagttgtcaaacatagggacatattgaagggaaaagaatccattttgtttcccccaaccataggcccggcttgttcacatctcttacccgcaaaaccagatagaaagcctcgctcgcctatcaatactggattgttttgtcttatcgagcagtttgcatgtatgtttcgtcctacaaagtgcccacatgcatggcacattgacttgatttttgaccgatgtgacgactacatggcagttctaaggaaaaagtaaaaaatatatagctagacccatgtaaggcccatatgtcagtgaccaccatctgtctcccattcccccctctcctattaattactggactaatgcggtggtgaattgaggaagggaggaggttgctcgtccaagggttgtgtcacatccctttttcaaatttgcctaattttgaaaattcacattcatatttattcgcttaaatttttttaatggaaacttcataaatgaaatatggtttaatttgactaaatcaatcctcctctatcttttctcctaataaatctccaaaaatctcaaagggaatcccactgattttgtcgctgttccatcttggtcaactcgagataaaccctagtttcttcgctgcctctagctatcaaatccccaccggtcacttcctccttggctaataaatagcatccccttgtccgagctcgtcccataccccagccgccttcccgcatgctcattctctctcctccaccatcggcgccgctccggccgagcagtatcattgccccggtaatcgtcagtcaatgccacctcctccttcggcactgcagcagccgtgcgaccggcctccacttcccggaagactaagaccaccgaaagttccaagtgctcctacttgccgtcgtctctagccgagctgcgccgatgatccccgccgaagccgccatcggcatctgaaggacacagggaaactcggtcaccacctcttctttctcaagtcttgttagagcactgtcattgtcgttgacccttgaagcccgtcgctggccaccgttcatcctcatcagtggttgccaaagtgttgttaagtgtcgcctcaccattccttgtccattggtgtcctcagtgtctcgctcctttgttcgccgtgtgccgctgctcctgggtctgcctttgttgatccaacatggttgccacatcagcattttatcagctaatccgtcctctgtggctgccacccaggctccacgtggcacctctctgcatcactagatcagaattgatctgaatagtcagattatttcggtcaacagtggccaatttatcttaggcatccatctctatggaccatagtggacctcctctatggactagatccatggtagacccattgcatcctctctatgacatgcgggtccctcttgtcagtgaccttagcctatcctctctatatggcatgcaataaacagtttaattgttttctatctcttcttcttcttcttcttcttcacaaacatgatacattcctcattcctcattcatcatatccaacgatcaatattcatctataacagatcgaatgggtgagattgtgtcacacccagaaattctcgaaccagaatttctaagctgaatgtgcattaaatccttgtccaggaccagccagggtacacaaacgacaattgttgacatacagacccacgtcttacaaaaatataaaagattataaatgcagcgggaaagataaaagtgagctaaaccaggaagcttgacttcagcagcgggcgactccactccacaggcaaaccttgacggcagcgacgaaaccaacctctctgagacggctccaactgagaagaacttcaactctagtgtgggggaaaagagagcaagactgagtactacccactgtactcagcaagtcataccggaagaggaggtatgatgcaggatataaccaaaggaagctaggggttcttttgcataaagcaggcatttcaaagcagtagttggaagcagtaaaacagctgtagtaattaatcaatattaaccaatcattgtccaacgctacaccacgttgcaacaggcccaaccaaccacctgaactacaccagttcattaagctaaactaggggtgagactaatcacggtgaatctggttgatcgcccataaccgcgggcacggctattcgaatagttttactctggccagaggtgtacaattgtacccacaagacacgattccacacatgtcgccatgccccgaagtatcaccatgatactgcaaagggggaaatcgtgacaagaccctccacataaccctcccctaaccatccacaccacgctaaggtttcacccccacccctcaaaaggcagtgggcggtcccctcttgcgccgcggtgaatccggcagctggacaaccgaacacctcggccgacccaattccatcacgcccattctcgccaccggtgcctaggaaagggtcgagctatacttcagatcaagcagttacccactcccgcttgtggtaagcacggtaagtctcccagggtttcccgtgaaccggtccttaactgccatgggtgcgaccagcaaaaccatgcactcacagcccgccatttagaatattttaattaactgacacccttgcggtggcaccaatctaaagctatgccaatagtcagagtctatgtaataatgtgatccccatttgtgtactagttgaactaagcatggctaagcatttcctaagccaacatctagtcattttgatacccaagttatcaatggcataaggtaaccaatatgtggctgaggaataggacccatcccacattacattgtaaaagaatgcaacatttaatagaaatgcgggatatttgtaaattgggtacaatatgatcaaaagtattgcatgacttgccttggcttcgaactgatgagaccttagcaaccgctttcgagaaacccgcggatcgacgaaacggcccaaacctatgcgacaaacaaagcacaacagccaaacatgctttaagactattgaaacaggaaacaaaacacttttaatagattctttgcatttttctgatttactggaaatgaatggcttaaacggagctcggtagaattacttaggtatttagaaaaaaaaatggggttttacctataaagaaaaaggcctaattaattattcgccataatattcacgggtgacgtcatacaagggcgcgcacaaggcggggccacaggttaacggtttaaagggaaaagaaagggcccccgcttattggccccaggcgagtgttaaggaggccggtctaccgggacgggacacccgttgggtccacccgtcacaggaacccagaccgaattggtcgggagcccctggacgaccgcgggcgttagagcgctctaattcttttataattggcggcgccctgttaaatgggttacccccatgctctcatcagaatatatggcggaaacaacgatcaggtcataaagcgtgttctcaaagaatcatcttgtggag

SEQ ID NO: 15522 - DNA, 2676 bp, Oryza sativa
ttgttttccgtgagacgtcgccgtgcacacagtccatcgcgaaccctagccgatgacgcagtaattcccttttccttttcaaaaataattcattattgcgtcataattcaattaaaatccatacaagtgttttaatccgatttaatcttttaaaattcataactaattcatcttagctcggatttagttggttcaagtctctaaatttttctaaaattgagatctacatgttagaaatatccacatgtactgttcatgcttgtttatgtgctgttttggtgattttactcttttctgtttagattccgacgtttccggagagtccgttttcgcaggagaagaatttgaagagtttcaaggccagcaaggcaagtcacacagatcccaaataaccctttgagcatgttgatcccgtttaaagctattgtttctattcaactattgcatttattttcgaatgtcattgggtggaattaacctattgtttgttatagcccttttgttcttgattactttattccttgataccttgggttattataacttgactagttgggctttatatattggttcagctagatattagatatgattgtttagccatgcttagaaacattagcacactattgggataacttataactcactattcctcaagattggattaatgatagttcacgatggtcaatcgtgttggttgatttaatacatgcaacataaacttgataaatgttgggttgtgagcacatggttttgagagtcgtgctcatgacaattaagagcaggtcacagagtttaggttgtgaaacataaaccgtgccaaccacaagccagcgtgggcacaggctttaccttttgtatagcatggttcattgcgcagcaccagactgagaagtgccggagataagcccacgggggtcgttgaggagtctataccttgtttataaaggggtgattatgatccaggaacggtgcactgctttgaattgtgttgtgcgaggggaactgtcacagctcctttccaaggtaccgtggtggtattgaggcacatggtgacatgtcgtggggctgtgtcttgtgggtacagtggtacacctctggccagagtaaaactattcgaatagccgtgcccgcggttaagggcgggtcgaacaatgtctttcgtgattagtctcacacttctcatcataataaaagatgctataactggtaataatttgattagctcctggtttggaatggtatattcctggtttgaagatagaactgtgcagccgggatggttgttcagaatggttgggcctatgcaacagggtatgttgtatagcattggattaatattgtttaattattacttaactgttttattaaattctgaaatgtttattaaatgctgtttatgcaaatgaaaccctcctatgccatcctttgttatcctgtgcacttgcatatttgctgcgtggcttgctgagtatgtcatatactcaccttgcaatcattcatcagaggaggagttctacagtgatgctgatggtgtggaggattaggtgtagccctagtcaagctgcctgtggagtggagtcgtctgcgtcgtttatcttattttttccgctgcttagatctttattgattgagaggaactatctacctctgtaatgacattttattcgcttattaattagagtgataattgtactctattatcaatttgttattgtgtgcctcggctgattcctggacgagggttcacacacatgtaagcgtttggaattttggatagaaattccgggcgtgacaaaacttatccaagagaaaaagagtacaatctatccaaattattgctttgatttttgtaattggttttgggtacttgattattcagatcaagcttttgttaatagacatgcaaaatatccccctaaattttgcatctcttttaagtgtgaaccatcaaaactcgttgcgtgtatcatttttttcagacatagtgcgagtgatgttccaatggtcaaatcttgcatgtctatgacttgtagagtttgtatagtctatcagtgctgatgcgacacacatatcattatcttcttaataatgattttggggtttggacaaagttagaaccatgttacttgctagaaatggcgaactatgtccatggaacttatgtattttcatattctaacatagtatggttcactcttcacatggtgtaggcttacaggcctaagcaacataagtttctcccaattttattttaaactcggtccaaagagtgagcctttattttttatatgaggatattcggaacaacatttggtttggggctttaaatacttgtatgcgaatggtcaaacccaaaatattttatgcattattattaacttaggtcaactgcgggtgattttaaccatagcaatgccaagtagttctttggttaaaaggatatgtccataataggtttataccaattccgggaacatgctttttttattggcatggccaatagtggacctctcaattgttggaaaaagtttgtcaaaaaaccaatgggtttttaaaccgattttttggtgtactttaaagaaaaattgttgtgagttacgctttttttgccacctccaaaattggataaatacgctcatgtgcaaccaggttgggttgtgcacacaacaattg

SEQ ID NO: 15523 - DNA, 2851 bp, Oryza sativa
  unsure (1)..(2851): unsure at all n locations
gagagccnnttgtatganctccgttagaaccattcttttactaacttattacattttctctaaacagttcaatttagaccctattgacattttctgttagttgctttattttataacagttcaaaatataggcattatggatatttaaatcattggtttaactataaatacaacaatatttatattagaaatcaaatgtatagcttaaaattcatgtatgcttgaatatttttgattatttctcgctataaaaacaggaagggtagatggagagctcaagcgaagtagggaggtttcggtagtgccatgttgtgcatatgtgtgggggagggcgaagtgcaggggacatgagcggtttttttcttttttttctaaatgatttaagtgaaactgatgatccagtttttctcacaacttttgttattcattttttctaatttttaatatgtaacacatggtggcttaagatttttctaaaaatatatctattggctaaaaataaggatatacctatttaagtagaacttgatggatagatggttttcttccaatctgtaaggttttatttttatttaatgcataactcgtaacgccttcagtgcacttcagaggatatacaatgatttccattgatgtaatacttattttaattttattattaggttctctttcctttttgctatttggttacaattcgaaggatcagtgtctacattcaaatgatgtatttttaattttatagagtggaatgtgggtaacatgggtcttaaaatatttatttaattataaataaaacacaattcagataaagtaaaaattggatttaacttaagaactataatcatttagctttctaattattggactgtttttttacttagttaaaaattaggagatgaaggaattaaatgagataggagaggaagagagagttgaagagaagagattacgccgcatataattataatatttctttttatgggttatattgttttagttggtattacttttttagctaaaaattgataaatgctttattgtatgattaaaatctatctttttttacttgtcttttcctatggtatattcgcagtagatattaaaaatataaacactatattctaataacgttattttgacttattgtaatgttagaatggacgagtaattttttaaaaacattactcagagttaggttcattttgcttttatccatatagatataatttaattattctgacatcatatacgatgataaaatctatatcactatttttctataattttgtattttttcgaatgatatacaaaaataaaatattgttgcccaaattgacagatttcttctcaaagatgaattaccgtggatatgggtctttaaatgtaaaatagtctgattaaatattagttgtgtgatacttgtcttttcctatagtatattcgcagtaggtattaaaaatataaacactacaatctaataacattattttgacttattgtaatgttagaatggaggagtattttttaaaaacattagtcagagataggctcttttgcttttatccatatagatataatttaattattctataattttgtatttgttcgaatggcatacaaaattaaaaaattgttgcccaaattgacatgtttcctctcaaagatgaattaccatggacatgggtctttaaatgtaaaataatctgatcaagtattagttgtgtgaattagatgttaatgttgcttacttttagcataagttttgcttttaaactcacagaatattcattttacttttatcattatggacatagtttaattattatgaagttatatacgatgataaaatctatattattattatttcatacttttcacaattgcttgaatggcacgtaaaagtcacaaaatataaaccaaaatttcatttcttttcaaaagctaaattgtgaaatatgatcttcaactgtaaattgagttataaataatttaaagatttaacgtgtaggatcgaatcacaataactaagccaaccagaggggggtgaatggttggtatacccaaaaccgaaaaattttagccgaaataaaagttgccctcgaaattgacggaagtcagtctgaccaagattgatctgccagtctgaccgagtggatgttgccagcctgaccggtatagattacccggtctgaccgccgatgtcgcctgctgcgcctgtcgccgccgctggtctgaccgccgccttgtcgccggtccaaccgccggtgagtcatcggttagaccgccgaaacccgatgaaacacaaatcgaagaactcttaaagtagatgacgactttattacttctctatgtgtttacaaagtgccccaacagcactccttataaaaatctcgactaaactcgaaaccctaactcaaaactcaactcaattgctctcgaaagcgataccgctaagcctcacgctccccctctattttatacatgaggtaggcagcctaaagccacgaaccaaactcatactaagagtcctaaacaccttaggaaaccctctagtacaagaaagaaactttatataaccaatcgtaccaaatttggactccttccaaattcgactccgcatcccatacgtacacaatacctccatcgtataccatatagaatctccatcaaccacgtgcatcaactctagcctaagtatcccgcatgatctttgaccaccatggacgtcgtcttatccccaagccgacttccggtccatcaccgcaaatattctcccgaggtatcaagtcacctacacatgaaataaacaaagaaaccatattccgagaccaagttatctcaaacttgactc

SEQ ID NO: 15524 - DNA, 1290 bp, Oryza sativa
  unsure (1)..(1290): unsure at all n locations
tgagattnntttttggcgctctcgtgatggatattttactatcgaaacagcaaaaaattcaaaatccagcggtcgccagctaacttcaaacactaaaacatagtaactgaacaatagctgggctggcgatagctagaagcctagaaccagaggaagaatatgcacgaatcactgaggtcgctgagctgaattccaactcgaaaaccactaaatcagagcgcagaaaaagcgggttcgcccatcgccgaccaccactcctcctcgccacaaatttacccccaaaatcacaaaaactcgcagcaacccaaacctcgagcagctagggctagaattcaaactcccgagagcatccggatcagcggggcgcctcacctgcctggagcccctcgaaatctccgtccacgctccccattcctcgccgcccgggccggcgcacggcggcctcggctcagatcgaggccgccgccggcgagattgggcggattcgagctcgggcggcgccgcctcggggcaatgcgggggctggttttgttgctccgccacgcgtctcgtcgccgtcgtgcgcggtgcgccgccccccggccgtgctttgtgttgtcctctgtgtttcgcttttggttttggtttgggttggtttgtcctctcgcgcaggtcgcgggtttggttgtgntcgcgtgagtttttttttttaatttcgttttcaaaattgaaacttcgcttgcgtgaagtttgctctggtcgncgttaccggcaattcgaattngtttaagaaatagtcgnttttttccattaacgtcacaactactcacatgtatatacactatacactatgataaatccctacacagtacacacgttaagactatatatgacacaagactaaaaaagtaccacgttaaaagagagcacgataagtttgttagtacactaaataagtattgaatgatgttgatgaaagtgaagtgggttgaaagttatggtaaagtgagttgaaaagtgaataaagacaatttattgtactttgcccagataattgggtaacccacaatatnttggtcagatcataacgggggtcaagtgttgataaaaataccttggtgcttagatgaaggaaataaaaaattgttgttttcctttgccttttaacagccgacccccccacaactcttttttttnggccgggatgcagcgatgcgccgnaatttagggggggggaaaaacatgttaagaatcggggcggttttttaacctcgcccggaggaatttctccaacttctttccgccgggttt

SEQ ID NO: 15525 - DNA, 3474 bp, Oryza sativa
  unsure (1)..(3474): unsure at all n locations
gatgttnnttatgagcgctgtcgtgtgatggatttaacttaaaaatgtatatttagttctataggcctaaactcgtgataaatgttacattgttttgcatgatcgacaagtacaaaaccggacatctcaatcgggctatccgtgacggaggcgagcggcctgctgaacactaggtgagcaataggacactaggtacatgaaggagcacaatgactcaattaaagtggcacgtgagaagatgaacatactgaaagattttaccagcgagtggttgaatccaaattaacaatgtctattcaaagcacctattggagaggatattcaacttcgacaaggacgatggaattcatgtacaaccaagaggacaacttcacaaattgccgcaatctcaaggataccatccattcgttgctgatagagtcattcatgatccacatttagtattggcaattaacaattagttgtatgtccaattgatagtataatgtgatattagctcatccttatgaacccatggggtattttagttagtgtgtatatagtaattttggttgggtggatgagcctggatgggagatggccgcctgattttctgtggtgtttggttggatggcatggtgtatggggcggcccagaatagagaatattttcgcaatatgctggatgagtgcatccgaccgatttggctggatgaagccatccagttttggtctgggtgatgtgtcctgttctgattggctgtggttggtttgattttcggttaagcaagctccaaatgattttttgtcctaaaccgtttatctaatttatgatttgattacaccattatatttgttacaattaaatctttaaaataatatctcggatgattatattttgataaaaaaataatatataacaaatgggtctcactaacttttggctttttccatccatgctacatcctccaatcaaacaagaaattggatcgccatatccatataaaccaaataaaaaattggatcgctatatttaacaaaatatggatgccatatcccatccatgcatgaccgtgaaccaaacccaccctaagtgtcatatggggtactcttgaatataatctccattttggatatcaactactgtgtacactttagtaattaatcattgtcccttgttgatcacattttttgatgtccttttttctcatataaatgaagagtaaatattctgacctatgtatacatccagtatatatccacccattatttacaacaaaggtgttgaatgtggatagaattgattgagtacatcctctccatcttcctttggtataaatggatctttctccacgtctagaaatcgaaccaccataggggttttggaaggatatgacttgtccatattaaatttctccaaaattttctgggtatatgcactttggtgcacaaggattccagaaggtaaatgctcaagttgtagacctaagaaaaatttggtttgacccaaatccttcatctcaaattccgtctttaaatgatgacgtgcttcattaatatcttgtgtattgccaatgatgttgagatcatcgacatataccgagataatacaaaatcttgtgggggactttttgataaagacgcacgggcaatcctcatttttagtgtatccctttagtgaaaggaattcacttaatcggttgtaccacatcctgcccgattgttttaagccataaagtgacttctacaacttaacacaatacatgttacgatttaccttctgattcgggatgtcgattccatcaggaaccttcatataaatatcagaatcaagcgacccataaagatatgctgtcactacgtccatcaactgcataaatagacgattttgtactgccaatgatattaaatatcggaaagttataccacttgtactgccaatgatattaaatatcggagacgattttgtactgccaatgctacaagccttgctttatatctcaccacctcgttgttttcgttccgtttccggacgaaaacccatttgtatcccacaggaaagataccacaaggagtaggcattacagccgagaatacatctcttttgtaaagcgaggctaattctacgtcaattgcgtcgttccatttgttccagtgagagcccttttggcactcttttatagacctaggttctggatcaacttggaggcactcagcaatttgttcagaaaaattagtatcgacaattgtagctcttctattaaaagattctccagttttagagtagttgatggcaatttcatcaacccttatagactcatcgtgatctcctgaaacaatgtgtctatggtcttccgaattcctagtctcaacattgtgcaccaccgagctaggttgtagactatcacgatctgcttgatatatagtatcaatttggtgtgtaccaactaaaggttggtttgcatttaccgtctttctttgcttattaacaattgtttctcgctgagtggccatacttcttcctctttttttagtgagtggaagttgagtggttttatttggtacctccactctttctggcgcattctgagcaggaattaaagatttagtcacacctttataattggtaaatgcatctggcagattattcgcaagtctttgcaaatgtataattttctgaacttgaagatcagtttcagtagtacgtgagtttgtggctggaataccatgggcatcccaattaatttcgtggcattctttctggtacttgaagtctccccctaatgccgggaaatgttcctcatcaaagatagagtcagcgaaccgggcagtaaatagatcacctgttaagggttctaaatactttatgatcaacggagatttgaatcccacatagatccccactttcctgtgtgggcccatagcagtacgctgtggtggtgagatcggtatgtatacaacacaaccgaacttacgcaaatgggaaatacttggaggattcccacgtactaagtgcattggggaagtttcatgatatgcagttggtcgtagttggacaaggtcagcagcgtgcagaactgcatgaccccaacacaatgaaggtaatttgcaattcatcaataatggtcgagcaataagcttaattcttttgatcaacgattcagccaaaccattttgtgtgtggacatatggaacagagtgctgaacctgaattcccaatgccatacaataatcatcgaaagcatgggatgtatattcggcagcattgtccatacagattgattgaatcctatgttcagggtaatttgccttcaaccttataatttgagacattaatttggcaaaggcatggttttgtgtcgatagaagacacacatgagaccatctagtagatgcgtcaatcaaaaaccataaagtacctgaacggtccagattttggcacaatagggccacagatatctccttgaatgcgttcaaggaatttaagtggttctgc

SEQ ID NO: 15526 - DNA, 2394 bp, Oryza sativa
  unsure (1)..(2394): unsure at all n locations
tagtggnnttgttggcgctgtcgtgtgatggataatatcgcatatcgaacggatccaagaacacggagacaatggcgacctagatccccaaatcaatcgccatcaaatcagatccaatccgagaacgggtgggtacaggagcgaatacctcggcggcgaggtactcgaggacggcggcgaggtagacgggagcgccggcgccgacgcgctcggcgtacttgccggccttgaggaacctggcgatcctcccgacggggaactgcagcccggccttggagctcctcgacgtcgccttcttcgcggccccggcgccgatcgccttcccgcgtcccgccatcctataccccacccaccgacgagagaagaaaccggctgcgcgagcgagatcgacgcggcggcggaggcggaggaagcgcgcggcgaggcgaggggaggcggcggatgagacgatgttagtggtcgggggcgagagagagatatatatatagggttggttttgggtggtgggtgcgggtggctagccaatgggaggcgatcacgcggatcgtggacgtgggccgtcggatgcgatgggacggacggcggaggatgcgcgtcggggatttcggtggatccggaagcggcgggaagacgggcggagttttcggtttgggagggagggagggaggtgcgcgcgaagacggagacggcggatcggtgacgtggctctctggttttcgtgtcggacccactggtcgatctctcgtcgtggttcgagttttgtatgctgtggcaaattggcaaatagggagacagggagggacgtgaaggagagtatgcaacggcgcaaacgcgtagtagaaagcaatgagggagtagctattttcggcgtagatttattttttttcacgtaccgtttgtcttaaataagtacaactattatccatttaatttaataatttcatctatttttttcttttttcaacatattatataaccccatgctacagagtagtccaacaaggttgtataattcagtgtataaagtggagatacaaagtctagaggtgagactctcttgtcttattcaatccattcaccaagtgtacaaatgactggcccctcctctttttatataatgcattcgcaaatatgcaaggttcggtgatgggtccaattagtgtatttagactaggccttcatggactcccccttgacactcaccgtgtgatgtctatgccctattaaagcttcaaaaaaacccagtcggataaattggagaaatagtacatagcgtacgcatatactccctccgtactcgtaaaggaagtcgtttagtacaatgtttaagtcaaaccttaagaatataaatcatgaataactctcaagttattgagtttgaaaatgtaaaaattatatcgatagatttatcttgaaaaataccttcataaaagtatacatatatcacttttcaataaatatttttatagaaacaagaagtcaaagttgtgttctatacaccatgtcgctgtctaaaacgatttcctttacgagtacgaagggagtatgtcgcacgaattgcctcattaaaacccttaataagaaactagaggaaaacttgtcacaccctaaaaatcctaaatatataaattgttgtttaattggaattattagaatttattttaaaaagcctagaagagaagatctagttttaattaataaattccaatataaaatgaggccagataaaatttcattaaatactttgcttaattctataattcctagatttttctgggatttatttgagctaaggaagtatttttaataaatggaattgcatttcatgaataatttaaattgaaaaaggtttttaaaagtcttttggctttgggccgaaagtcggcccaaaacctctctctctccctcggcccagtcggcccaatccggcagcagncgnccgcgcgcgcgtncgnccgctgacaggtggggcccacctgtcagtcttcggcttcctcgcgccgntgncggcgnccgagccctatcgtcgcgccggcgtcatcttcttccaaattcggccacgcctttccggttccggtgaaatccatagaggggaaatgaatcttcggatctctacctttccctttttggaatcgtcggcttaaattggttggaaattcgtggaattcatcttcaatcggattcgtntctcttcccgaaccctagaaccttctttgncggnggcgggcaaccggggcctttcaacgctggcttctagccccttttaaaaggacccccaagcccgtggttaccggcgcaacccttggctttggctttttgtggccggttgaagcctaacatcgggtaaccttaaggcccccgttgccgcccaaatttccaccctggcgccgccgt

SEQ ID NO: 15527 - DNA, 3545 bp, Oryza sativa
  unsure (1)..(3545): unsure at all n locations
gaacccgattttttaataggagaataggggtaggagcggcgcgagacacacatctttttgttttttttccccnnnntttttnttttaaaaaaagaggtgtggtgttgttttatatatatagggggaaccaaaannnaagacgccaggggnnnnaacacccacaccccaaaaaatataataaaagtatgtgaagaaacaacccccttttagcccaaaatttttctttacaaataaattaggccacccccaccagctctcaaaaatagactctcgaggaaaaaaaaaacaagatgttttccacccccaaagagaggcgcctcaaccggcgatgaccgtaaaattcaccatacgttgcccttaataccttgacaaggagaggccacacatggtgggtcaacaggcccaaaaactttgagttcctgcacacacgatnaaaagcgttgtaactctgttccccacgtagttccgtgaaagataccttgccttcgtggttcacatgaaagccatgagaatcatgtagtcttctcaactcatatctcaatgcccaacttctgacaacgagtatggcatcaattcacagtggcacttcatcccacaagcatcttagagacggcntttccatcnatatgacntttgagatagagaggcttcatatgacggtntgattcatcgggcttctcaaaaactgcatctttaggacctagtgaaaagtgagcaccttcggcttcatccatagcaaaaattccataggcaacatacataccatgttgatatccatgtcttctttaggagatgactcatctttagcaaccaattgttcttccttcttctctacaacaaccggtttttccttctctatggttttacgcctccataccggtggtggtcgcaactcattgaaccttttatccctttgctcttcagcctttttctctcttatttcttgggcccgaagacgttgcaaccttctcctttgagtagccgttaaatccttaggtatccacctaggtgtcacgtcccaaaacgaccctaaaatatatcctttaaattatgcctagaataattaaaatccgtgcgaaagcctccaaaaattaaaatgtgcaaagtaaaagtcaaataaggcttagaggatttttgtatatttcctaaaagcctaaaatgtgtaaataaattttagtggaattttcagagaacaaataataattgttaagaaataaacaaagttaaaaaaggtttcataaaaagtctccttccctctcttgggccgaattcggcccatctccctcccccctctctctatcctctcccccgcggcccactcagcctctccccgcgcgcgcgccgctgacgggcgggcccgcctgccaccctcgctaacaggtggggcccacccatcatccccgtcctcccgccgctcttgccgccccgctcgcaccaagcgccgccgccgccgccgaatccgccgcatcccgctgtccccgcgtgcaattaagtggggggaattactccccgtgatcccctccccctttcccccccatttttccctctctttctcgcattcaaacggccggatttgctcccgcaaatctcgccggcgccattgatggcggccggacctcccggccgggttccttcctctcctggccgccctctcccccttccaaccctatttaaaccctctccgcacctccttcgcccgtttccaccctttgccgcgccgtctccccgccggaaacgagctcgcgccgtcgccctctctctcctccgtcgccgacgacctccggccggccctctccgcttgccgggactgtctcccgcctcggcgtcgccttctccggcttcgccgcaccgccgtcgaccccgtccaccccctcaccgagctcgccgaccgctggaacgccgccgaccccatcgacccgagccacgccgccgccttcctccgctccggccgcctttttcgtcgtcgccgtcgacctagggtgagccgtggaccgccgcctcttttcccccttcccttcccctctctcggccgccgcttcgccgtgcctatggccgccgccggcgaccatagggtcgcgggcgccgcctcccgccggctgcaccatcgtggccacctacgggcgcgccgtgtggccgccgcatggggcccagccgtcagccggtcgcgtcctcgtgtgtggctgacgcgtggggcccacggcgccggccggtgcgagccgggtgcgcccggtccaccgtggactgtgaggctgccgcgtgggcgccacccccccgtggacccggtccgcgcgccccctcccctcggctgacgcaataaatcttttttaaattaaaatttaaataaagaaattcgcaaatattcacttaaagagcatatatacttcaaatggccataacttggtcatttgaactcggaattggaccgttcaagtctctaatttttccttaagaagtcaagaaccatttttgtgctttgttcctgcttgttatatggagtttattagagtaaaagcctttttcctttccgttggtcgtgtagacgctgcagcttcggaagatccgctctacgtggaggttgaagccgacatttgggaaagcgagcaaggcaagtcacatcatccttgaacatattgaatcccagtttataaaattattttgatttaagttaatgcattatcgctttatttaaattcccgcgttatcactgttttatttagccatgcctatttacctttgttatgaccttattattattgttattgttattattagcttattcaccctaggataaacaaaaccccaactagtgggtactctattcatggttccactagtatgaacttaggtagatgcttcgctgattaattaggcaacattaggtggttttataaccttagactttgggaattctcatatcacttggacattgtggaatggttggactattgtggaattggattcacacctccccctctattcaaaaccctcaaaatagttttaggctgggctcggggtgcatggttttgatagtagcacctcgggcacattaggaccggtctttcggccttttgttgcaaagcaataccctactttcacaagtctaagtggttaagcttaatttgtgactcagcttgttataaacaaaaggtcccggttggagaatgacaaatccggggtccatggccattttaggccattgaagcttaccaacttgggtttggattccagaatcattggccagggcgtggtccggggtagggctcaaacggctgcctttcccagggtcccgccaaagggggttggccggccctttggtttgggaggaggggtgggaacattgattgtttccccctttcccgggggattggcactggttttttaagaaaaaatgtttgggggtaatccacttgtacaggttaaccttttcaaagccgccctttttggcgcccccaaggcccaaagggttgaatttaacaccggggaaaaaaatataagggggccggttgttttaaaaaagacccccccggtttatgggtataataaag

SEQ ID NO: 15528 - DNA, 1274 bp, Oryza sativa
  unsure (1)..(1274): unsure at all n locations
taaaatctatgcaaactctaatcttaccactgccttttttttccaccgggactatactagaaacccactccgcataacgacatggcctaataaaccccgctttcaacaactgatcaatctcctctttgactcagtcatatagcaaaggattaaaacgacgaggtggttgcttataaggcctaaaacccggtttaattggaagccgatgctcaacatgctcacggctaagacccggcatctcatggtactcccatgcaaagcaatcaacatactctttaagtagctcgattatcttaaccttataatcgactctcatatttttgtttacaaaagtcagccttggtttggttccatcacctatgtctacttcctccaatggatcggccgatataaacccttgtccaagcttctccacttcatcaaaatcttcaatagtttcaccaatatcgttctttgtagaccgatattcttgcaccctcttttgtaaccactctaaattagtctctttactcattatacaaatttatatggcttagccatgctacactagccagctttacagatatatgtacaaatttgccattggagatactaataaaatcatagcattgaatatttcccatgacaccactcaaaagtagcatcggccattgcaacccttggcgatggattcggtttaacaattttaacattaatggttgtcccattgaataaacaatgatgccagggtgaaagcgcacaacaattggcattgattccaacacggacccaaaattacaatggtggtaccctgcacaatcgaccatgaagaaaaggcggtgggtacggcttggttcccaaccgaaagctccgcttaaaaagaacacctctgtgcttcggtgggttaacattggaggccattggattatggtaaggttntttaaacaatataatcattgccaaactttttggaaacgaggtttgctataaaatacaatggacccttctttccaaggatctcaagaacacgtttcattaaaagaaccttggaaagaagggtttaattacggttgaataattggctttcaaaaacggtctttgggactctgaaaaggggaacctggttttccatggaaaattcttagccaaacacccagtgttatccaattttttgaaagactaattttgaccaaatggtttcttttttctaaaacgcgtttttttttggtttaccccccaccggggggggaatattaactttatttttgttttacatttttttattttgggccaaa

SEQ ID NO: 15529 - DNA, 1812 bp, Oryza sativa
  unsure (1)..(1812): unsure at all n locations
tttcagagaananatgaaaccttnaaaanccccnanaattnnananncctcanacaccaaaaaaaaacccccccaaaggatgtcncttttttcaaccctaacagggagaattggcaagcgggcatatgctttgatagaatattatttggcttatgaaccattaaaatctatgaaaggccaaattgtatgtgattttatagtggaccatcatgtagatattgcttatgaggaagagatttgcctagttgaagttataccttggaggatttattttgatggttcttcttgcaaagaaggtcaaggcataggggtagttttgcctagtacgtgaaagcttttggtgattcggaattggtggtgcaacaagtcgccggagtttataaatgcttggacagatcactaaataagtacctcgattcatgtttggatattattgccaattttgataattttgctattagacatattgctaggcatgataattctagagcaaatgacttggcacaacaagcatctggctataatgtgaagaaatgattatttctgatattagaagagcaggtgcttgattttaaatctttgtgtgaaattggcaaaactagagaccaggggtggtctgaccggccacatgccgtcggtctgaccggcgaccccgagtggtctgaccggttcaatcaatttagaggccgaattaattataaattcgaacatttgtgcctaggaaacagaggaagattggaggattcatttgattcgatatttgaaagatcccacacttaaggttgatcggaaaattcggcggcaagcattcaaatacacattgcttgatgaagatttatatcgccgaaatatagatggtgtcttgttgaagtgcttagatgaagatcaatctaaagtggctatgggagaggtacatgaaggaatttgtagagctcatcaatcggcccacaagatgaattggttgcttaggagagctggattttattggccaaggatgattgatgattgcttcaaatattatagaggatgttaagcttgtcaacagttcagcaatgttcaattggcgcccgccgccatgttgaatcctataatcaaaccatggtcgttccaaggttgggctttggatttcattggtcaaatttatcattcgtcattaaaggggcataggttcgtgctagttgctacagattacttcaccaagtgggctgaagctgtgccgttgaagaatacgactcatacggaggtatttgactttattttgaagcatgttatccatagattcggtattccacaaacattaactacggatcaaggtgcttcttttatatctaaggaagtgaagaattttgccgaatcctatggtattaaattgttgagttcttctccttactacgcttaggctaatggacaagccgagtcgagtaataagacattgttgaaactagtgaaaaagaagattgaggaacacccaaagaggtggcatgaagtgctttccgaaccattttgggcgcataggatatctaaatatggtgccactaaagtcactccttttgagttggtttatggtcaagaagccattttaccggttaaggtaaatcttggttctcttcgttatatcaagcaagatgatttgtgaagtgaagattataagacgttgatgggagacaaccttgatgaagtcatcgacaagcgcttgaaggctttggaagagatagagaaagagaagagggtggccaaggcgtacaacaagagggtgaaagcaaagttgttccaagttggagacttggttggaagacatttgcctaagagtct

SEQ ID NO: 15530 - DNA, 1869 bp, Oryza sativa
ttatagcatcttttattatggtgagaagtgtgaaactaatcacgaaagacattgttagacccgcccataaccgcgggcacggctattcgaatagttttactctggccagaggtgtaccactgtacccacaagacacagccccacgacatgtcaccatgtgcctcaataccaccacggtaccttggaaaggagctgtgacagtacccctcgcacaacacaattcaaagcagtgcaccgttcctggatcataatcacccctttataaacaaggcatagactccccaacgacccccgtgggcttatctccgccacttctcagtctggtgctccgcaatgaaccatgctatacaaaaggtaaagccgttgcccacgctggcttgtggttggcacggttaatgtttcacaaccaaaactcgtgaaccggttcttaattgtcatgagcacgactctcaaaaccatgtgctcacaacccaccattatcaagttttagttggcaagtaattaattaaccaatcacgattgaccatcgtgaactatcattaagccatcattaagtaatagtgagtcataagttatcccaatagtgtgctaatgtttctaagcatggctaagcaatcatatctaatatctagctgaaccactatatatagcccaactagtcaaattataataacccaaggtatcaaggaataaagtaatcaagaacaaaagggctataacaaacaataggttaattccacccaatgacatttgaaaataaatgcaatagttgaatagaaacaatagctttaaacgtgatcaacatgctcaaagggttgtttgggatctgtgtgacttgccttactggccttggaactcttcaaaatcctctcctgcaaactcagactctccgaaaacgtcggaacctaaacagaaaagagcaaaatcaccaaaacagaacacaaaccagcatgaacagtacatgtggatattttcaacatgtagatctcaattttagaaaaatttagagacttgaaccaactaaatccgagctaagatgaattagttatgaatttttaaagattaaatcggattaaaacacttatatggattttaattgaattatgacgcaataatgaattatttttaaaaaggaaaagggaattattgcgtcagcgagtagggttcgcggtggaccgagtgcacggcggcagctcacggaaacgaacggccgagatcgatcctatccacaacgaacggccaagatctaacggtctacgaccggtctacgacggacggcaacgatgacgtcggcaatgacgtcatcaccggcggcggctcgggcggcaagctcgccggcgaacaacggcgcgacgacgcgaacggaggacaccaactcgtagagggcaacgtggcgaacttaccggtgaccaaaacaacggcggaagatcaacggacggcgacggcgtcgaggaagaagcggcggcaaccttcggcttgacaacgacggcggtgctccggcgacctacggcgacggcgaaggggtggacgagatcggcgacggcttggtgaccacgacggcgacctcctcgagcagcgacgacgaccggagcgacggcggcgcacggctggagctgcggcggcgacggcggcgctaggctacacgatgctagggctctaccggcgacgagaggcgaaggcgagggtggcggcgggtagcgacgggcttgggggtccttttataggggctaggaggcagcgttgcaggcccacggtgaccggcgacggcgaaggaaggtctagggttcggggagagagacgaatccgattcgagatcgaatccacggatttacaaacgattttagcggacgatacaagggtccacatctg

SEQ ID NO: 15531 - DNA, 2292 bp, Oryza sativa
  unsure (1)..(2292): unsure at all n locations
gattccaccttcttcttttgcattnttggccttcagttggtcagaccctggtgctagcctcacggtatgttgtgtttggcagatccgagttggatctaagaagccgataggtttcttttttcttcttggtatccatgtattgcatcctacagaagaagtttgttagtaacaatcacatggatttgtattgtacatatttttcatataattaattaaaactcatacttacatgcaccaaacaccgacatagttgacgtccatcttatcccgacgatatatggcatggagatctgagaaatctagccatacgtaaccttgttcgccgaaacaatatgccggtgatcgagctgttatattgcccaagcctttcttactggcctccatgtagaaggtatgttaccttctcatctcccatggtccttccttcagtgcccattccggcaagagtgctttcccatgttcgtacttttctgggcaatcatcagttgcgaagtatgttggcccggctagttcagcggccttctgggggtcatcatctctgagcttggcacgttccttaccccctctaaagacagttaccatgaacttctccttgttctcatctttggtcttggagtcgtggctcctaagcactctaggcacctcagaactggtagtggccttctcagggaccgtggtctgttgcacctcggggtctttcgcaggagaagggtcttcaaatatttctggctctgtaccgtcccattccaatcctggtacttcttctatttctgtcccaactgatgccacaaatttcacctctggttcagccactttaatatccatttggacatccggcactgcaatctccatgggcacctccggcacttcaatctccgatggcacttccggcactagattttccttatgcatctaaggttcctccaccttatcagtcaccttcttcttaggaggtcttgaaggttttcccaaccctggttttggcacctcatgttttcgcgtggcgtcggtgcccaatctaaaggatatgttattcttgtgctagagaattacaagatcgatcgcatccccaagtacggatacaccatctgcagtagggaagtcaatgtcataggactcaaacccttcgtggaccacttgcgtctgcactttggcatatgcagcaggtatgaactcttcattatatgttctcccagggatagcaatggctgtagcggcctcaagagtattcccggagcgtccaatgggaacgtgcaatctgcagggtgtattctccttgaggtcatcgaaggggtaatctggctcaggttctttggtttcggggcgaggtaaaagcatgtgcttgacgcagaaatccatcatttgcctttgaaaatccgcagccccatcatctctaagtttatccttgtacgcatcacgcttcttgtgggggtcatgtttgaacccttccttccaactcatcttggacgacacacctcgaaccctacccccatgctcaggagtacccaacaccgtacttagcacatctttctccctcttaggcttgaaaaatcctttcttctgtgaactggataaattctctattttatcggcaacaccctgcagctccggatcttgaaacgatactttgccttcattcgtgatctttggagttcaagctcttacccaattccttgatctctgtgtccattcctccattggtaccggaagccccgccttcctcatttcctcctcctcttttgtccactgctccacctttggtgcgtatcccgtggagcctaagtgatgaggaaatttgtatttcttggccaactctgaatacttttggctccttcgaatttcttccggggagtttttcaacgtcagaaagtcctcccactgtttcggggttatgttggcatacgtcgaaaacggtgtacgtcccgtcttcacaaatttcttgttcaaggtggttttacaaccatgccaagacttgggcattgtttgcagagcacaattcctcactgctgcctctaatccatccggggactggaagaatttctttaactctttccataggacttccttatccctattcgatacatgatcccagtccttgaccctgatggggatcttttcccttactattatgccgcactgtgaactgaatttcgcatgtgctgtcttagaggcgagcggctctccttttggcgaaacatgggtaacacatggaacccttcatccctggtttgacgcgtctgtaggctttctttcgttgcctttgtgacagtcgctttcttcagcacgtggttg

SEQ ID NO: 15532 - DNA, 2139 bp, Oryza sativa
  unsure (1)..(2139): unsure at all n locations
atcccagtttataaaattattttgatttaagttaatgcattatcgctttatttaaattcccgcgttatcactgttttatttagccatgcctatttacctttgttatgaccttattattattgttattgttattattagcttattcaccctaggataaacaaaaccccaactagtgggtactctattcatggttccactagtatgaacttaggtagatgcttcgctgattaattaggcaacattaggtggttttataaccttagactttgggaattctcatatcacttggacattgtggaatggttggactattgtggaattggattcacacctccccctctattcaaaaccctcaaaatagttttaggctgggctcggggtgcatggttttgatagtagcacctcggccacataaggaccggtcttcgggcctctgttgcaaagcaataccgtacttccacatgtctagtgggtaaggcttagtttgtgactcagtctggttataaacaaaagtacacggatggagatggacgaagtcgggggtcgatggacatctctaggacaaatgaaggctacacgagctgcggctcggtagtcgagatgtcatggcacagggcgggtgtcctgctgctaggggctcaatcctgcctgcctgtcccggaggttccggccgtaggtggggttgggtcggtactcttgtctatggctaggatgggttggaaactatgtcatgtcttccgtccgtatgccgtggtggtatgtggcacgtggttatatgtgaggaagacatgtcttgtgggtaaagatgtacacctctgatcagagtatcacctattcgaatagccgcgtccttggttatgggcaagcctagcaatgtacctaagttagtgttttaaattcttaacacctgttgaacaactaaaatatggaatggatggcctgggttgacttgggacgagttgggaccctgggtcgggttgctagttcggtttgaatcatcgcaggccttgggttaaggcaggttcgtgtgggtccacggccttgattaataatattgtatagctctaggatcgtattaacaaaatagctttgagcaactaagtgtcttttaatgctgtttactgcaaaccctaacccccctatattataactccattgtactcctttgcatttattctgcactcgtgggtgtgtcttgttgagtacggtggttgtactcagtcttgctcaatttttcccaaacccagaagaggagttcctataagatgtaggctttggtatctagctcgtgcctgccgtcaagcgcctgtggtcgtcgccctagtcttccgctgttttttgtttgtcttcatgtgtgctggtccttcgccgcccatgtaataaattaactatttacgcttccacttgttaaactctgtattgtatcaacttttggtgtaccttgcctcctgggacaaggaataatacacgcacgtaaggaacgcccgttgggttatttctggtcatgacactagtgtaacgccccgattttagttcggaattaaaaatcaattaataatgcatttcaagaaattatataaaatttaaatcaatttaatcaagtgaaattatagaggaaattaaattttcctttaaaaatcattggccgagaatattttgtaatattctttgtgccctaatgtactctgcggattttttccgcaaattttcggagctcaagaaatagttttaatagcacaaagatcattgcatcaattaaaataaaaagaaaacaaataaaaatctccttttcctcttctttggncgnnggngcagtncanncnggcgngcgcacccttnctcttgtggtncagnncaagncgnnccttcctttttcccnggacgncacaggtgggccccactgtnnggccngnntcttnnctcannncgggcgcgngccngnaaccggncgcgngtcacgtttncgctttttcaagcacgtaacacagccccgcgtgtgcgctatttccgaaccaatttttanttttttttcggnccgcaccggccccgggcagaagagcggaataaaatttgaattcgncccctttctctccctatcagatgtgcgggaattcgccntaacggcaaaatcgggttcct

SEQ ID NO: 15533 - DNA, 526 bp, Oryza sativa
actgatgttattccgtgttatttataccaacccgactctttgtatattgcgccaatgcacggcgacttcctaactctttgagactaatgaccttctgagacactgcgtttaaaaagtagcacaatctggagatagccacctataaatgctccggatgtatggtctttattgcaattgccagaaacacagtgagcacgacatgactgtcgcgtgaattatcaccagatactgataaatctttcatggaaactagtccactgatgtttgatgagaaacctatgggcactctgacatcacggtgtgacttgcaaaatgacttctttaccgcaggagttagtgtgaaacaggccggtggaagatatactttgccattcttctctccttctttagggtgtaactcttccctaattcccatctcgactaggaccatccttgattgcagaacatctttagtcttcttcggcatgtccaacaatgttccaactatgttgtcaaacacattcttttctagatgcataacatttat

SEQ ID NO: 15534 - DNA, 3874 bp, Oryza sativa
  unsure (1)..(3874): unsure at all n locations
ctaaagttagtggagtaggaatagaataagagtcttagtcctagaagtcttcggaaggattcaggtatggttctagtagctctactctcttttgtaagacttgtacttttaatagaatattcttctttataatactttggtattgtatatgaataccaactttattatatatccaaattatattgattatgatgctagcttatctgggaaatgcaatggtgtgggtataatgatcgtgtatacgattattctatgtcatgacgatgatattatagtagtatttggtaagttaagcgtggtgtttagattgctggatattattatttggggttatataatgcgaatttgtcgaggtgggctgctaatggtgacagctcagtatgagtattcctccacgtgtatatataatcctaagttactttcctgcggagggtactcctccgtgtttagccccggttggatgattatgacgggttatcgtaagaaactcggcaatcagtgctagcttctcgaagcactaggagggcgttggaaagagggtattagctaagtaatcgtataactaggatgtgtatataatgtgtatgtatattagaagtgtaggaatagattctttctactcttgttgtgtgtcactctaccctatccattatcttaaccactgcttagactttgattattacaagtaaaatataagatattagtatagttctctctattataatctttccacgggattaaacaaatacgatactcttggaatactcttgggtgaaatgctacaatgatatatccatgcgcttgcggatgaattatgtaaccataatataccatgagtatttctacgttattgctaggaattacacttctagtaatgtcgttaacaaataccaacagtcgccttgagtggttggagacagaacagatcatagagtatcattctctcattctttgcttaactcttattccaaaatttttcaaatgattttgcaaataaaatccaagttcctcaaatgattctctcaatcactcgaagtgtatatttattcctcgccaagatattgccttgagcttgcttaggagtgagttttacttcatttcttattcatttatgtgctaatctctgcaaacaaataatactccaagtacaagtggaaatatattattctaaaataaatatgcattgcaagcatattgacggtcgaaactagtctataatgaccgtcaacaacggcatcgcaccgattagaccgacaggaacgtgtcggtcagaccggcggcagcgacaggaggcagaggcgatcgcagggcggttcggctgggagatcaacaccggttagaccagcggcataggcgcggtcagaccggcggatcaaccccggccagaccgatctacatcggattctagggtaacttttaattccattaaaagtttagattttcggctagtttagttcttgctattcgatcctacaaatgctttaagaatgtaggtttaagatgaacctcgtaacaaaaaaaaccgtattatattatatttatttatttataaataaatgcatgtgcgagatggtgatgagctaaggcaacatttttttcctattgattaggggttaggcagggcaaaaagtgtgggtggggcgtgggatttggcaagcgaaggggagaaatgcggtgggggaaggggaggcaatctgtcacgcccagaagtttccccctttttccttgctgtaaatatttgttaaataaatcgtctgaagaaattatcttaattaacctagagctaattccataattaataaatgcaattaataatcggaaatagcgtggtggaattgttccccatgctccaatgcattaacaagatttttagtggaattttcagagccttggaaataattttaaccaattaaaaatcaccaaagtgcaattttaaatcccaggaaaaatcctttcttctttttctttttcttttccttcttttttctctattgggccgtcggcccactccctcccgtgctcggcctccttcctttgggccggcccgttcccctttcccctctctccgggacgctgacaggtggggcccacctgtcaggtcgtccccttcctccagccgcccgccccacgacggcaaccgccgccgaaaccgtccacgccgccgccttctccgctccatgccgcgcccccactccacgtccccacgtcgccgccctccccgccattcctgcccgcacgcgcgcccgcaaatgggcgggattcgatttgaattccccccccccactctctctctctctctccccccacgtcgccggccaaatcggggggtttcccggccgtttccgcccctccctcgcccataaaaaccctcactcgagctctctctctcatttcccccattcaccgtactatcccacgccctctacagccgtcgcgccgcgctcgccgagctccgccgtcgccgcccatcaccggccgcgtgccgtcgacactagggccgccgtcgcgccaagccgncgncgncgctagctccgccgccgtgtgggccatcttgggcaccgcctcgcgtcaccggaaccccaccggaaccccatctccctcgcgagccggtgagctatccattctccttcgtctccggccaacaatggtggccgccgtggtcactctctctactcctaatccttctcaactccctccgtaggtgccgccgccgcccgtccacccctcctcgtcaccaggtcgtcgccgccaccttcatcctccgctccggccgccatactcaccggtgaggatccccccctcctccctcttcccctctctctcatttgcgccgcctctctccacgcgcttgccgtcgccttcggtcgacgccgccgtcctgtaccccgtctgccgtcgcttcccgcgccgccgattgccgtcgccggcgaccgtgcgcgtcgccgccggttgccatggccggccggccggatatgaagccgagctgagccgtgcctagccgccgccgtgccgtccgatcggcctcccggccgatccggaccgtcggtcccgtggaccggcggtggaccacccgcgtggtcccggtccacggtagaccggccaccttgagccactgcccgtggggcccatatgccggcgcccccttcctcttccctttgagcccgtgacccgtgggccccgcctgtcggcgccccctggatgacgtcagcccctgatattattgcgccataataattaaggactttttctttattagtaaaaacacaatttatcctcttaaatacataagtaattcattccagcttcgttaaggtcattcaaggctcagtaaatcaggaaaatgcaaagaatctatttaaaaatggggttgttttctggttctataggcttatagcatggtttgcctgtgtgccttggtttggccataagtttttggcccgttcgtcgattcgcgggttttttgaagaccttgcttgaggcttattagttcgagagccaagcaaggcatggcaaaacgtttgatcatattgtgccccaattcaaaattcccgcattttttttaaagtggctttttttacaaaggatgggggaggggccctttctcaaacccatattggtcacctatgcactggtaacttggtttcaaaatgacttaaggtggcttaggaaaggctatccatgctttgttcaacaagtccacacaaggggcgccactttncataaacatcggctttgtgctacaactaaaaagaggcccccccggggggcggcgagtaaaaatatataatatatgactttgaggccgtggtttttttgttcccctgcgggnataaaacgattacggaaaacattcggtggatatggtgtgtctctc

SEQ ID NO: 15535 - DNA, 1671 bp, Oryza sativa
taatctttataggcattcgaagaggaaaacctgcaccgtctaggacgccctgcaacaaggaagatggattaacgacgtccgccacagcctcaccattcctcttcttgatgaattcttccatgtttgggaaattttagcccgtgacaccccacaactaacagagggggtacaagactcgattgtttggcaatggacaactaatggggaatacggtgcaaaatccgcgtaccaattccaattcaatggaatggtactctcgccatcaacaaagttgtcttgggaggcatgggctccggcaaagtgcaaaatctttagttggttggttcttcaaaaccgggtgtggacaactgaccggttacagatcaggggatggccaaataattatttctgccagctatgctttcgaaatctcgaaacaatcgaccatcttctgtttgaatgcccggtctcaaagcaaatctggtttgggattctcacatggctgcaccaagggcacatcatcccgaaatggaacacaagtagaaacctcttagattggtggacacaaggaacaagcgacccggaagcaacaaaacagaaaggactcagagctctcttcttgctcattgcttgggaaatctggaaggaacgaaatgcaagaatcttcagagcaaaggaggcgacagtacaccagatgattaggtgcttatgatatgagtccgaatataattctattctaacatttatgaaaactacaagtcctgctcatcgactacattcacatattcatctcaaactcaacatgttttcttcctacatctcatggaataggttctccgaggcaatgcattcaggaagtaaaagcctctcagcttgatgttgtcattggatccaaccacgaaagctatcttgttacaatgacatcattgaccacatgtaataggcaggggcaaagctaggtaggaagggggagggtgcccaggaaccagttaagaaaaattttttagctacaattcatctatgttcacaatatgtccaccggtaccccctcaattcaaactcgagactcgctccggtgctttctacttggagtagaaaataatcccggccattgatcgtatttaatcgtaggggtgagaactagttctacttccaccccaatttattggagaaaaaatgtgggacggctatatttgttccaccgataataaatcacctaagggtattaatcccaaaaccggcattatctaactgttcaccctgtccctattctattctaatcgaggccatttccctccatttgcccgccaaaaacaaagcccacagccttatctgctcgaacccccccccactgtttgtttgggaacatccccaaatagttcatgaaaaaaaggtttctcaaagcgaaaaataacctgccttccttaaaaaaccaagtccccgacccccttttggaggagcgtaaaacagcggctctctgtgtaaaaaaccgcgcccaaacctatccctggcaaagaagacccaacccaccccccggacaaatggaatttccccccccgcgcggggtacccgccctcttatggaactcttattcaaaacccccgacacaaggccttggtgtttctcccactcaccaagtttttaacccctcccctttatccgaagcgagccctcatctttgtgggacttccg

SEQ ID NO: 15536 - DNA, 3049 bp, Oryza sativa
  unsure (1)..(3049): unsure at all n locations
agaaacggtctctggtgcccacggaacaccttctcacaccctgtgttgttaagaggtaacacggttgagacggccccatccattttaaaattacaggtctcaaaacgaaactccaaggggtccgggaattggtctggttggccgccctcatttctaataggatggaaccgtggctttaaccggcgcaaaccccgaagagagaaaggcggccgtgcgacaatgattgtggatgccacacgttggggaacgaattgggatccaccgttgtggcggcgcgaaattgaagaagggccgcggctatcatgatgggcncggtacgggaatatggggcggcaaatgttcggcggcgcaaaagaaggcgcgcccccctggggtggcgtcgttgcgccccacgcgggggaagaaaggcaagcgccccctgggcgtcccctggggggcgtcggttgcgcccaccggcggcatcggtagcaccaaaaggccggcggtgtccgccaaaaagggtgacggtttaaccggcgaaaacggcggcagcagcgaattcgtgggggcggttagggttaaaccctacccccccgacggcttcccctgcttttttgctgagggccggatgggcgggcccaccgccccccttgcctgccagcctagtgccacacggtggtaggccgaatcctttagatttcggcccacacccaatttaccatttaattttagtttttaattttattttcagcagcaattacattttagtccctaatgttttatgtaatttagtcgaagcagttcatcagttgtacaaacaattatgtaatggtcctatagaccactgatgttatgtgtttattaacataggtgtttatttaaataccctgtttcactaaatttatttgttgtcttaataacatgccttttgcatattatttcaagacacgctctactttctcgctttattaatttacaaaattctataaattctgtattttgatttagcaaattctcttaattatgtacaacataattaatggaggatttaatacatgttccacttcacactttgacttggaaattaatcacatgtcgatggagtcctatactttggtcatatcgaccataacttaggcaacgagtatctcgcccatcatcaagtggtctacattttgagatgattacccgatggagtcctacaaattgaccgcactggtcataacctaggcagcgagcatttcgcccatctcacagaggtctacatctcacgatgattacccacatgtgttattttccgagaatatgttttgaaaaatgagattatttgaaatttggttgaacacaaggtagtggagtcctaaacattggctgcggtatattcaccagaatatatttgcctggagaccgtgttttaggcagcaagtataacttgcccaccattaagagatctactccactgtttaattacttggatattatccacattgtgccacctaacattacagaatatgaagtcttacatttcgcattgagattacaaccacaatatcatgtttttattaatttacctctgtaaattaataatgttaaccatgattgtagggacatggcaacaaaagagttcgacgaactcgccctcgatgggactaactatcccatctgggcttctgatatcaaaatcaattttgcctctcgggggattttaaatacaattgaggaacccaatgatggggacccagcaattgagcccaggaagctcaatacagccctttttcttttaagactctacattcacaaggatctcaaacatgaatacatgttagagacgagccctctcaacctttggaaagctctaaaagagcgttatgatcagcaaaaggaactcatttggcctgaggctaattatgagtgggttcatttacgcctacaggactttaaaactatggcagaatacaaccatgctgttcataacatttgttccaggttgaagttttgtgaacaagagccaacggaggtagaaaagatagagaaaactctatcaactatgcttccggaggacagaatactgactcaacagtatcgcgcttacaatttccagaaacattctctgcttatacatacattgactcaggcaaaaagacaccatgagctttctttaaagaatgcccaatagcgcccaccgggctctgctccactgcctgcacttcaatgtacagaataatgctgagaataagaaaggattcaaaggaaattcttcgaataatcctaagaatctgactggaaagcacaaacgcaacaacaacaggcgcaaattcaagggtcggaagaaaggaaaagggaagggtaaggcaccacaacctcgtagcaatggcaacaagcattgcaacaggtgtggatctgacactcatgtcgctaaaggctgccgcatcccgaaacatcttgttctcttgtaccaaaaatccctcaaggacaaaaaaatcttctgagaacccaagatttgaagcccacttcaatcttacacatgaagagtgccctgaggttgcaagttctcaccaggctcctgctgacccagagagcaacctcaatgttctcccagaagatgtcgctccactctctgcgatggatgatatgttcatcgaatactgctcaacggacccacttgttgatgcattccacacttggcatgatcgacttgggcaccccggtatcgagatgatgagaaaaattattggcaactctattggtcatcatttgatcactgataaattttccaaaccctctgatttcgtatgcactgcatgtgctacttggaaacttgatttgagaccatctttatctcaaattagagcagaaccacttaaatcncttgacgcatttcaggagatatctgtggccctattgtgcaaantcttgacccgtcaagtacttnatggntnttgattgacgcatctactagatggnctcatgtgtgcttctatcgcacaaaaccatgcttnngcaantatgtctcaatatanggtgaggcaanntaccctgactangatcaatcatctgttgcatgctgcga

SEQ ID NO: 15537 - DNA, 8091 bp, Oryza sativa
  unsure (1)..(8091): unsure at all n locations
tcagaaactaaaagtgtctagtagagttctgcactgtcacaccctaaaaatcccaaatatataaattgttgtctaaattggaattattagaatttattttaaaagcctagaagagaagatctagttttaattaataaattccaatataaaatggggccagataaaatttcattaaatactttgcttaattctataattcctagatttttctgggatttatttgagctaaggaagtatttttaataaatggaattgcatttcatgaataatttaaattggaaaaggttttaaaagttctcttttggctttgggccgaaagtcggcccaaaacctctctctctctccctcggcccagtcggcccagtccggcagcagccgcccgtgcgcgcgtccgcccgctgacaggtggggcccacctgtcagtcttcgtcttcctcgcgccgctgccgcgcccaaaccctagctgagcagcgccgccgtctccttccaaattcggccgcgcctttcctttcccggtgaaatcaatagaggggaaatgatccccgggatcccctctatcttttctcttatggaatcgtcgccaattcggtttggaaatccgtggattcgagttcaattcagatcgatctctctcctccgaaccctaaaccttccatcgcgtcaccggtcgccgtgggccttcgccgtcgcctccttgcccctataaaaggacccccaagcccgccgctacccgccggcaccctcgccttcgcctctcgtcgccggtagagccctagcaccctgtagcctagcgccaccgtcgctgccgttcgtccagccgtgcgccgccgccgctccggtcatcgtcgtcgtcgctcgggaaggccgccatcgtgatcaccaagtcgtcgccgacctcgtccgcccctccgccgtcgctgtcgaccgccggaacaccgccgtcgtcatcaagccgaaggtcgccgccgcttcttcctcgacgccatcgccgtccattgatcttccgccgttgttttggtcactggtgagttcgccgcgtcgccctctacgtgttggttccctccgttcgcgttgtcgtgccgtcattcgccggcgagcatgcacgcccgagccgccgccggtggtgacgtcaccgctgacgtcatcgttgccatccgtcgtaggcctgtcgtggaccgatagatctcggccgttcgtttttggatggatcggtctcggtcgttcgtttccgtgagccgtcgccgtgcacccagtccatcgcgaaccctagccgatgacgcagtaattcccttttccttttcaaaaataattcattattgcgtcataattcaattaaaatccatacaagtgttttaatccgatttaatcttttaaaattcataactaattcatcttagctcggatttagttggttcaagtctctaaatttttctaaaattgagatctacatgttagaaatatccacatgtactgttcatgcttgtttatgtgctgttttggtgattttactcttttctgtttagattccgacgtttccggagagtccgttttcgcaggagaagaatttgaagagtttcaaggccagcaaggcaagtcacacagatcccaaataaccctttgagcatgttgatcccgtttaaagctattgtttctattcaactattgcatttattttcgaatgtcattgggtggaattaacctattgtttgttatagcccttttgttcttgattactttattccttgataccttgggttattataacttgactagttgggctttatatattggttcagctagatattagatatgattgtttagccatgcttagaaacattagcacactattgggataacttataactcactattattcaatgttggcttaatgatagctcatgatggttaatcatgattggttaattaattaatttgccaactaaaacctgataatggtgggttgtgagcacatggttttgatggtcgtgctcatgacaattaaggaccggttcacgagttttggttgtgaaacattaaccgtgccaaccacaagccagcgtgggcaacggctttaccttttgtatagcatggttcattgcggggcaccagactgagaagtggcggagataagcccacgggggtcgctggggagtccatgccttgtttataagggggtgattatgatccaggaatggtgcgctgtggtggattgtgttgtgcgaggggtactgtcacagctcctttctgaggtaccgtggtggtattgaggcgcatggtgacatgttgtggggctgtgtcttgtgggtacagtggtacacctctggccagagtaaaactattcgaatagccgtgcccgcggttatgggcgggtctaacaatgtctttcgtgattagtttcacacttctcaccataataaaagatgctataactggtaataatttgattcgctcttggtttggaatggtatattcctggttttgagatagaactgtgcagccgggatggttgttcagaatggttgggcctatgcaacaggatatgttgtatagcgttggattaatattttttaattactacttaactattttattaaattctgaaatgtttattaaatgctatttatgcaaatgaaaccctactatgccatcctttgttatcctgtgcacttgcatatttgctgcgtggcttgttgagtatgtcatatactcaccttgcaatcattcatcagaggaggagttctacagtgatgctgatggtgtggaggattaggtgtagccctggtcaagctgcctgtggagtggagtcgtctgcgccgtttatcttatttttccgctgcttagatctttattgattgagaggaactatctacctctgtaatgacattttattcgcttattaattagagtaataattgtactctattatcaatttgttattgtgtgcctcggctgattcctggacgagggttcacacacatgtaagcgtttggaattttggatagaaattccgagcgtgacaagttctcatctagacagcatcaccacatcactccatgcctcattcttaccattccctgttctagccatggactgtaatcgtcatgcaccaagctctaatcatcttataaaccacaaacacaaaggatacggatgaagccgagtgtccccattgtacatagtattcgagtaatccaattgttttggcattaatagttacaaattctgaaattgaagcagtgacaaataagatggatattcctcatccaaatatgaagacacgaatgagatagcattttcttgggaagaaatgtttgaatcaaaacaagagcggaagctggcgaacaatgagcatgattatgaatgcattaaaacaacagcgaaatttcttcgtcttcatctactagtttacaagaagacatgcatcacattcaccagaaaatatataccccccacaatttccgtaatgagcaactatagggttggcgcacagtatagtagtatagtagtaaactacggtcaagtccgcaatgagcaaaatgtggatgccaaaacttaatttttgcacttgcgaaagggttccgtagagaagtgctctgtaggcaccagcagcgcccaccccatcttgccattcgcacgggagtgccactattgcgaaattcttattggtgttggttgggaacaactataggtgttggtttaacagtaagaatcaacttggaaataccaatgcctaatagtatagatgtcgatttaataactggtacctatataattgataataggtactggttttgtctagtatccagtacttataattgataataggtgatgattttctctaaaccgacacctttaacctattatttagggttttgtagtagtgtgccgacggcattcaggtgccgttgcgtctgccagtttggttttgtattatactagcaagactttaaattgaattatttgagcactattttacgtattatgtattttgttcttttttgccgtgtacggtggcagaacaacatacatacgacaaatgttgggttgtttaatttcatttcttgctctcacttagtgccagacacattgcctagtaaatttcttcactacaagtaaattaaagcagaataaattgctctaccaaacatccatccctcttctagttatatacttcgtcccagggctgaatcagctggagggcttcctgagaaacggcgacagaaatagcatgggaaggttcttcgtcactcaaacaaataccccaaatttaggccttattagttttgaaggattcctaaaggaaatctcaattcctttggaataagcaatattcatgcattcggtttgtaggattcattggaaaattttccataggaacactatgccaatcctccaaaaatcctccaaaatatactaattccataggaatgaaaacattcactctatcctcttttgtttagctcggtggaggaaaaattcctgtgttccaatcctttgttttacacatggattcctatattattcctacgttttttctatttctgtgatttggaaatcctgtgaaccgaataagccctacttaggaagcggcaatgaaaaagaacgcgtaccatggcaataagagaaccttgtaaaagaagaaaaagctcctggaaatccaaatgttaccgacaactttagaacatataaaaataaaaacaagatctttttactaccaatagagaacaccataaaatggatttttttgtacggtggcgctaatacgcgcgctgcgcgtggaatattagtttgagcaccgcacaaccctctctccttccggttttctcttttttattatcactccaccttccatgtttcttttttctcttttccatctcatccgtgcttcatcaaaaggcccggaaaaatattaaccatccatattttttcctctttcattccttctctgcattttctttagcattttagttttctttatctttttagtaaaatatttatcgtgtagtttttctttccgggttttctgtttttctagtgtctatccacgtttcaaaagcaatgaatttactccatagaatttttcatttactcccagcctaccacatctgctcattcaaaagtaacaaatttactcgcatgaatgcccgtcatcatacaacaccattcctagatgtccgtaaaagaattactaccagcttgcaatgctagtaattcttttaccacagttatcaatattgtttagacttcgtgatctacgagtaaaacaacaccttcctctcgttatagcctatgatctcgtagccactatgcagtaatatgttactgatgtgttcaatacacagtataagagtaaaaactaatataggagtattgttaatatccgtatcacaaaatggttgtacgaatgaaaaacattacaggctcaatcacacacgactgttaatataactcacagatgaattaaactaaaaaagaaaaaaataattcagccaaaaattcatgatgacgttgggatcctggtggctttgctggatctttctataaggatagagaggttggtttgtgtcatgtgactggtagtggagagggcaaccaggtgacgagcagtagtcgatgatggaatcatggaaagatgtagcggcgtggtacatagatgagctcacatttgcgcagtagcaaccttccatcatctagcgagcatgaaataaatgcaaaaacattcttgttcatgtcattgagacgacgagcaaaaacattcttgtagcggccccgctcgcttctccgccccgtgcgcgcgcgcgagctgcgccgcgggcccgccatcgcttccccctcccttcgacttcccccactcgcttccccttccatctccttctgccacgcttgcttctccccccatgcacgcgtgcgcgagctgcgtcctggacctgccgcggatgcagccgcttcccctccccgcgtcgcactgcctcccccatcccccacgcgccagccacgccggagctgggaaccctagcgccatgccggcctcaaccgccccctccctcatcctgttcggcgttacatgcggtattcacttcatcccttaatcacgcgtatttacaatagaaaccgccaaatcaattgggtgaggaggcgcactggttaatataattcatgtgcctattctgatttgtctttcataagtctcttgcaaacttgataggcctcttgcaatccccgctgcaacccggcctctcctctgatctatacctccctcacatcaaccgttctgtgtgcaagcctcaaccctgcaccccttcatcctacaggtgcacatcattgcaatcgagtcatgtaaggttagttgtcaaccaacttaatcggttcattgcatgtaaacttatttactgattttatatgtctgaattggttatttgccatgggtactgattttaattcctgaaaaaaagtgtcaatttattctatttggtaaacctgaacttggcatgaattttgaccagattctattggagtatacattatgatttgaaccaagctgaagcattatgaaaggtctatcgattggtttctcccgcccgtccgcgagcgacctgaagcggatgtgggtgcggttcaagaaagcgccgcgcggcggcggtgaccgacattctccctgtgagaagattgagagagaagagaagagagataggagagctgccatgtgggcccaagggcatttttgacattttacacgatnttctctctcctcttcaactgaaattatatttctaatcggcgcggtgtccattggtaaattagcacgtntatggaatgttttccccaaaaatgagttcggacagtatcctacggctaaaagcacgaagtcgnaagtgttctgtagcaaaatttgccataaatatataatagatgtcggttttttcaaaaaaaaattatcttaatcttaatcttaaatatttaaaaaatccataactttctgatcatcacctctctttttttccgtattttcggtcgtaagtccgagagtccgtacattgtcctcccccgcttaagcaaaatcaaacaaaaacagggagggcggatctgcgtgagagagaggcggagagacaacgggaaacaggcgccgacggcggatccacacaagcagcaacgatggcttagagccggtggtcgatctggtcggcgacaactcgggtggaggagggagacagacgaagaaagacggagattggatcagggagagtaggggagaaaggggatttcatcggctagcgatttcgtcggacatcaaggttttcgtatgcccccctctggccggttatttcatcggtgcaggaccgatccgaactgcgccaccaccgctgttgggccacggaagacaactgggccacgcagagttctccccgcattgggccgtcgccgttagatgggccgttcgccgcgcgatcagctcgtgcgcatgtgctaaacgggtcgggccaattttttgggccggttatggaagtaatgggccaaaataaagttttatttaatttcgccgaattaattcatttgattatgtacataattttatttggcattattttgatccatttaaaattgctggaaaattatgatcaattactcagaaaatatatatttatatgtatatatatacctaataaaaaaacacaaaggttccgatttattttggtctgttggtttttttggtttcgtccggttttttgtcgttgttttttcccgaatgcgaactgatctattgcaccgtgcgccttctgtagccgnccaagccgaatctgaccgattggtgatctttctggactttttattccgaattttaagctctaatatggggaaaacagaaagggcatactagcgtagggctaaataagaaggaagaaatgggctttcggtgcaaaatcaagaaaaaaatttcatcaacttttaaattatagtgtatagcaatcccaatattaaaattctcattaaccttttcaatcgacaatcgcaatgtgtagcgagagggataagcctatctaaccaggccactgatatttttttaaaaaaactacaattatagtagacttgtta

SEQ ID NO: 15538 - DNA, 1081 bp, Oryza sativa
  unsure (1)..(1081): unsure at all n locations
gagattttgacngatcttgtacataaaaaatagtacaaactaatatgcaaaatgttgagtgcaaatgttcgtcaatttgcgatataatcacacatcaccttatataccactattacataactactaacttcttagatgcttacatgcgactcaacaatcattaccctttaacattttttcccacaccgtccgtgcgcatgtaaggcttcatggtcttctaagtagatgtctcaacattcttaatcttctgtacaaactgactataaagtggcatactatcatattgattgtaatcttcgacatcttcaaccccatccactcccaatatcttttgtttcccgggtagcactatatctttcttaaaatttgaagggtctttcacataaaacacttgtgccacgcgattggcgagtacccaagagtcatccttgtaacccacactcgctaggtcaacaacagtaaggccgaacttatcaacattgaccccgttcgggtattttacccactggcacatgaatatggtgaattgcattgtgtgcccatagtcgatttcccatatttattcaataaacccaaagtatgattgtttttccccggctttatcaattacctccacacggacaccgctattttgtgtacatgttttattatctcgggctcttgtactaaacgagtatccattaatgtcatatccctgccaagaatttactgtagttgatggaccacaagccaaccgcttcatagttatttcatcggtagtttgtccctcaagcaagtctaggtctcgcaaccaatctatgaagagtcgcttgtgttctttcattatctactcggtggtgcgacccttattgttagctcgtattagttcgatatgttgttcgatgtaaggctcaacgatagcaaactgatgaaggacgctgaagtgagcttcttggaatgatttgtgatcatgggtgatgaatctcttctttcctatcgttcccttgccactcaatctgccctcgtgtcggggcacaggtactccaattgcatatccatctttgaggtaatcgatacagcactcgacaaccgtncacatctc

SEQ ID NO: 15539 - DNA, 1494 bp, Oryza sativa
  unsure (1)..(1494): unsure at all n locations
tttattgagcaaaacagtaaaactgttgagtaattaaagtaacattaaacctccactgatcaacgctacaccacgttgaacaggcccaaccaacccacctgaactacagtgtattgggtcgatttattaagatgggactaatcacggtgaatctggtcgaccgcccataaccgccggcacggctattcgaatagctttactctgatcagaggtgtacaactgtacccacaagacacagccccacgacacgtttccgtgtgccgacatgccaccacgacatactggaaagaggccgtgacaggacccttcgcataaccccctctagccaagcacaccacacctcaggtttcacccccgtccccagcgggcaacgggcagtcccctctcgtacctaggtgaatccggaagcgacagaggccgtcgcagggcccgccccgctccatcacgcccacccttgcctggatgcgtcagctagaggtaagctacactacaagcccagccgttgcccacgctggcttgtggtaagtacgataagttcttccagggcatcccgcgaaccggtccttaactaccatgggtgcgaccagcaaaaccatgcacccacagcccaccattcagtcgcattttagttggataattacgaccatgaagcatggccagatgtctcgagcacgcagcttactctgatactaaaaaggtctaatactgtaattatcccatcaactgagctagtggtaattaagcatggctaatcatatagttctaggtaggtcacataagtaacatgagcggcgaagcagataggtaatacctggatcccatgtaattagcaaaacatgcatatttatttgtaaacggtaaaacatttataaattgggatcaacatgctcaaggggaatgtgtgacttgcctttcttcttcacttggatcttctgaactcttatccttgcgaacgcgaacttccgaaacgacggattctacacgctggcacgcaaaacgaggaaaaactctaataaaaaccaaggaaatagtacataaaaagtaaacaaacatgtagagctcaattttagatgaattttgcaagttgaatggctcaattcggagttcgaatgaattagatatgaattttagaagttttgagccatttaaatgaatttctagaattattaacgaattatgatgtaattattatttatttttccaaagaaaaagagggttgctggcgtcatcaaaggggaggggcggcgccggcaagcgggccccaccggtcaacggcacaagggggagggcggttcaccgtggaccgggtccacgcgggtggtccactgccggtccacggaaccgacggcccagatcaccctcggggtcgatcggacgggcggcggcgacctggctcggctcaaggccggccaagcggccacggcgacggcgacggcacgcgcgaacgcgttgccggcgacggcaaccggcggcgnagacgagnngtacatctca

SEQ ID NO: 15540 - DNA, 1645 bp, Oryza sativa
  unsure (1)..(1645): unsure at all n locations
cagagtantagcccttgtgtgatggatgtgtacgtttatgcctgcacatgtattcggataaatctaaattcttaaaaaaatagatccactatatttaacgaatatcaatggttaaatgttttcttttttcatagaatttttaagaaacttttgaatttataagagtgtcacgtggcggcttagaagcgtttttaggatgcgacgtagcagcttgaagcgtttgtaagaagtttaatggactctagtatataatagatagatagatagatatatgatctgtttggtacaggtctagctctagctccatgtctcctagagctggagttcaatcaaacagtttcaactatacgtaaaatcttagttattaagaccggactggaccagcggttggaccggggaaaaaccggaaccaatgccccaaccggtccggtccaggtaaaaagaccggcatgcaatcggcccagcaataaaccggttagaccgcctggttttagagaaaaaacgccattaaaccggggaataaaaccgcttccaaccaggcttggcggctgctgtacgcgcgcatgggtgctgttgggggaaaaatgagagaaaatgtgcatgggtagcattcgaaccggttagactgcctggttttagagaaaaaccgcctggttttaaagaaaaaacgccattaaattggggaataaaaccgctgttgggggaaaatgaaagaaaatatgcatgggtaggattcgaacctagaaccataaacaccccaaccaccaggctatcatgtcctttgtgtttagatagaatgcttaatgtatttaatagttattgaactggattaaaccaacggttcaaccagttgaaccagtgaaccattgaatcgagagcctcaccggttcgattaccagtccggtcttaataactatgcgtaaaatgggagtgagaggagctggatggagttctctttactaaatgaactatagaggtagagctgggcttaggcaactctaaaactccactccagacctaatttctagagttaaatttaggagttagaaatctactaaataggcccataaatttgcaattcagaaactaaaagtgtctagtagagttctgcactgtcacaccctaaaaatcccaaatatataaattgttgtctaaattggaattattagaatttattttaaaagcctagaagagaagatctagttttaattaataaattccaatataaaatggggccagataaaatttcattaaatactttgcttaattctataattcctagatttttctgggatttatttgagctaaggaagtatttttaataaatggaattgcatttcatgaataatttaaattggaaaaggttttaaaagttctcttttggctttgggccgaaagtcggcccaaaacctctctctctctccctcggcccagtcggcccagtccggcagcagccgcccgtgcgcgcgtccgcccgctgacaggtggggcccacctgtcagtcttcgtcttcctcgcgccgctgccgcgcccaaaccctagctgagcagcgccgccgtctccttccaaattcggccgcgcctttcctttcccggtgaaatcaatagaggggaaatgatcnccgggatcccctctacatcatcta

SEQ ID NO: 15541 - DNA, 3718 bp, Oryza sativa
  unsure (1)..(3718): unsure at all n locations
attacagcccctctaaatgtatgcatatgnacgttagaaattatattgttccctcggcatgcaacatgtcgtcgctatatataaacgagcacatctcgtcgtccctcgccattcgatctcctcaagcgttggcattcccaagttgttatcattcacaagcgtggtatatatagggatcgaccgaaacagccatggcgaactgccgcaggaggatgacctcccctctctcgagtttggtcgccgtcctcctcatcgtcgtcgccgtgcagtcccgaggtattctaagctcaatctggtttcttctatgaacttgtactgtattttctgacggatcggatgacatttaactgactatgttgtgtgtatgcatgtatatcgatcaattaactagcatgggcgttggatcagctggatgacatggtgccgatgaagacggcgaagccggtggtggtggccatcgccggcggcggcggcagcggcgtagtagggacgttggcggcgccgttgtgcctgcagtgccggtgctgctcgaaggcgaacccgagcaactgccagctcactagctgcagctccaccttcaactgcgaccctgccggcaagtgcaccctcgtccagcagcgctgcggctgctagctgcattcctagctagccggcgagccgagcgtgagctaatgcattggatgccaaagatagttcttgctgaaagtataagcatgtatatagagatttaatttatgtcatcaataaatcttggcgttaaacaaagacaaactgattaaaaaaatgtggaacttaatataataaatgcgtactggtggttctgttctggatgatctctggactccattaaggacgtgtttggttcgtggtgaaggttggataggatatagacatcagatatggtggggtctaattttttatttggttgggtggatatcacaatccagttttttttgttaggtacatgagaatgagaatggattgaatgaaaaacaataacatattaattaatagtaaaatatgttaattatcatgactatagccattctttatactaattaacaacaaaataaactaattatatctaatcaacactaattttgataagttaattactaattaacaacacaatacattaattattgttaatcaattactaatgatcaagattagcaaaggtggatatcctcatccagccgatacacttatctagcatcttcgtggaatatttccttttcaggtcgccctatccacccttgtccaccaaccaaacacactcaaaaactgaatcgtcatctcccatctagggatattcctccaacaaaatacaccctaataggcgcaccaggtatcacgtggacagctcactgtataggatgttggacgatacgccacgggtgagcaacatgggccgtggtgaatggacagtgagaaatcatgcgtagtgcttcccaaaaatctcattcaccattcacccttctaggactttaaaagcgatagttaggtagacctgatctcctgattaccagtgcacgccgacgagtgaaatagactataaatgatgatgaaatacagagatatcggggtatgtgatcagaacaccgtcacggtctccacaactcgtatctgaaccagataagtcgcacataaccataccaaattttataccactctaatgcatgcactgggcaatccgatgcactcgctagacatgtcattcgtttctactacaaaacgaagccacgtatgtgtgagcacaaagagtcaattattttttatgaggcaaagctatcgagcgctcgtgccttcctcaacaatgtatattccccatgtgttagtgtgtatgtgcaatgggaagcagatcctttgacttaactgcacatgcagttgagtcactggcatatgggtcccactttgctatggcccacatgtcagtgactcaactgcacagcagttaagtcagaggatccctttccatgtgcaatgatatagcaaaatacaccaaactagtacgctaaccgcctttattatttacaagcaaagtgtcagtgcattccaataaaaaatacgaaaaaaggtaggaaaagaaatagagcgtggttagaaaacggtcgagacgaggtgattgttgggaaaattgactctcagtatggaaaccgggagacaatcacacacgttgcttttccacccattacccatgcgagattaacgcgattaattcatagttatttccataataacgcattaacgtgattggtcatgcatgaacattccttttgggattacccccgatacccacagcgccatataaaaagggaacgccagcgtcgtgtcatggtgacgatcgctacacgatcatctcgttctcgataaacactaactaatctcgatcctttactaagtgctgaagggtcatcaaacggcggtaccatgccagtgcaggtggcaccccgaaggacgtcgccatcttgcaattgatcgccggcaatccctacagatcaagccggtgaccttacctaccccgctgctacgactactttctctacaccgaacaccggagcggttcgaggaactgctatctctacatccactccggccatcggcaacctcaggacaactacggcatccatggcttccaataatggtcagtcaccctaagtttctgtattatggtgatcatgttaggctaagcacttatgatttagcctcatgatcccatcatcccatttagaagccataagatgcatctaagcctctatctattgagtgtcggtttgatgcaaaatttggtttcgatttatgttagttagtccttaattatcatcagattatgattagttaggttcgattaggttttaatttcttgatgcccatgactaattaaatttgtgtctgcattttaagatcgattactgcttgggtagaaattaggaggagaattgcagcggataaccaaaatctctaattttcacaaatgctaattcaagaaaatccccaaattagaacccaaaaattccccacaatccctgcaaatccctaagaggataagattgatgtcttaccgattcctcgaatcataacgcgagcaccgctgtgcacgcaaccccgccgtgtcatggatcggccttgcgcctactctcatggcccatgcagggtgagactcaccgtcatgttttgccgcacgtgaggacaatcgagattgcactgttgcactagcattagccttgctacgcactcaccgtcacgatatttgactagggctcctacggcaccagtgtgttgcacgagcaccgggtaactcggtcggccacgaccccttcgttgcacgctgctgggcaccacaaccaccgcctcgcacatcgccggcactccgatgcctcacccgattcgccgctgttgtcgccattaggagtagaagaaaggggattggaagaaaggaaatgggttttagggctagggttttggccaatcggccatttttctcaatccaatattatctttcattttgctctatgatgaagttttactccttgtctggaaataataatgttttaatttatttacatagataatatgcatagcttaaagtgaagagaaacattgtggatagaagcaccacaaagtataatctcaagagacacacgacaaagtccagtcgatacaaagacttcacagtcgcacacaatgattatgaaggatgtagcttacaaagagtcta

SEQ ID NO: 15542 - DNA, 1099 bp, Oryza sativa
  unsure (1)..(1099): unsure at all n locations
tgacatatcctcctccgccataaaaatttgattatagccagcactaccatctaaaaagctaatcaccttatgacccgaagcatcattgatcatcatgtcggctataggcataagatattcatctttgggagtggctttatttaaatctctaaaatctatgcaaactctaatcttaccactgcccttcttctccaccgggactatactagaaacccactccgcataacgacatggcctaataaaccccgccttcaacaactgatcaatctcctctttgactcagtcatatagcaaaggattaaaacgacgaggtggttgcttataaggcctaaaacccggtttaattggaagccgatgctcaacatgctcacggctaagacccggcatctcatggtactcccatgcaaagcaatcaacatactctttaagtagctcgattatcttaaccttataatcgactctcatatttttgtttacaaaagtcagccttggtttggttccatcacctatgtctacttcctccaatggatcggccgatataaacccttgtccaagcttctccacttcatcaaaatcttcaataggttcacccatatcgttctttgtagaccgatattcttgcaccctcttttgtaaccactctaaattagnctctttactcattatacaaatttatatggcttagccatgcttcactagccaagcttacagatatatgtaccaaatttgccattggagatacttataaaatcatagcatttgatatttcccatgacaccccctcaaaagtagcattcggccattgcaacccttgggcgatggattcccttaaacaaatttcaacatcattgcttgcccattggaattaacattgttgcanggtngaaagcccacaacaattgtgcttggatcaacacacgacccaaaataacaatgaggttcctgcgcacctacaataaaaaaacggttgtaacgtttgttcccaccgaagtcccctgaaagaaacctttgctccttgttaccattgaacttgtgaaaaagtaggttttaaccaaaatcattgccaaatttggaaacagttggtttaaatcacagcccc

SEQ ID NO: 15543 - DNA, 544 bp, Oryza sativa
tgaagtgttctggtgaccagacatctgcgcgctgtatgactgggctagcaaacaccacttctggcagaccaacatcctgagtcccgaaagcctgcgtaagcagtgggacaagctgacaatgcagcgtaacgccggaggtgagcagcgcgctgtcaagccagatctggacttcaacaacactgactgggcctatggggtgatccgatgaaatctcttgcagagcagatgcgtaaccacgaccgcgagcagatgagccgcatggcccataacctgccagagcagtaccaggagtgcgcgccggtcgagcaggtggcgcaggtattcaacaagctgttcaacgagctgcgcgccgcgttcccggccagcatggcgaacttccgcacccaggaagacctgaacgaattccgccgtcagtggctgctggcgtttcaggagaacgggatccacaccatggctcaggtcgatgccggcatgcgcattgcccgccgccaggagcgcccattcctgccgtcgccgggccagttcgtcgcctggtgcaagcaga

SEQ ID NO: 15544 - DNA, 2750 bp, Oryza sativa
  unsure (1)..(2750): unsure at all n locations
tttaccttgaaaaccaaaaggggcctttgagcctccttagagaaaaaggaaaatgtggcaaagttaaaattgaaattttggtccctcaatgtgcccttttcaaaggccaaacctattttcccagggttttattttgagttactttgtgttagacgcctcaaattagtagaaaaggttggtattcctaacggctctaatatatttaatattcggaaggtagttccaattataaaaagattttttttgaaacatcatgagtgaagtgatgcctggtagctaagaaaaattgattttaagacaanctanatttccttggtttattgaaaaatacagcagaaggatagtaatgatttttgtcaagttaaagcaagaggcttgtaaaaggtcaagacttccacaaaacagttgacacattacgctgccataataaattaagtttttagcanccgaattgaccagnaaccttttttcctcctaagaaactgattgcgacgaacattcaattaggcatcagtattagattacaatgacaaaagcaggcagctgcgtagatttgttgtcatcattttagtagaagagacctaaaggacagcaacttggaagtaactgacagggccaccactagtatagtaccagtcaattttttttatttttttatttttttgcctttccatctacatcttgctttgtatacaagcaaacctgtcgcttgcgagcattaatgtcttttaaccccttcgttaagtttttggggctgttatttcttccctgctgcaaatggtaaccaaagatggtgacaaccggtggtctgagtcggagccagcaagaacggattacctaccctccttcccatcgtgttgtccctctcaaccagaagaattggaccttcatgtcgtggctggagatctgtgttgcaacctttcgatctactaacaggaaatactccagcaagaagggcaaagtagggatcttagaactcccatcgtcttcccctagctgccatagccagcactttgtatcttttttgctatccgtgatacggcttgcccaagctgaacttgttggttcctattaccaggggtgcagctggaacaaaaagggaaggggtatcattcgcttgctttactctattttagatcaagtttaagctaatatgagtacctgagtttgaagagtgatgctccgatgcaatatacttgaagtattctactccgagcagaattaatctggatcgtatattttaaaggacaggtaagtaatctcctaatatccttacgagagtggtggccgtgacgttctgcgtgacgctggtggcgcgccacggcgcgacggccatggcggcgttcctgatctgcgcccaggtctggctcgccacgtcgctcctcgccggccaggtgagctagctagctacctacctacatagcttagcctacattccgatgatatatgcatggctgcttaattaactttgcttaaattgatcaatcaacctcaggccttgcttgccagcgcgtttgcaaagaaggatcactacaaggtggcggtgaccaccgcccgcgtgctgcaacttgccatcgtcctcggcgtcgggctgacggccttcctcgccaccggcatgtggttcggcgccggcgttttcaccagcgatgccgccgtcatcagcaccatccacaaaggcgttccggtacgatggtcatcataagcaagaacagattaatcttcagatattagtaaacatttttctcatgaacatatctgacgattgtctccaaatcaatcagttcgtcgttggctcgcagacgataagcacgctggccttcgtcttcgacggcaaatggaggggaatggcatcgattaggataggatagggagagggtgaacagttagataatgacagtttacgataatacccctacgtgaattattatcgctggacaaatatagccctccacatttcttctccaataaaatcgggtgggagtagaactagatctcaaccctacgattaaatacgatcaatggcacggattaatttctactccaagtagaaagcaccggagcgagtctcgagtttgaattgagggggtaccggtggacatattgtgaacatagatgaattgtagctaaaaaatttttcttaactggttcctgggcaccctcccccctcctacctagctttgcccctgcctattacatgtggtcaatgatgtcattgtaacaagatagctttcgtggttggatccaatgacaacatcaagctgagaggcttttacttcctgaatgcattgcctcggagaacctattccatgagatgtaggaagaaaacatgttgagtttgagatgaatatgtgaatgtagtcgatgagcaggacttgtagttttcataaatgttagaatagaattatattcggactcatatcataagcactccgataaataaagaggcaacacctaacgtaagtgcatagggactatagcataggcgaaggaatgacttcctggcagcctaactggtgaaatgtcctagttggggatgagcattgtaatcaatgctgtaaaatcaaagtgtgtctggtccttattctgagatgaacaattggcatttgatattattggttttgatatttgaagattattagcgaagtggttttggagatgattgatttgtaggtgatgaacaggaactgctgctgactgtttggcccggtcagatcggagctatgcgtgcagtcagaccggccagcccacgg

SEQ ID NO: 15545 - DNA, 1308 bp, Oryza sativa
  unsure (1)..(1308): unsure at all n locations
gggagagtggggccgcccccctaaacggtgtgggggaaaaaaccccccctgtttttttttttctttttttttatataacaaaaaaaatttttctttttttgaggggggttttttaaccctttttttacggaaggggtttttaataatcccgcgggaaaaaaagcccggggaaaaaaaaagggtgccaaaaatttaaaattttaaaaaagcccctccaaaaagatgaatttttttagctcaaaaaccgccatgagattcatgaatagcttcgggtcataagggtattgagcttttagaatggtaaggcgggccataatcaaatttttaaggggcggaagnaggatatgtacaacgcggcttttttaaggtgcccggnatattgtggggtttgtttgagtngggttgtcaagacttttgaattgaagacgtcaggggcaactatccaagggccaaagattttgattattcatggattggctaggtatnatcttagtgatctaaaatggagaatgntggtgtcaaatcggattgtatgnnatgacacagacccaatttgagaattagcttttagagnatgcgccggtatggtttaaagatgaacccacttaatatgtgcttttggtgtgtcgncgngnaagttcttaggattcatggtgcatgagagaggagttgagatcatcctaaagaagatagaaanaattcgtgatttcaaagcgccgacatgcaagaaggaagttcaaaagttgctaggtaaggtgaattatttgagatgatttatttctaacctagcaggtaaaatcgatgcttttgttcctatacttctcttgaaaaaagaagccgattttacttgggagccaaaacaacaagaggcgtttgaggagttgaagaggtatttgtctactttacccgttgtgcgagcgcctaaagccggaaaaccttttcggttatatattgcctccgaagacaaagtcattggtgccgttttgacgcaagaggaagatggcaaggaatatatcattacatatttgagccgccgtcttttagatgtcgaaacaaggtatgtctttattgagagactttgtttatgcttatactatgcttgtaccaaattgaggcattatttgttatctagtacatgcatagttgcttgtcaagccgatgttattaaacacatgttgcaaaggccaattctaagtgggagaattggcaagcgggcatatgctttgatagaatattatttggcttatgaaccattaaaatctatgaaaggccaaattgtatgtgattttatagtggaccatcatgtag

SEQ ID NO: 15546 - DNA, 4246 bp, Oryza sativa
  unsure (1)..(4246): unsure at all n locations
agattattatctgctcctctggatatcggttagaccgggccctggaccggttagaccggcgcaataataccgattcaggggatagatccaatgactaatgctagttatttgtatcatcttagaacatttgatcctcctgtatctactactgcaactaatccccgagttcccccacgtccatacctatactaattggacactttctaggagctctcacgttaatcagaaagatctagccgttaattaatttgttgaattatcataaccgtagatgaaaatacaatctacgtgtgatgtgggccacttttaaagtctatctattgacccaacagatcataacttgagagataaatgcatctactaaaaagaagatcaccgatcctatctccttaatgagatatacgaattcggctgcacaaagaaaaaaaaagagatatatggagcagctaaataagaggtccaactcgcggcacgacggatttcgctagtgacgggggacgccctccaggagtccaggttgcccttcgttctgatcatcggcaactatttcgacttcattggcgttgacgagagacatgcgtgcacatcagaggtcaggacacactgcactgtcatctgatgtttgcttgcatgcgcacaagttctggccgggtttcagtgaggaaggcgaaaggatatccatttagtgatggctgctacctgatcaattaatcatggccacgatgcttcatctcggattaagctttgctacaggatccgggatgatgaagatttcttattagattttctgataaaaggaaaagataacatatatattgatctatgcttttccgaataaaaactggcaactaaataatatgactatagatttcaggtgttgcgatgttgttcctctaaccgaaagttcactctttcctgcatgcacggaagatttatacaccgtcatcgcttcaaggaattcaagtaggttacttacatattgtatgtgacctatttgaagtattcttgatttctaattttcgtagaataattaatgatcatgttataataagtgttaggtaatcaggtccctgaatatataattatgtttatcaataagtgtgtttacgtagttaggtttatacagagcaaaactcccatagttcacaaacgaatttgatctattctataataattttagaactgagaactcacgttaatctctattttttcaatagcaactaataattagttttccatgtatgtcttatcatgtttcaaaaactgtatgaagccttattgttgacgttcatgcagttaaatatcgtgactaattccaatttttacaattattatatatcatgaaaactgtactcatgacctattaataacgaatttcaaaaatattaaatcagaaaaaagttataattcagtctgtcaaattggaaatattaattataccacgacgaatctacaaatgagactccaacatttttttttcttaacggaacatcacaatagttacttatcaattccaaatcaataaattaaattaaaaatactaaattgagattccaacatgagaagaaaatgagtagtgaatgattccgatttttataattatcaaaatagtggaaaggctattagtaatatcccgaatgtgtacatcttgatcaacatctattagttataaatctcagaattattaaatcttaaaaaaggctatactgagactcagaccagataaaactcaatattttaaatacaaaatttacaaatattaaattaagaaataatataatttggaattaacagctgagtttcctaaataagtataaaatgctacttgggatggatcttatgtttatactttttaattttggttttttgaacagtcaatacaaaatatattgttttttctttatagctataaaaatctacaaataattttcaaaacaatatatttaaaattttaatatttaataattctaccaatgatagccgtgcatcgcacgggttggcgactagtgttcctaatgcttataatgatgttgctagggagtatcctcctgatactaggcaaggccaatataaccatattgcgtcgcaaacacaacctattaggccaccaaatacaccaccaaatcaacataggcctgataatatggaggaaataattagtgggattattatggataaattcaggattgaaactaggaatcgtgctaaggtttaccaaaagtcgtatcctgactattatgataatgtgctgtttgcttgtaattatagagttcccgaatttaccaagtttagtggtgaagattgtagaaccacatgtgagcatgtaggtcaatttttagcacaatgtggtgaggctaatagtgatacttttaaattgcgcttgttttctttatctttgtccggtaccgcttttacatggtttacttctttaccggcaaatttctattcatacttgggctcaattagaacaaagatttcatgattatttctatactggagaaactgagcttaggttatgtgaagaaaaaaatataatgagcctgtcattgattatattaagagatttagggatgttataaaccgatgttatagcttgaatataactgatagagatttggctagtctttaattgctcctcttagagaaagactagatggccaacaatttcttgatgttagtcaacttttgcaaagggctctggctcaggaaagctgggttaaggataataaaaaaattgttagaccatatgagaaaaggcctaatgttaatatgattgattaccttgaggcgagtgatagtgaagataagggtgatcatgatatgtatgttgctgaatggtcatggactaacaaaaacaagccttttgtttgttctaacctaatgccgactcctcgcaaagatcggcaaagtgaggttaaatatagttttgatgtggccaagtgtgataagatctttgattatcttttacaagaaaaacaaattagattatctaaaggccatatcataccatctcaagaagaattgaaacgtcgagcttattgtaaatggcatgattctcattctcattccactaatgattgcaatgtgttttgacgacaggttcaatcggccatagatgaaggacgattgaagttcaccgatggctccaagatgaagcttgatcatgatccttttccggtgaatataattaatttcaatgacaagaaggtgttgattcggccggagcaagccgaatctactaaggaaaaaggaataatcattggtgaatcaaggccaaagatgatagtgccaaagaagccggaggttggtgttttgaaagagaataaaagcgaagcttcgacttctaaagctcctaggaagaccaaagtgacccttgatatgcttttggagaaatatgaaaagcaaggtggtgagagagcttgcaacaatgggaaaagaccaagatcacctcctagggagcgatttggtcactcgccaagatggttgcattcacctccatatcatcattcacaagacataccatggggtccctatccaatgccgccgctgggttatccttatccttattacatgccatggggggcaacgccgccaatgttcaatcatatgcctccaatacaattcaaccaaaggtggggaggaccaaggaggccaattcatgaacatttgtcttcaccaaacaacggctggttttatggtaagagccgggccagtgaggaaaggagagaaggaaagcgcattaaagtggaggcaaggacttcagaggtaattaccatcaaagtagggtctcatgatgtaccaataccttctggagatgaagttagagagtcctcgagaaaaaaatccgaagccggtaccagctcatcgtagtcggctggtctgaccgggccttctagccggtctgaccgcagccatacggccggtctgaccgggccatcaggccggtctgactgccgacccgacaatggttcgaccgacgcctcaagccggtctgaccgnccaccgaatgtggtctggaccgngcatnttggccgtcttgaccgtggttaactncggtttgacggcttccaccccgtttgttagaagtttgaaaatgcatatnaggcttcattcattcattaaacccaatggggtttattactcccttgaaaaatccaactatgttaccgccaaaattagaccaanntcaaacttgggggttaaactttccggaccgccggtcccaaaagaaaaggtattaattcaa

SEQ ID NO: 15547 - DNA, 5199 bp, Oryza sativa
acgttatgacaacgcctagaactgcccaggtgagactgagtggtttcgtgaactcctgatggatttgccggtggttggaaaaccagtgccagctatcctaatgaattgtgataatcaaacagtgattattaaggtgaacagttcgaaggacaacatgaagtcatctaggtatgtaaagagaagactgaaatctgtcagaaagcagaaaaactccggagtgatagcattggactatgtccagacagctaaaaatctggcaaatcagtttaccaaggggctaccacgtaatgtgatagaaagtgcatcgagggaaatggacttgagacccacttagagttgcacaatagtggaaacctgtcaattgtgatcggagatcccgtgaatttggatggcgaaacaaactattgtgtaaccgaaagaagagacccttaaatgggctcatttttatgatgtacttctcttctattctgtatggtaggatggcttatgcctcaatgtattccgggtggctttcattaagcagagatgttgacctgcagaacatcttagaaggaacacacttatatgagttcgactgctagtcacagtctatgagatttgggtgatctctagatactcatgaaaggcctggagtatgacttataagctccaacctgagagaatactaacggaataaatatttgaatattattgtttcccaaattgggcttaattgagttcaaaatatttcttagtgatggtgttgcacaaaaatattacatttgtttagaatagttgtcgtcatgaaaaaaaaactttggtcctaggagtttaagttcttgtgatggaattttgttactcctcacatgcaacatcgccaaaaaagtgaatatttgtgataaaaaattttaacactaactatcatttatggctataaagacatcaccattattttaacaatggagtatttcaatcagccaaaggttcaaaggtgacatccaagtagttgtgtgaaacttttgtctatccagccattacttccttaagcttcatcagatacaaggtcgcagataacttcgtgtgctttactgtacatctggcttgcagaggtgtctcaaaatcgttcatcagctgagtaaacttctcatggtccctctcgttgtaagttaggtcctcaacatcacgcaacattactggaatagtctcattattgacatcctcccgatcaccagccaacgaggattgaacaaacatatcatgtttgtgttcttccttgttcagaccaccgccagctttatccccaatattctctagctattgctctctatgcttagtccaacatgagtaaccatccatgaagcctcggtagatcagatgcatgcgtgttttggcactattctaaagcatcttctcattcttacgatcaaagtatggacaagtcatccattcattgtttgttctgctcttgtcttgctctacaacatttatgaaatcagcaacgccccttcaatactctatgctagatcggtcacttttatacatccatcttctatccatctgcaatgtatgaaatgaaattaatgatatgtatatgtagctagtaattattacatcgaagttatattggtaatttattattaacttggaatacttttttttcaagtgaagagcaaaaattcgcccctctagccctccctcccaaactatgaatagtctgctatataggaatactattctttcgaaagtttgggagtatttatactatgggttatccgtaacgggccgcaaacaagccccaacaaagattaaggataatccgtgataggcttcacagtcatctttatccggccttaacactaggctcgtcacggatgaccctcataggtaacgggggccgtcactaatgaccttaacgggcaaatcacaccccatatgaatgttggttatccgtgaggggcctatcctgaggactaaaattctacctctcttgggccatctttgatgaggctttttgcagcttgataaagatgactatctttgtaacgggtcgctcatttccatcacagatagcctgattgtgattcccggttctgtactagtgtggatatatgctatgtccgtattcattttttagaaattcgttttttagacgggttgcaagaacaagtttgagaggagtacaagaagaccatgcagtggtcctgacagctgattcatctttttcatcccaggattgatgatttacacacatataatacatatatatgatatcaattttagagaaaggatacggtcggggcacagcagcatcgctactaaccattattaattttaatttaaagctatatatattctgctagctagcccacacgaggcgtctcggcgacggtgtcgacgaagattcggacacggttgaagcgaaaatcctctggcaccgccgtgccgaatggcagcacgacgatgtcggcgtcgggcttgtccttgagaatcaccttcttggcctcctctatgctcagcccaaccacctccggccacgacgtcttcgccgacgagctcatcttccctcgtctctgcctgcatgtggatcgataagttaaatgccttaaaggtagttaaataacttctagctatatatatatatacacacatgagaacaaaatatacttcctctattctttaatgaacggtgttgcattggttaattagtttatttaaaaggaaaatagaggcagtataaactaaggaaaactaaggaattaaaaggtactccactcacggtctgatcgagttggtgatgaaagaagctgatggcgacaaaatgacttgtagagttcatcgagagcaccgatacaaggcacgtatttataatagagttccagaggcaggtttggatcaggattatagcttgccaaggtggatctgactgtgtacgtgcctgcatgcatatgccacacgacgttgctggtcaagctgtttgatcaaagcgtcgagtaattaagacacaacaggatcacgtggcgatcgagcggattaatgttgaccaagagaaaacgaaacctccaaaaagaaaaagatagaaacgtgtttgatgatggcgtggcacgctcgtggccccagcggccggccactacgtacaaaacattcaactaccgtgtcacctacttttgccaagtttgaaatggcaccaccgcaccaccatcgatcagtcaacagctctgtccagtgtccacacgaacaacaaaccagtttggtttctcacacaacaattccgctccttttgttaagaaactacgggtgatctcatccacccaaggaaataggaacaacggttcctatactaaccggtagagaagaggagatcgctcctctctctccctttagcgtccctctcgacaaccgacgcgatgttcctaaatatcgcgtcccctgcagttgacaccgcttcacattgtataaatgtactgttgatcaatgagaaatctatcgattcgctctgtttgtgttcaattctctctctcgctcaatcaattctatccacattcaacacgttatcagcactttcgctctcgcgaaggagatcgcgaagtgaaagaaggaagaaacatcgcttttgatctaacagaaaagcgaacaggagattcaacagagaaggtacgatgcctacctttcattggattatggatgccgttctcggcctccctcgcaatcagcgcgcccgtcgccttcaccatcttctccgtcgatcggagaggagtcgccgccaccaccacggtcgccactaacaccatgaacgtcgggctagggctggtggccgtcgccaccaccctcgccgacgcatcgtggtggccactactccggctgctcctcctccgccttcgtctccggttgccgccgtgcctcgccgtatctgtgtgcagggggtgcagtactgcgcctaccacggatggacggcagtggtgacactgcccggcgagccatgtgacctttccctggagatggagtcgctgccgccaccactgaccgccccttcaccacctccaccgacaccaagccgacgccgacgccgttcccccactcccgcgctactggggtccggcagaaccggtaccctggctgcgcgcacgggggagccgcccttcttcaatccgtcctcgtctcgtcgtcatgcaggtgaagccgccgtttgccgtcccggcctccgccacaccttcatcgccattccccatggctctcctagccgtacactccctaacggggtgccggggaatggcgtccgggctcggccggcctccgattccgatgaggatcgggagccgtcggcctaatccggccggcaaaccgccggcggacggaggggcggccgtggcggcagtggatggtggatggcgacaacggtgggtagcggattgtggatgcaagcggtggtggacggcggcggatatggaggcagcggcggcggcgcatcatgcatcggcgccgtaacggggagatgggggcggcagatggtgcggcggcggcagaggaagggcggcgcccccctcggtggcgtcgttggcgccccacggcggcggaggaagggcagcgccccctcggcgtcccctcggcggcgtcggtggcgcccaacggcggcatcggtagcagcgaaatggcggcggtgtgcggcgaaaagggtggcggtttgagcggcgaaaacggcggcagcagcgaaatcgtgggggcggttagggttaaccctaaccccccgacggcttcccctgcctttttgctgagggccggatgggccggcccaccgccccccttgcctgccagcctagtgccacacggtggtaggccgaatcctttagatttcggcccaccacccaatttaccatttaattttagtttttaattttattttcagcagcaattacattttagtccctaatgttttatgtaatttagtcgaagcagttcatcagttgtacaaacaattatgtaatggtcctatagaccactgatgttatgtgtttattaacataagtgtttatttaaataccctggttcactaaatttatttggtggcttaataacatgccttttgcatattatttcaagacacgctctactttctcgctttattaatttacaaaattctataaattctgtattttgatttagcaaattctcttaattatgtacaacataattaatggaggatttaatacatgttccacttcacac

SEQ ID NO: 15548 - DNA, 562 bp, Oryza sativa
  unsure (1)..(562): unsure at all n locations
caatatcctaccaattgagccaaggtcaaccactttacttgacacttgaaaagttggatttctagaaatgtggaatttttgtcttcatattgtaccataatgcgtgccaattctgcctgtagctgataannnnnnnnnnnnnnnnnnnncaacaaaaatataatttgtgagtagaaaaattatatccgtgtccttagcaaaattcgaaaattaagttttgaattcaaattttggcgacggcttataaagtgaaaggcaaacaatgtgaggcctgagtcatctctttttaatattttcaggccgagcattccttaccccagcagttcattcatgctttcaaagatgggcaatttacaacattaccagcatgtcattcaggcggctgacctacttcaccatcaacgcctttcattattggagttcgttttcttttaattgtttaaattaactaaccagttacccttccatcctggtttgtacatagagcaagccagtcctgttcatttggctcaggtactgcacattttcctctaccacaacgtattaatcctacagttccaac

SEQ ID NO: 15549 - DNA, 1156 bp, Oryza sativa
  unsure (1)..(1156): unsure at all n locations
cagtcttgatgacaacgcgtggacagccccccttggggtttagagaagaatgaagacaaaaaaggaagaagatgtggatggaaaacgtgacggtagtattttgtttctaatcttggaaaagatcaggggcagggttgcgaatcgactaattataataatatttatctaattgtgcacccttgcaattgcacggatctaatttacctttttattaaaaagtaaaaactaggaaacggtacgaattaccccccgaactatcgcggtcgtccaaattacccccattaaccacaaaaccggacatttcttcacccccaactatgcaaaccgaacgaattacccccatcgacacaatccacggtggttttggtctatgtggaatacacgtggcatcccagtcaacgtttttttaataaaaaaaatggtcggacccgactatgatactctcaaactctctcgtttcccaagttttctaacagattctctatctgtagctgagaaattgtcgaccaggtttgagagacaccatagggagcagcccgccggtgatttggacccccatgagcagcccgttgcccgccggggccacatcccaagcacaaatttgccttctctacggaaccaccggttattttctccagtcttaacgccccatcattgtcccccaagcaaacgtgtattacgtttccggcgccttggctccacccaatggattttttgctaaaaccgtaagttccctttccctagtctctgccaaaaggtccttctacatgggtgttctttccagtagcgaccgcttaccttcatcgattaaatcataaatccacgctccttcctctgtccatccgtaatactgccctcccatccttatcatctactggtcccttacctctgtgtaaagtccactttattgctcttattcattcatctcaatcgtcgcctatagcgctacggcgcgggggtcctctcctcttcgccgaccccggctcactatcccatggccttttacagaaaatgacaccgggtccgtcttaaaatcacaactctggaatctcctctctttggnaactgcctcccccttattaccgcagcccctcttctccattcccacacacactctttctcttgctcgcaaacaccggtttcgactccgcgctct

SEQ ID NO: 15550 - DNA, 14527 bp, Oryza sativa
acacagcccaggaagattttgggctccaccacccatgaaaaaaaaaagataaattgtgcccgcaatctcacatcacgggaaactagaggatggtatatgaaaacactccctcgagaggacttcggttttcttccgagacgtctacggatcgggcatccgattttttcacgggcgcgcacccagtctccatcggcgtatgcatactagtaatcaatagttaggttgcttaatgtttttaagcagactttaaacaaatcttttcttaaattacttgtccaattcacgattcgattgcaccactaaattcgttgcaattaaacctttaaaacaagaccacacatgattataatttaatgaaaaaattatttagctttattaatgaattatttttaaatgtttcatgtagtattcatataatgtttcactatttatttcactatttaatttgcaaatgttacacatggtgttccttgaatgttttagcaagtattttataatgtttcaataattatattttagtgtttatatgtgatataaaaatatttcaacaatatcaagtttttataaatatattgtatctctgatatgattttttttgggagaatagctactttagtccctaaagtttctctgtaggatcagtttagtccctaaccttttaaatggtccaaagaaatccttaaactttgtcataaggcctagaatagtccttgggtccaccaaaaacatcatatggatatgtcatgtcatcattcgtgcaaaatctacgatgaattgtccaaattacccttacttatatcataaaaaaaataaatataaggatgaattagacataaccataggaaaaaaatacttctccttttttttcacccttttgaggtatatttttgctcttacatttttccttttgttttttattttcttatgatatatgtaagggtaaattggacaaatcatataaattttgcatctttttttttcacccttttgaggtatatttttgctcttacatttttccttttgttttttattttcttatgaaggtgacatggcatgtccatgtggcgattttggtgggaccaaggactatatcagcccacatgacaaatttaaaggacttgtttggacaaaatgaaagattaaggactaaaatgacccatgagtgaaactttaaggaccatattagctattctcccatttttttcactcattgggactcagttttacatgtcctattgtgtactgtccccatccatcctaaatcgtggcttaaccactgtccacggcgccgcctccgtctattggggggactaataggcgatcgatcaccaagcgatcgcccaagcgatcggatcggcccccctcccctatactccatacactcctccctcctcttcccccttcctcctccctttcttctcttcctactacagtacaccacacaattttttttaaaagaaacaaaaagttagaaaaatttatgtatataaatactatatataaaaaaatttgaattcaaattcaaatttgaatcgggtatgtaaacttttgacttataaactttaggtgtataaactttagaggtatagaaatactatatatagaaaatatttgaattcaaattcaaatttgaatcggatataattcaaattcaatttaaattgggtatgtaaaattttgacttataaactttaggtctataaactttaggtgtataaactttagatgtataaaaatactatatatagaaaatatttgaattcaaattcaaatttgaatcagatataattcaaatttaaatttgaattgggtatgtaaacttttgacttataaactttgggtctataaactttaggtgtataaactttagatgtataaaaatactatgtattaaaaaattgaattcaaattcaaatttgaatcggatatataaacttttgacttataaacttttggtctctaaatttagatgtgtaaactttgggtctctaaactttagatgtgtaaacttaaggtatatgaactttaggtgcataaatttattaaatagaaaagtaatgcggtgccaaaaaatgaaatcaggtggagggagggagggggagggggattgatcgctacccccgtccccaggcgatcgatcaccgatttggatttccggcgatcctgttcatttctttgaaagcgatcggaactgagacggacacggatagggggagccacacggacgagccaaaaaacgaaattttgtttattttgactcaatccgactcatcctcccttattactccgactcggctccggcgcgttactcctgtataagagaggaggcaaatcaactcgacagtgcggaacaaaccaattaggccataccacacgatggagatcaataacaatttcggcggcgcagtaggattcgctgccgtcgggccttggcaagaagccatggttggttcaagcgcagggaactgagacgttgtccttcgtcgacatattggacagaagcttgcacgtgagagttgttcctgatctgcaaggcaagctgtgcttgggatgtgtccacggcggcgactggctgctcatggtggacgagatcaccggcggctgcttccttttctgtctctcaaactcgtccacgatctcgctgccaccgttgcgggagccgttaggagacatgggagcatgcgtagtgttggggtcatcgccgttgaaccgtgactgcaccgtggtgattaccagtctacctgaaccggaagagagcttcctgctccattgccaccccggcgacgaggagtggaccaagctgatggtaccactcggctctgacaggttgttcggcaaactcgtcaactgcgcaggacagttatactctctctcttcctttaggaaattgctcaccatagatgtgatcgatgatgctctccatgctaagatattgaatattgagtgggagagttcatgcggtcacaattttgaaccgtacatcgtcgagtcgtgcggcaaactgttcgttgtcctagcatcgttatacgggtatccctacaactgcccgcttaatggggtttccgtgtatcgtctagatcgagccgagtcaatgcttaagaaggtggacgacattggcaccgatcgtgccttcctcatctcaggtcactatggcttctcgtgcaccgccatggaagggctggtgcaaggcaactgcgtctacatcgtgtggtcaggctacgactgcgagaggatttacaagttctgcttggatgatatgacgatcagcttacagccgatccttgctcaccccactgaagatttgcgaaggggattttggtcggttcctgcagggtgagttacactaaatacctttcatacccatgctatgctttgattaccttcgttatgaacaatgtgtatatgttggcttatggtctctaaacaagttatatgttttaattacaggatcgaagctacggaattagtacaatcagccccatcaattcattgtgatacagaggttcgtatactttatctccaatatttttatatggtgatgtctactataagtgatataaccaatataggccttctatcttttctcatcctaataaaccatataggtttatacttaccaccataattcctaatagtagaacataaagtgtataattgcttctactagtattagaactcataaatcaatggtttaaatcgcatccaccatatttatttatttatccttatttcgagaagaatcctggagtagactaaatacacctcttgagaaaatttaagtactatatatagtacttatacttgcttacaaaattgtaagctaactatgggccgcatctcctcacaggttaatgtattgaacaatttcaacaaggatgaggatgcacaagctaccatcaaggcatcatggcaagaccttccaatagagatgctagagttaatagtttcaaatctatcattggtcgatcgactacgatttccatcagtttgcaagcagtggagctcggtttccaacccagttgcacaagcaaaggtttggccatggctcatgcactgtgttaggcaagatggtgcttgcaagatgtttgatcctctatgtggcgtcgagtattctatgaaggttggtccatttgatgccaacgagcgacaggccttccgcttctccaaagacgggtgggtgatcgtcacccagagtgacgacaacatcttcgtcataaacccattcacaaaagagattgtgaagctctctatggccagcggctggtacagattcactggcatctcattctcgtcggtgcctacttcaccagattgtgtattcctgggtgtgtgtagctctcccaaaggcgatgggatcaaagtgtggacatgtcggcccaatgaggaagagaccgaggataatgagatatactacgaggaagagactgaggatgaggagagagactccgaggagaatgagataaactacgaggaagaggctgatcaggatgaggagagagaggctgaggagaatgagataaactacaatgaagaggctgaggatgaggagagtgagaccgaggaggattattggagtgagtttgattttgagaacgacgaagtcatgttcccagtggcacgcaataatccagtctatttccgaggggagttctacttccttgggcagaggggcaacctttcagtcttcaacccaggcaacaacgagtggagaatactcgataaaccggagcccatccgcgctgatctaactccctacgatgagggcaaggaagcttgctacatggttgagctaagaggagaactgatagccgtgttccatcgtaacgccaatgagcccccacgagtgctcaaactcgatgagtccaagatggaatgggttgaaattgaggacattggtggaggagctttgtttttggattacagggcatctattgccttgccatcatctgaagctggacatggtaataggatttatttcccaaagtttagtgaagatggaaagaaagcaattttctatgatctggaggccaagaagtatagcccgatgttctccggagctaaggaaccaatgaactgtgtttggtttgtgcctaagtaacagtctgatgaatactcctagccaagtacttgtgcgttacaatgcacactaaagtactcctagccaagtactgtatatgttacgcaacctcctaaacctatgatatagacaacactaagggtgtgtttggttgagctgtggcttttggaaaagctgctgtgagctgtgggccgtggaaaatctgctgtgggaaaagcagaagcccgtttggttagagcagctgtcaaactataggttgtagaaaaaatatcagtaatgcccctaaaggcctgtgggactgtttatatgcaaattactcgtaaaaacttaatttgttcaatatttcatatttaaaaggctaatttggagaatggcctaaccaaaacttgtcacttgtttggtttgaggatccatttatctgtgtgttcagaagtacatgttcattagtacgatgaagaaggaagttatcccaccaaaaccatgggaagacctcatgatggaccaactcatcctaagatggttttattcctcaaattaaagagaacatttactagaattgagctaaagaatatctcaattatcttaaaatgttgctcagttactttctgttcaagaacagaagttaggttgagggctaacattccccgattcctttcataattttctctggatcttgaagcttgtttccccataggttgagggctatcatattctaatggcatacaaagaaaataaaaggagaacttcagaacttacacaaaattcaaagaagcatgaaggtatggtaaaaatatacatctctaagtcatataatgtttttcggagagctagaccagcactaaacattccaaatttttttttattgaaacgatctttagcactggaaggtttcttttcctgaagaataattcaaaccataactattggatcggatcatctacaaagatattgcacagcaggatatattttttatcagatcaggcagataaacaactttttggtttatgctcctcaagttccagccatgcagcaaagtcacttcccttctcctggattctaatccttcctttctcaactatctccaaggcattctcaaaactccctccattcccattgtcctgttcatctgtttcttcaagctcagttctcctgtccagatccacacacatcaatgctgccattctttcagccagtcctggtacttccctcaactacatatcatcaaaatacaagcataagaccactcatgggagtaaaaggctctgtaaatgaacacacgcaaaatttgtatttgttggtcagtagacaaagctatcagatgatagcatgaaaccaatacagcaggccctaattatgcagtgttgaccatttattaaccaacataagaaagctaagaatacaagagtacaagacattaacagcaaaaaaaactagaacactcttaagttagctcaaactgtagctgtcgctcacttaactaatcaatacagtataatacattgacaatcagcagtctaagcaggccggagccagaagggcgacgggagacgcggcgccggacgggcggcggccggccggcttgagcacgggcggcgtcgcgccgccgtcggagcagggatgcgtcgggcgccgccgttggaggtgaggtcggcgtcgcagggcggcgccggacgggcggcggcggcgcaaaaacctaacccgcgtcgggccgcccctgttcgtcgccccagcagcgcgttgggtctattcgcgagaagggaaggggaaagaagcgaatcgttttttttcactactaataatctcatgatttgttgacgcatgacgatacagacttctactaacacgggctgattaattatgattagatagatctagctataaaaagataaacataataacatcaattttgcttaataattataaaacattcgattgtggcctatttttctaactgcatgatatatgatgactatctcctatgagtatgtacataactatattagtattttccctatttcttcaatattgttttctatttcttacatatattttaatttggactaatttttttctcataattaaatagataagaaattatttgtccatatttctcctgtagcatgagtatagtgcattatataatttaaaaattatattataagtgtatgtaatttcatgcgtaaaatatggaattataggataagatttgactttttctaaaattgccgcaccatagtagatagttagataagtaaataaccataaaaataatatagtcaaattgtttctttatttcattcgaaacaagacatttcttatgtaagcatctcaggagaacttcgagagaaggtaagaaaaaggagaggttagtcattagctcacgcacatgaggggaaaagttgctcatatccatgatatgatatactcccattaatcgataatatactaatattatttaaaaaaatacgccgtaatgtggtgtgaaactaaaacttaaccctatattcttctgttgttcaagatcttcttgttgttttctcggtcttctttattttcgataataatatggccacatctaccactattacttgcacatgaatactagcggctagctcatgtcttctgttgttcaatcttcttgttgttttcccgttcttctttattttcgataataatatggccacagctaccactattacttgcacataaatactagcggctagctcatgtgtgtgctccgtaatacatattatgtatgttttgacttgtataaataataataattttctttgttaatgatattatatttatggtaaggcactttattgttttttaagaactggaaagatatttttgctaaacataatctagaatgctataaagattaataatattgaataatacatagtcatataaatatatataatttttatggataaattagagaacgacactttttatgaatccaatgatcacaatgcactatatatattgttgaagtcagttgttactttgactatttgatagttatatggcaatgcattacaataggattttttgagacaaaaatacggattagtttttttagtcctttttttcatgacgagttgggttttttacatttctttagagaggtttttagggtatagtttttctaagggggacgaatcgattttttaagggaaaaaggagaattaaagtgcagttgaattgtttcagtgttttttaaagttttaatggaaaggaggcattttttaaagaaacatttagtgatcgtgcttttaaaataattaatataaatacatataccttatattatcgagatcatgcttttaaaataattaaaataaatacatagactgtatattatcttatagagattagatttaacgataataatgtgaatttaatttattagttacttatatatatatatatatatatatatatatatatatatatatatatatatatatgtgtgtgtgtgtgtgtgtgtcacatatccctatcttttatctccaaaatcgattccttagtcctaacgtaagccattcttaaccacggcaccgctgctagttgccgccgtggacgcagtccaagcaagaagctcaacggtaatgacgataagcaatatcttcctgtaccgtcagaattctccattgtatattatggtttgattggtttattccacggtagtgtaatatgtacttgactatatatatatgtgcatgctaatttaatgtcatgaatactgttgtaaaaataacttgtctccctcgccggaattctccattgtgtattatggtttgatcggtttattccacgggagtgtaatataggaataggcgtacttatatatatatatatatatatatatatatatatatatatatatatatatatagctacatgctaatttgatgtcacgaatactgttgtaaaaataactcgtctccctcgcgttttggaatcgtatttgaagttgaattgcgtggtttaagctaatattaattttgttttacagttgaagttctatcaactaaagatttatacacaaagtaaaacatttgaaatttttcaaaacaatgaccaatattattctgtactgagttgttcgtgtgttgcaacggaataacctaaaattaaacataagatgattatagtttatatttatgatatgagattttaagaaaaacatatattcttcatttgttcattaactcatctaaaatgtctttttatttcttttcttctgctccaacattagcttacattttgtagaaaaaagctttctcacatatatataacatatatttcctatttgttttcactcgcttatattccgacgttttaatctcttcgtagtgacctcaccacattggtccactcgaaaaaaaaacctcaccatatcgaatgagattgtaggagggaggaaatgcaaacacgttaaggggggagtgttgtgatagatgactaagtgagatgtcgtgtggaaaaagagagtgggtggttgtttgtttgtaaacggagttggcgcgagaataaaggagattattatgataaggaaagtgtattaggatacacaaatagtatatggccagtaatttgtgttatattttggaaaagttataattagattatatatgtgtttcatatatatatatatatatatatatatatatatatatatatatatatatatatatatatatatatatatatatatatatatatatataggacactcatatggggcaccatggtgcccgggcaccatggtatctaatgcacaaaatcacttaaatttttcaaaattttcaaattgtgagtatatacctagttataataatttgattcatacctatacttatcaacaaaacaactcaaatttaactttatttcacaatccatgattacatacctaactaattatatgtatggatgctatatacctagaatcaaaatctaacaaaaacaagttcaaattcagttcaaacttgctttaaactagttagtaaagtagttaatgttaatacctaagtaattgaaaaagtttcatactcatttgaattgggtatatactcaatttcaacaatggtgcccgggcaccatggagcaccaaacaaatttactatatatatatatatatatatatatatatatatatatatatatatagtttaaattcatagaaaattaatgaatctagattagaaatgaagaagccaaaacatcttatactatgtgtcggtgaaataggaaccgaggtacccatttatccggcaaaagcatcattataaaataaatagcatgctgagaatgtctttaaaaattaaaaagtaaccctagggtgacgtagctaggggcccactctggagtgtcctgggcccacctaagatttcatatatgggattctccctacctaagggggaatattgcgtatatgactcaaaactctaagcataaaagtagcttgggacctggcttgggtcccaagcataccccaaatatgccttaagaatatagcctaaggtctgcctcgggcccagtcctgtcctgggccccgggctcatcttagtccttgtatattctatggtcctcggcaggaggagcgtagaaccctgtaagatctatatcttaagagaacgagctacagtttgcttcgggcccagtctggtcctacgccccgggctcaccatagcccgcacaagtcccgcactactcgagatagaggagtgtcgagacatacaaaacataaaggtgtaaattgaggttttcctcgggcccggccttgctctaggccatgggctcaccttggtcctggtatgcctcacgtccgtctgctcagaggggcgtcgaaacatacaagacacataatcatggaatattccttcatcaacgacacctttaaacgcaggagggcgcgacctcagaactcgctgggaagttgcgcgtgctccatagctagctgtgaggccgcatgcccagccataaatgaaacaggtttatgggggagatcctcggctagtctggagttgaaaggacgtggacaagacaccatcactaagtcacttaggacggtggagcctgggacacgcgtcgcacatgccccgtgccacttgatttagccaaacaggcagagaagctaccgtggcactatttcgagcagataaggcctcgtcaagcccaccacacaccatgtggtgagcacactggcagaaacccaactgtctcggacggagcccgagagcccggggtaatatgaattgcaagactcgaagggtttcttaaaggctgtgttagagaaccagttggcaacgataagacggctgatgagacaagactaagagtagatttggactataaaaggaaggggaccgatacggatgattagatgaaggcttggactctctcgctttgtagcctaaaaaggcattcattgtacttagctgatctagagaagacaacgaacaccaacacatgagtagggtattacaccttcgggtggcctgaacctgtataaactcctgcctgcctctcttcgttgggtggtcaagttccgcgaacccatcacgattgcatatacgtcgctcctctcaccgtcaaaccccctggtccgatcttcactctcggggagggatctctactccctgctattcgagggaccgccccgtcgacactatggaacgaacggagtacctactatttaaatgttagtttcatgttaaatatacttagtgaataggtgatattttttttctattattaattttatgtttgaaaacgactcaacgatcctatgcatgcttgattaataccttgtatagggcaaacttgaaatggactcatgtatgcattatctattggactcctacatggacagtactaggggtgaaaacggtacgaaaacagatggaaaccacctttatcgttttcgttttcatatttttttggggaatcagaatcggagaccctggatacgaaaacggaatcgaatattatcaaaaccgaaaacggagcgaaaacgaaccgacgcgaatacggtaacgaaaatttatcgaaatataaaaacccctcaaactgataaatccaattctcaagtctcaacggtcaacaattcatcataaaacacaatcatataagtccaattgttaagtctcaatagtacaacacaaaatacaatttacggaataaattatctatgtttaagagagtaatgctattgataaattccaatgcaggaaaaaaaaattcttatgcaacttcaggtgtgcataacaaatatttttttaaaaataacagccaaacaccatggtattcactattctgtgcttgaaaaaagaatccagggtatttcagtcaccaaatttccggaaattccgagaaaatttccggaaagtttccaaccgatccaagttccgatggaactgccattatcattttcgattctgtttccgagaaaatatttccgaattcgtttccgtttccgaaaaattccgaccgacagattctgttttcgaaaataggtccggaatccagaaagtttctgtaccgttttcacccctagacagtactatacgtttcaggttacaatgcgcaccgcgcgatgggatcatattggccggaactctcacgtgggctgacgtggacatacatagacggtacacactttgagaaagtttaatagtataattaactattgactattagttaatataaaagctaatgtgtataataagttaactataaggttggttgatggtttctctcctctctcttcttctcatcacaaatttaatgtacatgttttgaagcaagtgtatgggggttcctgtttcgcgcgtatgcgctaggagcgaaggcgggcgcgcactttcaccgctaatagcgcttagtgtcgttttcttcgggtttcttttttttggataaaaattcgccatgcgtaagtttcttccctttgttttgctgactgaaacaacctttcaactcagatttattcaggattggaaacttttcaactaagatttgaaaactttcaagcctagatttgaactcggatttaaaatttttcaagtcaagatttgaataatttcaacttcaatttaaaaattttcaactcagattttggaactttcaaatcttgatttgaaaattttcaagtcagatttgaaaacttttaactcgaatataaaaactttcaactaaagatttgaaaactttcaacttagatttaaaaactttcatctcagattcaaaaacattcaactcaaacttaaaaactttcacctcaaatcataaaaactttcaactatttaagtcaagattccaaaactttgaactaaagatttgaaaactttcaactcagatttaaaaaatttcaacttaaaccttgaaaacttttaaatcaaattcaaaactttcagcaaaaattaaagatgaaagattcaatttctaaaataaaaaaatcagcaaaaaaacgtttcacggtctccccgcggcggaaaaagagaagcaagaaaaacaaaaaaagggaagagatagactgcacgagggtgagggctgcgtaggccagaaacgcgcgcgacttgtgctaattagcaatttcgcaagtgtatagcctaactcttgcacgagagtcaacactcctcatttttctctctttctttcacataagtttatagttggtttataactcactattatccttactcttatgtagacgtgggcatatatgtgaacacgtggagatacgaatcggacacaagctagcacgtgggaaataagaaacaagaaaaatactaaataaaaagatgtaccagctttttttaaataaaaatacaaatattacatattcaactggtgaatcaatgaaagaaaaataacaaatagttaaaagtgtctcggtgaaaaagatgcacaacacaaacgttagatgaaaaactcatgggttgataaaattatccaatttatcataaataatgtaagtatcttatcctgtttatttataccaacatgaataagtgaaagcaaggaatacaacagaaaaaaattattaactatttggctgagcaggaccggccaggaaagagcccaagaggcctaggagccatcccagttttgggcgatgggcagatggcccagccggtcaaaaaagatcagaactcacgactcacgagtgaggtttcctctatgaattttttttatttataattttttttattaaaagttttacaaaaataattttccattttgaaaattgacggaattagtcgcctaccgccctctgggagggcgattttttaaaattgccctcccaagagggcggcgaaaaatgacgtgggaagacggccgttcgttctcgggcgacggccgttaacgaaaattgcaggcggcccccctttgcgccctcccggagggcgaatttggtactggtgcggggggccgccttgt

SEQ ID NO: 15551 - DNA, 2342 bp, Oryza sativa
ggggtgagggtccattgaagcgggataggagtgaataaagatgtgtagatatcaaagttttggtgaggtgggagcagagagaggggggggggctcgcgagagatcgtaagcgaggaggaggggtggttaagatagtttgtaggatgatatagacggttgcgaaaagcgagatgacagcgagggagaaggggagttaagagagagcggtggagattaagaaggtagtattgtaaggggatgggagagtaggatgggagggagggggaagtgaaaaataaagggatggagagtggggtgtagaagaggaaagagagaagtgcggggcgaggaatggcgggaggataaaatagtagttaatgatgaggggaaagggagatagaagtcggagtgtaaaagtgtaaggtagtgtgttggacataagaaaggagcaaagaggaggtgggaagaaggggtaggttgttgtgattaaaggaaggggaagagaaggaggatgatagaataaggttaagaggggagagaaaagggacgggtcgtggatgggtggtaggaggagtgtgtaatgtgtagattagtatagtagaaagcgggagagggtgaggaagggagaggtttttatgtgggatgggaatagtgtgggagtgaggggggaggtagaatgaaataaagagcggcgttgcagggagaagggggggggtagagagatgtggaagaatactcctttcggccatggaggagggcaatttttgccccccccccctataaagcccagtccctcctctgtgaaatttcattatattcactaaaaatccaaaaaaaacgaaagagagagaggggagggcagcaaaaggggagcggcgaagccctgctggttcgctcacttcatcacaggtatgctcccatacatcttttgcatttgtactaatatgttatgtttgagtatatatgttgcgttttagttttagttccatatattttagcacatctgtagcacacagcacatatgtgtagatccagagcatagaatataatagtatgaattgagacatagacagtagtgttaattgtaagatgtagtttagtttgatctggagaatgtaacgtacttttagatatttagaggacaatattgtagagaatgtaacttagggcgtagtacagaaatgcgaggttaacgcagttaatgttttcatcaggcacaatgtcaagtaaggtcacatttcagatagttcacggtgaaggaaatattagatttggtccagatggtgttgatctgtcagattttgtaatgacatctaagggcatcgataggcctgcggagagaacatttcagtcaatttatagttggttgttgagaggatttagaatagaccaagaagtctacacaatgtcagtatctgttgtagtgagtcgtgcaatagaaggttatttttgggaactaatgccgatggacagcactgctgcttggagacggtatgtggaaatggcttttgaacggtcatggcccctcgttatatttgtgtcggtacaagagaaagatacaaatgtttcaatgcgaaccgaagatgtggagggtcctagcaatacaggggatgttgttggaccatcgatggaaaatgaggaaaatcaaccaagggaggagcaggccatgggcatggcggatgagggggagagagtcggtataattgttgatgaaatggagagggaagattcggataatgagcaagcggaggacgacgcatcatccgatgaggaaggtgatgtaatggccactgattgggcaaatgaggacttctctggacttgttatatcagagggtgatcatgtaccctgggagtataaggagaacgaggtaattgagggtgcaaggtatgctcataaggatgagatgaaggaggcggtgaagcattgggcagtttccttgcagagagagtttagggtggtcaagtcaacaaattatgtttatgaagtgaggtgcattaaggaagattgtccgtggcgtgttcatgcatttagggtaaaagggaatgatttttggaaagttagcattggtgaccgagcacaagtgctacttacaagggtgggagaagtattaacggaacattactttcaatttttgtggcagttgaaaatttcagcaatggtgttggttaacattggcttttaaccaaaattaattttttcgccccatgggaaccaaattcaagttcacctttagctttgcaaaagcctggtgaagcccaacaaaagaatttttgggaatgagttttggcccattttaaaggttttttaagaaaaattggccccgtttgtttaccccccattgtcccaagggaaaaaattaa

SEQ ID NO: 15552 - DNA, 1881 bp, Oryza sativa
  unsure (1)..(1881): unsure at all n locations
atgtggttttggaancccgtctggaccaactcggactttgctcgttctggtcgcagccgattcggaatttagccgatccttgctctatttccggaatgattttcatcttgaattccaccccgtttctatcttcatctccgatactcagattatcaaatttggttattaaacatggatatattccgacgaaaaaaaaattagcttattattgaatttttttaaatgttgcacgatgttccaccaggtatatcggaattgtttcactaagtagatcgaaaatgtttcactcgtttaaatcgggcgttgtttcaccttatatgaaaacaatgtttcagcaaatagcgaaagaatgtttcagttcgctgcaacattatatctatacatagtaaaacactgtgagtactctaggtgaaacatttttcggtggaacaaaaaataaaaaaaattccttaaaatagcttagcttagctagcttgctcgtgcagccgagcggcgccggcaatttctcaccggaccatcgcttggcctcgaagcatctttgtacccaagtgataagctagacgcgctggagtgctggaccgtgtgggcgccctgccgtgccgtgatcgcgttgccgatcgcgagcggcaatctttgacccccgcgaccgcgtacctgtcgtcccccggcgtacgcgcagtatccactatccagcagcacgagcgcgcgcaacacacaagtcacaatcgtttgctggatggagcagcggtccaacgactggccgctggtttgttggtcccgtcagttgcgattcgtttggacgccgtcagcaatgattgccttgctagcagctgcttgattgccaggtaatagcggagacagcaatactctactagtagagtagcactactagttaatgacgtaatgaccaagtactcgtgcacgcacgacgtgtatgcatgtaccgacgtacgctacattccgtgcagtttctttacaccgagtaacttatttactgcacacgccaacatacatcagggctgacatttccaagcgtctctccgctatatgaacgcggatgcacacacaagggaacgcctcttgctctccacaaactttccatcaccacctttcgggcgttaaccaaacgcatcgttcgttcgtctctctctcgctcggcccgcgttcggttgcttgtcacgactcgaaagcctcaacgacaaagaggaggacaaagtaagcgcggctaagcttcgtgcaggcgcgcacgccaagtcgtcttcgccggtggtcaacgtctccaccgatcgatcgagatggcgtcgccggagaggcgatcgtccacgacgacgacgtcgtcgctcctcggcagctttcggacggcggtcaagaaaggtccggttcctgctctccttcagcgcgacgcgggggatcctttccttcatcgtcggctcgcgcgccgggccgcggcgcccggttagcttcggcccgccggcgcggccggctagcctgctcgactacgagggcagcgccattgtgtcgccgccggccaggtcgggggcgccgtcaagaacgcaaccctggggcccgtccccggcgaagaccgttgagccgnacgagcaagggcggcgttcttgaagctgctgaagaacgttaagcgccccggtttttttnttctcggccccccgttggngggggcgaaacacaaattttacggggaaaccaacttgttattggcaacttttaaaaacacatacatataggagcggagggttgttggaacttcggacctgtgcaggaagccatccatggatggattttccgccgtggaggatcgtttttaaaaaattcttgtttttaaagacaaaaaaaaaaaaaggtttgtggtttaagggtgtttcg

SEQ ID NO: 15553 - DNA, 4178 bp, Oryza sativa
  unsure (1)..(4178): unsure at all n locations
tggtgtttttttttccccacacacacatagcacaaatttatttcgggccccaaccggttgcaagcgcacagaatatttttnatagtgtttattaatcataaaaatggaagatgtttttggccctgccctttgctaattcancaagggatgaagccgtgttttaaggtctgttcccttttaaagaaacaagtatccgtttttgagtagcaaaatcctaaataactccactaaggggggattcacttgaaaaggtattatagaatttgggtaataagtgattcgaataaggcccatgaataaccggaaccagtgggctgtgattatttatccgctgttatttatgcactgacacatatgtacaaatatattggcccctaccggttgcaacacacaaacatcttttcaagtctttaatattctaaaaattaaagatgtttttggcttgtactttggctaagtcatcagtgtatgagtcggtttttaagtctgttcccttttagaaatacagatatgtatctgagtcatttttggaaatacaaaagaagtcatataagaaatctttttaaaaaatttgtatgctaacttgaaatgatcgaactcctaattgtagctcatgattttctaaaaaatacatatccaagcgaattccaatagtgcatttcaccttaactaaaccatataaccttaactaaaccatataccaataataagattaaaataaccatcactcgttgcaacacacgggctttttttctagtctctacttacttgaaaaattcaaaatgtttccttcgtccaacaaaaataaaaaagcaaaaaaaaaagtccgattgctcttataaagcgaagaaaaaaaaatagcgtataaccgattctccttaaaaacgaaaaaaagcccgagaaaaaatagcggaaaaaataactaaaaaaagtcggtttcccaaagtggcgaaaaaacaataaaaatctggttttcgtcgtcagtaaaaaaagcaaaaaaaaaaagaacatgctaggaagaaaagtcagaaagaaatgtgccatttctgaaaaatggtttgggaaaaccacacaagaaaaaaacacagtttataaaaagcatgccgctctgaaaaaactattagaaaaaataccgtttataaaaaaccgggttgaaaaaacaatcggatttaacatgagaaaaaatcgttgtttctaaaaacggtttgagaaatactgtctgacttaacaagagaaaaaaaccatcatttctaaacaaaggttagagaaaactgtccgactcaacgcgagaaaaaaaaactgccgtttataataagaaccgctccgaaaaaccgtccgaatcaacgcgagataaaattgatggacgcttgggttggataggatccatcaattttttttccatttcctatacgacttttgtttcctcatctattctattctcatgtattggagaccctgcacgtctctgtatgcaattactagactatttgtttttgttaagtatagctactattcttgataacatttgatatggaaataatattaaaatataaacatattttaaattgttatttagataagagtgcacaatgactctattttgtgtagacttgaccatgcgaggcagtgtaggatttgattgatcctattattggttgcaagaatgagattaaaagagtattttagattatatgcatgttgtcatatgaataatccaattattttaggtaaattaagctttggtaaggttgccatcgtcgaggttggaccattacattgaagatgttccaagtttctgattatcttagctataaatgatccatacaaacattgtcattgaaatagttatgcatagaaaacgtatattatgattatatttttttttcaccgattgcaatgcacggacattttcgctagttattataaaagttcaaggtgtttttgtctcaaatcttcgtacgccgtccgaatttttttcgtcgtcgcgtcggcttagttcccgcatgtcactcagagatgcacacacgctattccacacatgtgatagaggaaagaattttttttatttataattttttttattaaaagttttacaaaaataattttccattttgaaaattgacggaattagtcgcctaccgccctctgggagggcgatttttaaaaatcgccctcccagagggcggcgaaaatgacgtggcagccggccgttcgctctcgggcgacggccgtcaacgaaatttgcaggcggcccccttgccgccctccgctagggcgattttatactgtgcggggggccgcctgcaaatgggcggcgagggggggcatggaattttgcaggcggcccccttgccgccctccgctagggcgattttctactgtggggggggccgcctgcaaatgggcggcgagggggcatggaattttgcaggcggcccccttgccgccctgggggagggcgattttgtactgtgctctatatttttttataaatatcaatagttatcaaatctttttatattgaaaactatacaagattaaaatctccaagactggtaaaatacaattttattattttttagggcatatttggattgttaccgtacaaatattttgttagtgccaaaatataagcaagttttggcactaccaaatatttggtaaggtaaaattgcatttgatcatatttggtttgctgccaaaatgtaaaattgtagtgaagaatgttctacataatctcaaatctagattacgtattaccaatgaataggcttccattttcgtgtgtggtgtgctagtgggaaagaagatatgaagaggttgccttcagattgtcaattatatagcgtcgttttcactgcaatatatgtgaactcaatgagatacattattcattagatgtgacaagacgatcacgcgtgggcgtgattcactttatgtcaacaggcagcgccgaaagttgatagtgataactcgagctgccgcttttcatgtgtgctgttgtggactgtgcgcgctactggatatggcactaccgtgaagcgccgaaagtgtgttgttgtgagcataagttgttcaagcaccatatgaatgaaaagaactacgtagacgagacaaacacaagtagtactgcagtagtaatagcaaaagtagtactgctttacaagtttgtaagccaaaagaaacggtcacataaggactgaagaggtagaacactactgccgaggcctcttacccctgtccctcctaccctgcgccctaatgtgcccctgggagtacgtgagtcggtccgggggtacggcacggccaacccgtcctgcctgtacaggtgtgacctctggctgctcctgagtgtgcgcctctggagctcctccaagctgagaggagcctagtacgtcctggtggtctgcaccgtgcaagtcgtcgtcgtagaactggctagtaggaccagtcctaccggcgtgagacgaagaggccccagtaccgaagatcccggctacatatcctgctggacaaggaccatcagtttcgtacaagtatttaacagtagtaataaaaagtaaagtaccgtgtgggcgagggatcgacgctccgtgagaggaagagctggcgaacgcgcccgaagaggtggcgaacgcccctgcggagctcgcggaagcgccggtcgtgcctgcgaacgcgctcgaaggcagacgaggtcctgcgatgaggaaacgtgcagttaaaacatggtgatatattcgtgcaaaagctgaaacaaaaatgaactaatatctgggctgaactgtaccgtgcgaaaccggtgctgtaggtcgcactgctccgaagctaggggcgctcgaaggcaaacgaggtcctgctccgacggtaggcgcgcgaggccgtgggtgtaccggaccagctggaggtacgacgtccatggcgctgcgacaggagaagacgcgcatgaccgcacgcatcttctcctgcatccgggcgaaggtcaccctctgctcaacgtcagtcaagtgcaaacctctgttcaacctcacctggactgcggtgatatcggcactgatatcccgtgtggcatcagcctatgcaagatggaaataaaaaattcagtagttgtcctatattatgcaagataaatgaaataattgttggaagtaatacaaattggacgtaccgccacgaag

SEQ ID NO: 15554 - DNA, 3238 bp, Oryza sativa
  unsure (1)..(3238): unsure at all n locations
aacgcaaaagattaccggttttcatcccaccgttttttgggttaggttgtgccgccnccgccttaacaagctacaaaaatggtaaaaggccttccgcacccaccctgttaaaacaaatttccaaccataggtccacccaaaacaaagttgagttaaaatttgaacatacgcgtaccaaggaacgtaacggggttcgacacgcaaacactcgcgcgacgtgcgtggacgaaagttccaagctgtgcaccctcgactgctgacaggaacgagcggtgtttcctgtcaatcccacggttcaacagcgccggtgtgtcgtacgccatacctgcatcaaataggttgatcagaaacatataaataattagttcaacataagtaataaatgttcataagcgaattactaacacatattaaacaagagtacaaacaaacaaaagtgtttagtccgaacactcatcacgataacattatgatacaacaccgaatagttcgcaatactactagtacaacaatagtctgaggtactcattacaacaacattgaattgaaattacacgatagaagtatttagtccgaacactcattacatcacaacagcattttatttcctaaatcgaaagcattgttacaccatggaatcgcctgctgcgcgacgacgccttggccttgcgcgcgtgcttgttgttccttcaccaggtggtcgcctaccatcacttgcctgtccagatggactagcatcagcgccgcttggaacttctgcattcttcgggcatttcttgtaagtatggccgcgcagatcacacttgctgcagcgtaaagtcctcccacctgcttctgactcatccatatcatttctgatgcgtctagtttggcgtcgaccctttttcacccttaacttagatggatctggaatataaaaaacttgggcactcagcgttgtgtaagatcctgagatcccgaacccatatatctcctcactccatgtatgaaagattgcttctttccttaaataatttgagacgtacacattgggagatatgccacaatcaccggcagcagcaagaacgtgtgagcaaggaaggtgatgaagcttcggcttcatacaactgcaggtacatccaccatccgccttcaagacacattcctgcacggcttgcttgcgatagataccacgcctgctcctatcaacacacattatttcataccgatgcacttgtgtgccttgagcaacaactctatgtctccgtgcctttttgattttatcttccatgtactttgtcactacgttgccaaacactatgttgttatcggccatggacggaccaattttcttgtatcgatccctaaagtaggcttgcgtgccgtgaaggatgaattcaacaatagcaaccaatggaagtacccgaactcctcgcattacccagttgtacacctctgccaaattggttgtcattatgccataccgagatccatcggtgtcgaacaatagagaccacttctccttaggctcattctcaatccactgagtgaaatttctgatggacgaccctgacctccttctcattgttggtgggtcatcatgtaatgcaccaagaggtatgggaggctcgtcaccttcaacttgtggtctgcgagattgctcatctgtttgcttcgttgtcaactcatccaacttgtcccacaactcattaaatttcttctcttggttctgtgcacagagcctcttaaagagctccataagatgcttgttcttgaattgcttgtagaaatttgcacccatgtgacgcatgcaccaccgactccgaacatcaggccacttagctggaagtcccttctcatcccaaccgttctgcaagtagtcaatagcccgcaacatacccgcatgacgatcatgtataaggcaaacgttgggcctcatacgcaccactgcaatgtgcactctctctaggaaccagtaccagctttcagtgttctcactctctacaaatgcaaaagccataggtagaacctgattgttcccatcacacccaattgctgtcaatatctgacctcggtatttacctgtcataaaagttccatctatgcatagaacaggtcgacaatgcacaaaagcattgatgcaagcacccaatgagaaaaaggctctttgcagcacactctttgttcgatcatcaaccgatgtaaatgtatgtaggtcatagtaagtattattattcctctgggcaatggtggctaacaaacgaggcaaattatcataagaagcttcaaatgtgccatacctcatctcaatgatcttttgtttggctctccaggcctttgcatagcttatggtgtacttgaatttgttctcgatgtgcgtaataattgattttggttcaaagccaatgttaccaacaacactgctgtacatctcacttgccacaaaaaatgaagtgatgtttcggtgatacttctccaccccttgtaagtagcacttgtgctcggtcacaatgctaactttccaataatcattccatttacccttatatgcatggacacgccacggacaatcttccttcatgcacctcacttcatacacataatttgttgacttgaccaccctaaactctctctgcaaggaaactgcccaatgcttcaccgcctccttcatctcatccttatgagcataccttgcaccctcaattacctcgttctccttatactcccagggtacatgatcaccctctgatataacaagtccagagaagtcctcatttgcccaatcagtggccattacatcaccttcctcatcggatgatgcgtcgtcctccgcttgctcattatccgaatcttccctctccatttcatcaacaattataccgactctctccccctcatccgccatgcccatggcctgctcctcccttggttgattttcctcattttccatcgatggtccaacaacatcccctgtattgctaggaccctccacatcttcggttcgcattgaaacatttgtatctttctcttgtaccgacacaaatataacgaggggccatgaccgttcaaaagccatttccacataccgtctccaagcagcagtgctgtccatcggcattagttcccaaaaataaccttctattgcacgactcactacaacagatactgacattgtgtagacttcttggtctattctaaatcctctcaacaccaactataaattgactgaaatgntcttttccgaggcctatcgatgccc

SEQ ID NO: 15555 - DNA, 2879 bp, Oryza sativa
  unsure (1)..(2879): unsure at all n locations
accacctggtgaaggaacaacaagcacgcgcgcaaggccaaggcgtcgtcgcgcagcaggcgattccatggtgtaacaatgctttcgatttaggaaataaaatgctgttgtgatgtaatgagtgttcggactaaatacttctatcgtgtaatttcaattcaatgttgttgtaatgagtacctcagactattgttgtactagtagtattgcgaactattcggtgttgtatcataatgttatcgtgatgagtgttcggactaaacacttttgtttgtttgtactcttgtttaatatgtgttagtaattcgcttatgaacatttattacttatgttgaactaattatttatatgtttctgatcaacctatttgatgcaggtatggcgtacgacacaccggcgctgttgaaccgtgggattgacaggaaccaccgctcgttcctgtcagcagtcgagggtgcacagctcggcaccttccgtccacgcacgtcgcgcgagtggttgcgtgtcgacccccgtcacgttccttggtacgcgtatgttcacatttcaactcaactttgctttgtgttgtacttatgtttgaagtttgctctatacaggttgcgtgcggcagtccttctaccactttgtaggcttgttgaggcggcggcggacgaccgtgacccagcgaagcggtgggatgcagaccggtcactccttgccgctcttgtagaccgctggagacttgagacgcacacgttccaccttccctgtggggagatggctccgacactgcaggacgtgtcgtacctgctcgggctaccgctggcgggagcaccagttggtcccgtggacggtgtttttgggtggaaggaggatatcactgcgcgcttcgagcaggtgatgcgccttccacacctaggaccggccaacacccttcctccgtactctacagtcgggcctagcaaggcttggttgctccagttcactgtaagtaaataagttgttattatcatacatgcttatttgcaccggatgagtgttttgtactaacatttcattcttaattgtaggcggaccgtctgcaccctgacgctgacgattactcggtccgacgctcccttgaggcgtacctgttgtggttgttcgggtgggtgatgttcactagcacccacgggcacgctgtggacttccggctggtccactacgcacggtccatcgcggatgctcagccacaggacgtgccacagtggagctggggttctgccgtgctagcagccacgtaccgtgccctctgtgaggcgtgcacgaagactgacgcgggagcgatcatcgctggctgccctatgttgcttcagctttgggcagccgagaggtttgccatagggcgaccagtggtggacagcgcaccctacggggttggtcgcagcgcgcagtggccagaggacggtcccacgatggggacttactggtgtcgacgtggggttagtgcaacttcgctgcgttataagtttatcagtcgtcttctttttttttccttcacataacatgtctaattccgatcatgtttattgcagcgtcgttacgctcacgtccaggtgagacgtggttacccggacttcgtgttcgagtttgaccgtctccagccgagcgacgtcatctgggagccgtacacagaagaggccgttgctgcgagagcaccgctaggactttcgtccttgtgcacacgcgaccaggcttactggctcaccatcctgccgatggtgttcgacattttcgttgagcctcactgcccgcagcgtgtgatgagacagttcggacttaggcaggtgtttccgggcaacgtgcagccgaccgtcccccctgccgaccactcgtgagttcggattgttcatttctaaatttttatgataattacatcatcgagccatataatttacctctcttcacaggttgactcgacggggacagctagcaggcgcactttgggctccacgtgtacagcagtacgttgacgactgggtgttagctacagaggaggtgatcaacgagctcttcccatacacggagaagaactaccgtgactaccttcgctggtaccttcctcgcactcgtgcgcgtgtgaccttcactccagacgccccagagccgcacgttgccgctgtcacggacgcgtatcccacgcaccgtgaccgagactacttcgtggcggtacgtccaatttgtattacttccaacaattatttcatttatcttgcataatataggacaactactgaattttttatttccatcttgcataggctgatgccacacgggatatcagtgccgatatcaccgcagtccaggtgaggttgaacagaggtttgcacttgactgacgttgagcagagggtgaccttcgcccggatgcaggagaagatgcgtgcggtcatgcgcgnttctnctgncnnanccctttggcgtcgtaccttcagtgggnncgnncacccacaggcttctcgcctaccggcgtgcaggaccatctttgcttagacattcgtagtttngagcagngcgacctacagaccgggtttggacggacaagtcagtccacatttaggtatttttggttaaggttttgtcgaaatattaacaggtttaactgcacggttcctattggaagaactcgtttgctttgagcgcggtcgcaagaacaaccgcgctttcggaggttcctagggacgttgccaactctttgggcgcggtggcaggttttttttttaggagacgtgattccttggccacacgggccttaactttttttctaccggtaaaacttggccaaaatgatagggcccccctttttgtttgttttcctaaacaaaccccccaaaaaggggtggggtataaaaatatttt

SEQ ID NO: 15556 - DNA, 22254 bp, Oryza sativa
  unsure (1)..(22254): unsure at all n locations
atgtgtgtgtgcacccgcgttcatataacggagagtcgcttgtaaatgtcagccctgatgtatgttggcgtgtgcagtaaataagttactcggtgtaaagaaactgcacggaatgtaccgtacgtcggtacatgcatacacgtcgtgcgtgcacgagtacttggtcattacgtcataaaacagtaatgctactttactagtagaggattggtggctccgctattacctggcaatcaaacagctgctagcaaggcaatcattgctgacggcgtccaaacgaatcgcaactgacgggaccaacaaaccagcggccagtcgttggaccgctgctccatccagcaaacgattgtgacttgtgtgttgcgcgcgctcgtgctgctggatagtggatactgcgcgtacgccgggggacgacaggtacgcggtcgcgggggtcaaagattgccgctcgcgatcggcaacgcgatcacggcacggcagggcgcccacacggtccagcactccagcgcgtctagcttatcacttgggtacaaagatgcttcgaggccaagcgatggtccggtgagaaattgccggcgccgctcggctgcacgagcaagctagctaagctaagctattttaaacgtttcacttttactcagtcgtcagctactgcagtgctaccattttattaaaccttaacaccagtaccttttttttaaaaaaaagataaaccttgcctagaattctaaagttttgaattaaagaatgtcgcatgatctatatgatattgttccattttcgttaaccactactctattataagtcgttttgatattcttttgattaatcttttttagtttaactaaatttatagaaaaatatagcattgtttttaacacaaaacaaacgtattattaaaatatatttaatgttgcatttaacaaaaactaatttggtgttgtgatgttgtcattttttctataaaattagtgaaatataaaaacgtttgactagaaaaatagtcaaagtgacttataatatgaaatggaagaagtaactcgcaatgaaaaaataataaacaataaaaaagttatttataggtaaaacttttaatatatgtgctggtttaaaagttaatattgaaaaataaaactatgattaaataactctaattattttaaaattaagttttttaaattacatttgggcagcagatcaaaatgataagctaatgagcaagtgatgagtgtgtatggtaataaatactccctccgtaagtcgtttaggacaatgtataagtcaaactttgggaatataaatcatgaataactctcaagttagttgttgagtttgaaaatgtaacttacaattctacatactgttgcttgtccatgagcacaacgtgtcttatgttaatcgggaaaaagacgtgtcttatgtatgttgccgtggaaccagtaaaaatcagcttgttctcctcggatcttaatcaaagaatgggtttacaattcataagttagcatcaattatctgctaaccttaataattaattctgaattatggaatattataacgaagtgtgtgagaattagtgtcgaacacgtcaacttaatcatgtactagagtagaattgtagatcaatcaaggtgcgtgcagctctgaattagttaggtcagactgacagattgacatatatatatagactcccgttttttcctccttgagaagttgagataatcggatatgcacagtaaccagttggccacgtgatagtaaaattgctcttttttggctccagagttgactgatgtttgttctttcgccacactctctttttcttttctttttttttttgcggggaaccggagaactttatcgatcaactaaaagtaggattacaatggcaagccaacagctcagaaacacactccggagcttgctcacgccaaaccatagactgtttcgttctcctagctagctgagcgagaccatgcgccaccgcatttgcctctctgcagattacctcaacgcggaaagaaggaacaatggggatagcagaccgaacctccctcaacacgagccagagacgggatctgtcgttttcattcagtgctatagaataagcaacatttgcgcagtccgtttcaagaatcaatggctgtgtttagttggatcgaaagtttaaattttggttgaaattggaaataatgtgactgaaaagttgtgtatgtgacaggttaatgtgatgaaaaaggagtgaagtttggatttaaacacagccattggttgtttcacggattgcggcggcccgccccgcgtcccgcactgtccgcatagaagtttgaggcatcttcccacaagtatacccgctgggcacctcgtgggtttccgccagaacccgcagtcagcccacatatccacgcgtgcgcagttaaggccgaaaaggcttaagggtgagtttaagaaaaaggagattgggaagatgcgcaaaacgaggtgagtcattagtgtatgattaattaagtattaactattttaaattttaaaaatggattaatatgattttttaaaacaacttttctatagaatttttttgcaaaatacacaccgtttagtagtttgggaagcgtgcgcgcggagacgagttgttttctcaccctatctcacaccaacgaagtgtgaatgcattgatgcaagctctgccgctggaagcaggtgctgcagctagcactgatgaactgctaaatatcacagcgtttgttgacatgcgtgttagcggagcagtcacacaatcaacgaaatcggccgacactgtgccacacacaggacgacaccactatcaacgaaatcggctgtatcgaattgcaacttgtttctctatatgatgtccttgaatgcaagagctcgaccgtcactccgtttccgctagcactggaactctggaaggttgccgtcttcctagtgctgtcaagtgttcgatgtagttcttgatcgcctcagtgagattccatccacggtatatactatttcacgttgcccattcattccatttttgtgcttggtatcgctgatgaaggttatgcaaacttagccggtctaccggtatcatcttcttgctttccggggtgacatgctccaggtagggattttatgtttccttcggcttggtgctcgtctagctgaacaatccgcgtcacatcgtgtcccatgatctacagaccaaaatccctcaatccccaagttgaatcgagcaaaaatacatacgtggatgatgatgtttcttctaagtagctacctgctatggctggccgccatggccatgggttgatgcagctgtcgtttcaaaaatgtttctagcaatgaatgttgcaaaagccaatgaggacggtttgcgcggtagctgcgatgaagcaggaaggacgatggcgctctcggcgagggcaagcgttccgcctagcgtcgcggggcgggtgacggcgccgctgggcaaagcgggtcgcccgcatcaaccaacctctttgaaagcgggttagcatatgtgggtcagtgggctagtggggcgggccaacccagcgggttagcggcacagcccgccccacttatacccttagtactttcacccattctgccaccagccggattccatctatacacgcaagagcttctgcctgactgcctcttctgcggactggcagttcctgattatattccaagaagaatccaagaagaaaggatcacaaaagcccgttcctgacgataatgcccgttcctgcttcccctgtcgcaggcaaaagcaccatcaatattcacttttgcaacactctgaatgacaatcggccgtaaaagccacgtgtcatacacatgtatctccactgtttggaaaagatcactttacatccctcatctaatggttcagtttcaattacgtctcttaacggcaaaaccagtgtaaatataattctaagaatatattgagactgattttaactaacgtgacggtgagacttcttcttctaccctccttccctcttctcttcttcctcatgtttcttccctaatcaccatctctctcaaccagttatctcatggtggcgcccggcggaagaggcccttgccgctcatcttgccggcggaataggacccacatgttagtgagtacaataataaaaataaatatcggccccatgtgtcagctaccctttctcctccctctttaccctttctctctcaggtggatagcgccgacaggccgtggatggacaccgcggcagcgggacaaagcacgatggtcacgccacccctcccccccccccggtctccccgacagccgtcgccgcagctgacatagatgggtttgcctgtgtggcctccgcctcgtcccttaagatcccctcctcccccttcttggatgacgccccgccgtcctcccaactactctacgtgctcgagtcaggatgtcataggagatagacgagggtgtcggccgtcaccatgccgacgagctcctcctcacgtgcggtgcagccggctggctgccaagctcctccctcgtgatgatggaaggtgagagaagaggaagagataaaagagagagtggggagaggtgagggagagagaatatggcatgaggtggaggccattgataaagtgggtcccatttgatgactcagcaagtcagctgccacgtcggacgaaactgcttggggatttgcaatggttttgggagttaggggacaggttatacccggttctacggttgagggatgcgattcaaaaggggcatgaattgagggaggtaaaatagacatataaaaaacaagtgagaagattcgagctcattgtttcatgcgcaggcctaaactcgacccatagtaaaccaagtgagacccaaacacatttaactctaggccacattgctgccagcattgcagcccaaaccaaaatgtgtgtggatcaatgaacctgtcagttcaaaaataaagagaagcaacgagcatgcttctccttccgacaggatctccgtaattgattcatataatgaccctaaattttaaaaccagatatccaatccataaaatttataatactgtttatattgcctctaaagtggttttggaccttagttgtacgaattttaaagtttaatcgggcgattttgaaaatactaacatagtatacttacatatcataatcattggcccttacatatcataaagtttagtactctgtagtgatgttatatgctagtattctttatataagtgtgagataaggggataaaacggacatttaagtgaagatttaacatgtactatgttcaatgtgcatatcacatagtaaaactcatccaacatatatgcaaccaacattgtatgcaaaatatatagacattttgtaaaatcaccataaaggattacagaaacgatattataaagtttaggtgttatatgtccggttttaaaattcaaggtgtttgttgaacttttatctaaagtttagggttatatcatggactttttccatcgaacaacgaaaatgtgtgtcaaggcaatattactgtgcgcgtggaactatagcacggtcaatctcaaaactacctctgattggacggctgagattcaagcaatatccctcgtgttcccactcccttcctcctgtcctgcctgccgaattcggaaaagaaaaattaaccacactatagggtatatgacagtgctcagttccctttaaacttctaaaaattccaccacatcaaatatttaaagttttggacacatacataaagcattaaatgtggacgaaaaaaaaccaactacacagtttacatgtaaattgcgagacgaatattttgagtccatgatttgacaatgtgatgctatagtaaacatttgctaatgataaattaattaggcttaataaattcgtctcgcagttcagaggcggaatctgtaatttgttttgttattagtttacgtttaatatttcaaatatgtgtttgtatacttaaaaaaaattggtaaacgaaataaacccggccatagaaaggaaaaaccaaagtgggttggtagccatgtgaaagtctgagcgacgccacaccccagttcggacggacacgatttgccaataccacccccccaaatatccgacggctacgaccagcttcccaccagcaccgtaccaaccaactaccacagcaacgcccgcgagcaagtccaaactgcagaaagttgtcgtcaaactcgtcacccacatcgaccggagccggccgcctcaacgcactcacaagtcacaaaccggcacgcacaccacaccaacccgagaccggctagaccgcgctactggacgcatagccccaaggaggccacaggaccgtggatgcttcgacttcccacgcacgcacgcacgcacggttggtgaggaccaggctgaccgagggcggtgtcgcgcgtcggcgcgtgtgtgtggtccggtgtggggggattggtggtgccgtggtggtagtagctcggctccagatgctcggtcaaacggccaccaaccataactccattttggactggtcccgtttaatggaagtatggaaccgggcaaacgacgcagagcaggggcgtttcgcttcgcacatgatactactacactatgcacgcatggaacgcgtggttggcatttggcaatgcgtacagcgtagtgaggagtgacccggtgagcactcagccactgtgcactgaaccgttcaggtggtttttttttttttgcttgtaagaacacgttcgtgtggatttagttagcaaagggtgtgttgagttccacgccaaaattagaagtttgaagaaattgtgatgatgtgacggaaaagttgaaagtttttgtgtttagaaaagttcggtgtgatagaaaagttgaaagtttgaagaaaaaagttggaatctaaacagggccaaagtgtactgcacagatggtttcttgactgtagtagttttttgtttttttgggtatatttagttcacaccaaaattgaaagtttggttgaaattagaacgatgtgacagaaaagttagaaatttatgtgtgtaggaaagttttgatgtgatggaaaagttgaaagtttgaaggaaaagttttgaactaaactcagcctttgttgagcttatcaagccccatcgtctcatcggttggtgaagagctctgattacaagccaaaacgatttattagcgcacaagaaataatttgtaggtaattgtattatatatgtcgttagcgatttaaaaacaaattaaattattttaaaaattaaaatttttgcaataaataattctttttatggcaaatgatgaggttctatatgagaatatctgatttacgtggaaccatactattttcatgaaaatccacacataggtccaatgatttttcttccaaaaataagtctttaggcgatgcttcacttggcctagttttttagtgatgtgatcaggttttgtattatactacctccatcccatattgcttgtcgctttaagttttattttaatgtttaatcattcgtcttattcaaaatattttgaaattattatttattttgtttgtgacttgttttatgatcaaaagtattacttatcatgttttatatttgcactagtttttaaaataaaacgaatggtcaaacgttgcaagaaaaagtcaaagcgacatctattatagaacggagttagtaacctctttccatctggactcaagcttgctaatggataaagtgcatgacataaatgggtactcaagcttgctaacggagtgcttctttgtttctaaatatgtattgtgtggatgtgctaaatctaaagaagattttattgagaaaaaacaatagttaccagcctattgaatgacacacaatgtggtacagggacgcgtagagtggatgagcattggagtggagtagatgtggacctgtttagcaggactactccatctaaaaaagaacagagaggattaaaatgatgtaaaacaaataaattaaagaggtgaagcggtgttgggttacttcataatttcacttcagacttcgctcttagagttatttataggagtgaaaatcctaccatgttgaatccaaattgattttacatcttccttttaagaattaagtttagataaatattttacttgtgttattagcaatcataaaaacagacccaacagccaagcactgaaacctacgaaggtaatccctaaacttaaccataaaattgaataccaaaatctaaaatcagatccttttttttctttggcgagtacaagtagattctgattcacaagctgagcaaaagatgcgttcacgctcaggtgcacgttttgtacagtgtgaaatgtattgttcatgttgcccaattgctggattagtttagagtaaataaaattcttaatttaacttagccactgtcctagcacagcagcgaccactctctttggacatggaccggcgatctggggtgtgttgggaatcctgttcctaatactaagtgctcgcacggaaaacgtagtagcgattagcgagtaattaattaagtatttactatttttttaaaaaaaatagattaatttaatttttaaataactttcgtatacaaactttttataaaaatacaccatttaattaattgaaaagtgtgtgtgtaaaataaggaagatgggttgggaagaaggaccggtgatctggtcttcgtcctcctcaagaagtcaaaaacacaaccattccgagctcccccaccaaacaccatttgcctccactataaatccgagctctccagctgcttccactcctcaggaatcggtagttgtcatcacgcgcacttccattccgctcacctacccaccggagaagaggtagtcgccgccgccgccgctgtcgccgtcgccggagaagaagaatgggttcgttgccggagcagttcgtcttccgctcgaggctccccgacatcgccatcccggaccaccttccgctgcacgactacgtgttcgagcgcctcgccgaccgccgcgaccgggcatgccttatcgatggcgccacgggggagacgctctcgttcggcgacgtcgacgcgctgtcgcgccgcgtggcggctgggttgagctcgattggtgtttgccatggtagtaccgtgatgctgctgctgccgaactccgtcgagttcgcggtggcgttcctcgcgtcgtcacggctcggggcggtcaccaccacggccaacccgctgcacaccccgccggagatcgccaagcaggtggcggcgtccggcgcgacggtggtggtcaccgagccggcgttcgtcgccaaggtgagcggcctcgcgggcgtgaccgtcgtcgccaccgggggcggcgccgagaggtgcgcgtcgttcgcgggcctcgccgccgccgacggctcggcgctgccggaggtcgccatcgacgtcgccaacgacgccgtggcgctgccctactcgtcgggcacgacggggctccccaagggggtgatgctgtcgcaccgcgggctggtgaccagcgtggcgcagctcgtcgacggcgagaacccgaacctccacctccgggaggacgacgtggtgctctgcgtgctccccatgttccacgtctactccctccactccatcctcctctgcgggatgcgcgccggcgccgccatcgtggtcatgaagcggttcgacaccgtcaagatgctgcagctggtggagcgccacggcgtcaccatcgcgccgctcgtccctcccatcgtcgtcgagatggccaagagcgacgccctcgaccgccacgacctctcctccatccgcatggtcatctccggcgccgcccccatgggcaaggagcttcaggacatcgtccacgccaagctccccaacgccgtcctcggacaggtataacccaaactagacgaacacaaggaccaaatcaaacaataaaaacaacaacaacatccaagtggaaatttgatgtgaatttgatcgagcaggggtacgggatgacggaggcagggccggtgctatcaatgtgcatggcgttcgcgaaggagccgacgccggtgaagtccggcgcgtgcggcacggtggtgcggaacgccgagctgaagatcgtcgacccggacaccggcttgtcactcccgcgcaaccagccgggggagatttgcatcaggggaaaacaaatcatgaaaggtacacacactgcccaaattcattcacaattttttgagtttactttcattcgaaaaaaaacggagcaaattttgactgggtcgaagctgactcgtcgccggttcttggcgcgttgcgtgtgcgtacgtgcaggatacctgaacaacccggaggcgaccgagaagacgatcgacaaggacgggtggctgcacactggcgacatcggcttcgtcgacgacgacgacgagatcttcatcgtggaccggctcaaggagctcatcaagtacaagggcttccaggtcgcccccgccgagctcgaggccatgctcatcgcccacgccgccgtcgccgacgccgccgtcgtcccgtaagtatccggactccggcatgatcaacctcgccacgcgcgcatttggcattcgcaatttcaggctctgaacatcggcttgacgactgaatggctgaatttttctcaacgatgcagaatgaaggacgattcctgcggcgagatcccagtggcgttcgtcgtcgcacgcgacggctcggggatcaccgacgacgagatcaagcagtacgtcgcaaagcaggtgagagatcatgatcgatcaagaatattggttctgcaaactaattattaaccttagcatcgaggtgaactgaacgctgggtttatctctgaataatcaggtggtgttctacaagaggctgcacaagatcttcttcgtggacgcaatcccgaaggcgccgtcgggaaagattttgaggaaggatctgagagcaaagttggctgctggaattccggcgtgctgatgaaactggcatgagctagcttgcctgagatatccagctattgtttggtttttgttttgatcatacttaaaaagatatagtgaaatgtaaacatgatgtagtcagcaatgtaaaaggaacacgccctctggatatacatgaaagtttgagaggtgatctcatcggtcatcagtaacacaaatttgtcgcaaagatttttattttttgttgttgcacccgtgtaaaagtgaattgatgccattttatttgttggagaattgagacttgagagtactattacattcagtagaacagttacaaaattactgaattgcatacagcctgacagaagattattcttcctagttggaactgtaggattaatacgttgtggtagaggaaaatgtgcagtacctgagccaaatgaacaggactggcttgctctatgtacaaaccaggatggaagggtaactggttagttaatttaaacaattaaaagaaaacgaactccaataatgaaaggcgttgatggtgaagtaggtcagccgcctgaatgacatgctggtaatgttgtaaattgcccatctttgaaagcatgaatgaactgctggggtaaggaatgctcggcctgaaaatattaaaaagagatgactcagcctcacattgtttgcctttcactttataagccgtcgccaaaatttgaattcaaaacttaattttcgaattttgctaaggacacggatataatttttctactcacaaattatatttttgttgnnnnnnnnnnnnnnnnnnnnttatcagctacaggcagaattggcacgcattatggtacaatatgaagacaaaaattccacatttctagaaatccaacttttcaagtgtcaagtaaagtggttgaccttggctcaattggtaggatattgtgggtgtacctccccataggttaagactgagtggctctgatttgggtacctttctacgattcttttcttaaggagaaaaagttcctgctttctttctctaagactaagtacagtataattattattatgcagaaagagagaaaataaggtttagaaaccttgaatcttgagagtcatgaaacgaataataaaaccaaaaatatataaatagctacttatacttgcttcacacgatctaactatagtccaaatttaaatagaagagaatcaaatggtgaatgaaaagaatttagagaagtactcacccaatcgccgtcgctgtttgcatctggaacaagagcattgatttcactagatttagcagttgttatagatgtctctaaagattccttgcttaaataaagttggcagccagaagtgttatcaatcgatatagttggtacagagccctgcataattaagtaaattacatatgaggctattttcatcgatgagaccaaatccaaactactccattcaacaaaatattggatatcaagaaagcagatctcatctacctcacattggacctctatactgttgcagttcacaatttcacaagcagcgacaacaccctgaattatatgaagagaattagtaaagaaatcaatatgcattagagatgctttactttttttgaaatataccttgaacaataatcccattttgctacacttatcaatagttatgttgttcacttttcctgcaaaacaatacagagaagcatgcttaatcagttcgtgtcaacaataatgcatctcatgtaagttctttaagtagattgacgccgaaatacctttgacctgtagcacagaatccttgcatccaaatacatatatggattgcttggtatcacaatcttcaattactaagttcttgttgccaacatgatgttcaacaatccatctgatagacaatggcgtaaatgatgtgagattactttcattcattttgatatttctggacacaataattcaaaaagggaaactgcagttacttgcgacccatttggagctccaatttagaaggtaatttggttgaactagaggagggtttcttatgagcttcttttccttcagcagctacaacaccagttctatccgttctattcttgctcttcatgtcagctgtcaccgtcctaagacctgtagaagatgaagcactactcatcacatagagtacataaattgagaatgaaaaatgtggtcactgaaatccaacacgaaaatgtattgaccttgtgtcattgatttcccagagctgatttcagcgaagactgcggacattccggtttttggttgtgatgattgagctgaagaactgaaaagagatgcagaaggagggcagggagcagaaggtgctttgcttgttgaactcccaggaggttgccacacagggcccaaagggtagaatgtcttcacatagtcacgcaaactaggcacgaagagctcttttagagcttttgcccactctacatgatcagggtccttgcttttgtactccacaagcacctgaaggtaatttcatttgatattagtaagattaagcctattcaagatttttcgccgggctgaaacacactggacaaccaaggaggaactaactaagaagaaagtgtgagcgtgtcaagagtcgaacatgggaccacgaggttgaagccgcacacccctaccactacactagatattggatcttggctattcaagactttaaaaatgtaattttaatttcccacaataagtaatccgtataaatacgcccgtcatcgattaagtatgaagcaggaatcaatgcacacttgcatagtatcctcatcttttcatcaaaaggttttgtcaatgttttatttctcaagtcttgaacaaaggaagtgcctatgccgtgttactgtaattctgcttttcactctaggaaaaaaataaaaaggactgctcagtttcttggttcttttaaatctctgaacaaaggaaaaatcatgggcattaaccgaatgtctgttcttgatctataatgttgtttcaaactgacatcaatcctcttctttatgttaaaaacagtaatactacaccattgtaatttgcctccaatttgaagcaccttaccgccttaccagaaccagaccacgacgagctgtgtaccgctattttacttcagaacttgtagttgaagttactgaccttattgctgtagaactctgccatttgccaactctcttctacatgagcaataggaaggggcatacctgaaaaaataaatccacaaaccaattagcccccacactatcaaaccacttactgaggaaaaacatcagtttgcaggattgaacttgaacatgtattgtcgcaatggcgcatgcatgtttgaagttttctgactaccaagtacttagcctaccgaaaggttgggactagacactaaccgcaacctttgccggtgtacccaatccacgccagagcggccaggctaccggcggctgctttcagatggttgccatggctcgatcttgtcccctctgccaatgaatttgcctccaatattgtttcattcagaggccccatgaatactgcgatggaatccacggttggcttctgcgtgtcaaagcgatcgaacacattaaacgcaatcaatcacaacaatgccaatgtatcctcaaatgcgtgaacaaataggtgcgaattgcgacgaattcgatgtgaatctgcaatctattaaaagaacgaaagaaagaaatatggcaattttttacacctgagtttgcttggtcctgacaagaaggtccttcccaaccaagaacgccttctccagcaccctggtcacctccgcgacctccgccccgatcttgccggccgccgccgacaccctcccgacggcgccggcgacgagctcgtcgaacgccaggatcgctgggtcatgcgccgacgcgtggtcgacctggccgccgtagccgcctctcgccgtggcaccggcggcgccattgagagcttcgagccgggacaccgcggcctccagcctgcccaccagggcttcgtccatggcgtccgtccgtgcgtgcgtgcgctgcggatcgctaaggcatttgagaagagagaaatggcgaggcgagcgagagaaaatggcggaagttgatccggtgccgggagagccgggcacgtggacatgtgtgcgtacctgagccaacagaagttgcaagcatttctccctgaaaatgcttatcatcgaagaaggaaaaatgggacaccccaacccaaaggagtagtagtggcgtgacaagtgcatgtagcaaatggagtgtttatgcaagtcacatagattcaaaatttaaatggtattttctcttaaactatttatctgaattatgaactaattataccattggatttgttataattaactctttataacaaaatctcatatgacaatattccgatagtttttatgacataatgttattccaatgtttcaataagtgtttactcatgttttattgattcaggtataatgttgcatgtggtctttttatatgcttcagtaaatatattttgtgtttcaaaaaatacaacttgacgtttcaagagtgatataaaattttaacaaaataaagtatttgcaaatatgttgcatcatatatatttttatgttttcctaggtaggacctaatgtttcatgtaatgatggttattgttgcagccaataatttttatatagttattgttgcacgtgatctatttatatgtttcaacaaataattttttttatatttcaaaaattgcatgttaatgttttaagaatgatataaaattttaacaaatcaatatttgcaaatacgttgcatcatattttttttatgtttcagtagttgggacctagtgtttcatgtgacggtggttattgttgcatttagtaatttttataagttacatatatctgaaacattttctaaagtaggttgagttatccgtacaagtgataaaacaaaggttgatttttctaaaacacatatagttgcatggcgttattccgatgtttcaataaatatttttctgacatttcacaagtttatttgtgaatgttgcacgtggtattattggatgttctagtaagtattttctaatatttcactaactcatttataaatgttgcacgtgttgcttgggatgttgcaatgaatattttctgatctttgaataattataactcgttgtttctcgtataatatataaatgtttcaattagtaatataatcatatttataaattttatcagaaatatagctaagtgagaccttattgtaaagatttaattgtaatgaacacaatggtgaaatcggatggtacatcggataagtaatttagaaggaaaaatagtttaaaggtttattggtagagaagatgaatagagagacatgcacgagagtagggtataggcttggagcatagcagcttaactatgatggtttttctttctttcttttttttttttgcatgcagtcaaatagtagtatgtgggtgaacaacgtccgatcctttgctaaatatcggacgtccaatgtgtagcaacctctatttctccccctaagtttttattttgtttccatgtcagcatttcttatgccctgtccccaattgccccttccggaatatcgatttgaattcctgaatttgtcatagttttaaataacaagctataagtagcttttgttatcatatattcggtgttatgagtgtaactagagagtagagattgaagtgacccatatgatatgatagatgggctgatcaaccttgccattgataataaacacccttaccctctcttttttccatggcatgagagaagccaagataacctccgcgttgcaagcctgacatgagagaagtcaagataagctccgcattgcaagccgagttaggataagggctcctttgattcaaaggatcggtataggattttttccataggattcacaatcctatggattatttcctatggaggcctttaattcataggaaatgaaagaaaacattcctaaggattgcatccctttagttcattttcacaggaaaaaaagaaagaggtctgacctctttggaagagaaatcatgtgttttttcctatagcactattaaagggcacatttcatcttttcctgtgttttttattctcacggggttgaagaatcatactactttaattcctacgttttttctattcctatgtttttcctatcctgcgaatcaaagggaccctaaattccagcatatatatttggtggatgatgtagtcgttgtattttttcaacacatgattaattcaaccatcgtgagaacgagctcctattcgatgcttgaattgaagctcctagtagtgcacaagctgtgccacggccttcgagccggccgagtgtatcttagatttgcaatcggcagatcgcctttgagctctcccacggtgtcaagtgtgaactcctcaccgtcgaccgcaagcaccatcacgcgagctttgcttaaaaaaaagtgaggacaaagtatgtagaaaagatttatgttgatttgtgagggcagtttataatctataaaagctgccagatataagtgggcccagcctcggagaggcgggaagttacaaagtggtatcagagccgactctcgcggtttcacgggcacgtgtgtcgcagttgcacaggcatggtgcgcatggctggtgtgaacccggagtggtcacacagcatggcacatgtgctggcactgggtctggggttgatcgacgtccgtcgatctctcttaagggggtgaggatgtgacatcccgactcagggcttaataggattaatagaatactcatatcaacaagttgcaacttctttttcggaagtcgatctctaaagaactctgaggttaagcatgcttagtcaatttagggatgggtgactaattgggaaattctcccgagtgagcatgagtgaggacaagacttatgttggtttgtgagggcagtctatgacctatgaaagctgcaagatgtaaacaagcatgcgcatgagtgagaacaaacaggcccggcctcggagaggtgggacgttatataaaatatcaaaaatccattatattaggggacggagggagtacttaataactaaaactatagttagtcttttaatatcttgcttaataagttaatatgtctttaactaattaaaactatacttatttaattaagaacagagggagtatatgccattcttttatggtaattcttgtaactttaatataaatgtttcatgtgtttgacccatgctcagccattgagtgttatattcttaattgtttgcgtgtaacactaataatattgtgtacatttcgttgtttgctattctgaactatagtctagtaaagtaaaccgattctttgatgtttgttaggcttatgtgtctaactaattgaggatcacacaagaaagggtcgtcattgaacacaagccgaatcggctctccctcgtaagctacctttttcttgtcttttcgtgttatcttatccttaatagcaagattttcttaatggtaccaaacaactaaccttgccaaattaggctaggcttgctctagccttatatccaacaaaaaaaaaactactcaacagcatcccgtacacacgggataactactacaaataaaaatctagcaccttatcctcttatttgtcgcttccccttccctctccctctctctctctgactaccaccctcatgagcacggaggcgacgatggcggctagctgtgcagggtggcgcgttgggtgtggaggacgctcggcccgctctcctttgccagctcaggaactgtcacgccccgagctagtcccgactggaattagcctgtgacgctccaaattaacctgttaatcgataccagtcccaggaaacagtgctggtatcacaggaagatagaatatcacagcaacagaggtctctttattatagagtaggagtacagtcatgttgggctgcggacagatcccgagctcacaactgcattacaaaagggaaacggaagccagggcttggaccaaacaacacaggcgcgacttgggaactaggccgaaaccctaaaactcatcgtaaccggcttgctcctggaagaactcgtcatcagcaggatccgcttcatcttcttcagcaactgggggggttatttatatagagcaagggtgagtacaggagtactcagcaagccaggggaaataagtgtttaatgcaggcttcaaagaaaggctggtatttttgcaattgattttatttgaactcttttctgaaacaactaagtgagtgcttctcaaacgacacggttgagacagtgcgtcccgtccggtcggagtatgtgcaatgtatcagtctttagatcttaaaacaaggttggcactcggccaacagcttttcaacggccacccgggccaacaacttttcaaacggccacccgggcctagctgatcccgtcagctacagatttttcaaacatcaaaccccttttcacaacagcaatttcacaagcagtagtcaaacaaaactacgttaggaatcacctcacatccgcccatgaccgtgggcacggctgttcgaacagttagttaacctctgcagagggggtacactttacccacacgacattactaacccggatcgcccagcccgtggggatcagccacgtcgggagacctccaagctttcatgacaaggcatttccaaagccgacacaggcttaccatatgccgacgagaggggtcccagaccaacaacaggttaggtcccagaccatactgtgccaggaagcccaagggggtcctctccgacaccaccccggcaaatccacatgtctctcggcatcatggctcccctgataagctagttactcagccaggggtgtcccattccacccatgtggtcgtacttgtcttatgttcggatgaaatttcaaggaatcggtccttaagtgcgggagcgggaaaaccgtacacccggtacgttccccggtccgcggttttggaaattcatttagttcgcaagcaccgacccaggcgtcgggttttccaagtcttttgtaaaacccaagttttacccaagttgtttttcagattttaagtttgaaagcgtccgtcgatactcgcacagagtgcacgaatatcgaggcgcaactgggtggttacaaggggacatggtataacaattaacaaaggaaggatcaaatgcaacaaattaggcaggtccgccaatctgccttgcagacgggacaaccgattaagtgcgatcctatcaatgcataatattttgcaagcaatataattaaatttcaaatataggctcaagatgttcaaaggtggcttgccttgctcgagatccggagcttgatcctcgaaatcctcgcactgcgggtcttcgggctccgaaactacacgcgaaacgggacaactcaacaaacggcgaaaataaagccctattaatgacctctaagcgtgccattagatagatctcgagatttggggaattttggaagttgaacggagtcaatcggatttacggttgggaagatattgaatttctaagattattggatttttggtctgaaggaaaaaggatttatttaaacccttttggaaaaagaaaaggatgagggagggaagatagacttttcctcgggcggctagggcgcggcccaagggaaatggagcggtccggccgagttaactgggcccgacggcccaaaaggcggcccagaacgcgcgcgggcgggaaagagagagggagccggtggaccgggctcaccacgcgtggtcccgggtgggacccgcttgtcagcggctcggctcaccgtgcggagggagcacgcggcgcacgcgcgcgggcggggagggacgcggtgcacaggcgcggttcgcggtgaacgcggatgcggcgggcccacgcgcagcctcacggctcgcggtggaacgcgcgcacgggaggggctgaccggggtcggcccgtcccgtcctcggctgagctggcgccgacgtggcgcctacgtggctgccacgtgggctagcgggaggtagacgacgacgccggccggaacggacggcggacgacagcggcgaacggtggagcgaaccacggcgatacaggcgaaagcgagcacaccgggtggttgcacaggacgaggggagacgagccaacggctcggattcgccggagggagcttgacggcggcgaatcgcggcggcaacaaccggcggggagggaagagggaaacggcgacgaggccacgaggggtcgattcccggctgtgagagcatctatgcggctacgggaactcgatgctagcgtcggattggacggagctacgccgagcgaggctggcgacgtgcgggtgctacggagctcgagcggcgacggcggcgagcacacggcgagcgacggcaacggttggggcggcgccggctagctacggggagtctactcgtgctaccaccgaaaactaagggggggggagatggagcgaggaggaagaacggagtccccttccgcgtcctcgaacgcaccggttctcccggcgctcagcgaaggacggcggtggcgagacagagcacgggggcgacggcaatggcacggaggcgaatggaagaggaagggaaaggggaggctggggtttaaatgggcggcaatgtcggtttgggaaccgacttgcgcggtcaagggcgcgagctggcgctcggcggtcgcggccaaagcggcgacagggaggatgacgccggcgaggaggaaaaaggggaaaaggagggggagaaaggggggcttgcccctttgccgattcgggaaaaaggaggaggtgagcgggggcgcgcggctgagggaggagggaggccctgcctccgtcccttggaggctagcgcgggagtggcggggccgatgcaattaccacgggaattacggggggcggttgggaacggaccggaaaactggcaaaggcgcgtgccaaaggttacgggggaggaaaacggcggtcgggcaccaaggaaccccccccggtttgaaacggaaggaccggggaatgtaattgtttggttaggacatccccctggtttgggggccaaacggttgcacggtttaagcggaaggtaaggggattgggcggcaaaaactaaccaaaaggggggatacacttgggcccccgcaaaaaaaccggggaggtattagggaacgaaaggaaaattgttgggggggggttaagccaaaccccgggggggagggtttgggggataagccttcccctcccaggggggatagggaaaaaaaagatcccggcccccct

SEQ ID NO: 15557 - DNA, 11862 bp, Oryza sativa
cccatgattacccggttagggcagccacaggcaagaacagatttcgcaattagggtttttaggagataatttttccattaggcgccacgacggaacgggcgctacaggaacgcgtggcgtgtcagctctcgcgctcccgcgcccccgccgacgagaaccccgagctcctcagtccccacgcggcagtgctgcaccgccgccgctcccctccgtccatccgcctccccaagcggcggtgctgcttgcatcccttccttcgatatttgcacgtacccctcgcacttcattccacttcggttgattccttcaccaccccccccatggcagtgcttcactgctgcttgcatcccttccccatgtgcgtttttcttttttttttccttgatgatttccttgttgattttttttcttcggcttatatggataatatcgattcccatgtcccattctcttaaatctctccaatttcacaggtaccaggtaccacactatgcagttggtaccatactgtaccaagtaccagcctgtgctgtgctgtgctgcttcggctaattcaaccaacacagttagaggtttacatcatatgattcatcctcacatccaaaagacaactacatctgatagtagtgttctacatcatatcaatttgataggacaacatggtccagaccattagaaccttcccaaaagacaaccgcatcaaatggatgccgcaacagaacctttcttctccttccccttccctcttgctcttggtggtcttgttgacacatcatttgcattgccactgcaacaacaattctataagtcagtacctaaatctgaatacaagatgcaaatagattgcaaatgaggatggaattaactagtaagaaatactaattacatggatgatccagtagtattttttttgtttgacctaggtgttgcaccaggagtattgcttccttgatctgaggatggtgttgatgaagatgaccttttcctgtataaaatctggagtgagcagccaatttacaaatgaaaggaaaaaaaaaaagatgacaagtaccttttgctagctataggtcctccctgacatgtctttgcaaagtggcctttgtcaccacattcagggcatgtcctcttctttctacagccagactcatctgaagctttaatcctgtgtgtcctaggccttccaggctttctcctcaactttggcctcatcaatttgaaaccaggatctacaaatgtccacatattctttgatgtcattgggttccatatcccagcatatgtttgcctcaatctttgcactgaatagcactcatccacatagccattcatgtcaggaaaccttagagagcctatgaatgccaatgcatggttacaaggtttcccacttacttgccaggctctacaagagcatgtatgagcctttaggttcactgcatgcctccataccactcccttgttggacaccacagaaacttcagctaaatcatcgcaattactccttaccacattgtaatcttttagattcttgctctgttcattcagtgtcttaataatagatggaattattcttccttccattttgcttgcaagttggctcctcaagtgaaatttgtcaattatcatttgcctaagtgtgtcaaataagtccactatgtgtaattccttgatcttcatcacccaattgttgaatgactcagaaagattgttgttgatgtagtccacctttgaaagctctgagaatttgctcctactccaaaaaaatgggtgattggtttttaaatatgcaatagcttcaggagatttctcagcaatcttgttcatgtgatagttgtactgctggctggtgtagcacttagcagcaggccacatgttttcaccaaaaagtggtccatggtactgcttcttgaagttcttccacaggtgtcgcatgcactctcggtgctcagcagttggatagacatcactaacagctctctctagtcctttcccagcatctgtgctgatggctagcccaggaggattaccaatagcattcttcaagttctgcacgaaccatgtccaactctccgttgtctcagcttctatcacaccaaatgcaacaggaaaaagccagttgtttccatctattgcaacagcagctgccagctgtcctctatgcttccctgtcaagtgtgttgagtccattgcaatatatggcctacaaccttgtaggaagccatcaatgcaaggtttcagagctatgaacagccgcctgaagcatacttggtcttcatgaatctcggtatcaatatcgacaatacttccaggttgtgccttcaaaagctcctctctaaaagtgggcagcaatgcaaagctgtcttcccacttcccaaatatcttctcaagggccttctctttgcctctaaaaactttgtcatatcctattgtaaatttgtacttcttctctagcttgaccttcaatgcactagctcctagagttggagtctccttcagccaatctataactctttcagcaacccagctatttgttgccatggcagccccagtcttatttatggaacaacaattgtgggcaggcctatttaccttgacctgcacatataacaatgtaattatcagctttttatgcatcaaatttaaccatgaaatgataaaataattaactgaacatttcagcacaaatttaccttgcagccatagtatttcttacttgtagaggcatgaaacctccatttacaaccctgctcttttttcttgcaaaaagctctgaatctatgcttgccctttttctcagtttcaaaagaatagtcatggattatagcatggtgtgtaacagcttccttgcaagtagtagtatctgcgaacacctctccttcatcaatacatgggttatcaaaatcatatgcaaacacatgctcaaggtcagagtcattgtcatcgtcatcatgtatttggtcatcaagatcatcacaatcatattcagagtcagaggaggctgctgcatcactatcatagctgctatcactatcaacctctagtgggtcacaatttgggcatagctggggctcctcctcttcgttctcttccttctcatcatcccgaacctcttcatcatcgtcatcggcttggctcctcctctttgcacacttttttacaaccttctttgcactctttttaataggggatgtggcttcatcatcaggatgtgaagtgctctccggatgggtggtgctctcattttgggtggatggtactggttggatggagttctcaagatggttgtaactctcaggcagtgttagtggcgtagcatcaaccaataggtcagtaaatagtggtggagtacatggaatagaatacctcacagatgggtggcaccttcttttagttggtgaaggttcaacttgcaatggaccaccaaaatcattgacaatggcatgaatattgacaaccccgtgctgattacccttatccaaccaatctagcaattgtgaatctgtggttatctctactttactctgagttgacacatcacccaatttccaaaagctgatgtattgatttggcccccagttaaaattttcccctacatcgtcaactagcgcaagcatcgaatacctatccctttcgatcgaaattttgacattgtttcccttaacatatgtcctttgactcaaaagcgatgtggtaaaataagactcaaccttaataatggctgtcaagaagccttggtcattcctacaggataagtaaaacaatggagaaatattctagcagctcaacgaggaatagatgaaaaacctacatctaaatatacagggactgaataactaatgcatggaagacctatctaacagaaatatcataccaatgtaaaaacatatccagcttaaactacttttaacaaagttgtaaacatatggctactttcttatattacttcatgctaccattgtttgatgattaatttattaaactcactatctattaattcaaataagcacctaaggtggagaggccgttgtttaattacaatgcacagcatattcacacaaagagatattgctaatgcttgattatatcctgaagatacgcaagcaagatatggttagctatgcacatgctaaggttgcatagcaaaccagcaaattcggactcttgaaccagttgaacaaggattaaaaacattcaaaaagaattcctcaaaacacacacatatattgttggtaacatccctacatgatagatagaacaagtaggtcacaagcataagtatagattatatacctttccatggtggtcctgctgctactgcccacagtagccaccatgctgcttgaagcagctgatgctgcagcctgccgtcgatgccgacactcgctgcagccgcgtgccgcggccgcgcgctgcaacctgacgccgcccgacggagccgccgcaagcgaggtagccgcgccgcagcctgacgccgcccgctgcaggtgccgccccaagccgccgcaagcaccgcagcctgatgccgcccgctgcagccgtcgccccaagctgctgcttgacttgctctactcgccgaaatccatctgcacctcttccattggcatctaatacttcaaagcgaccgatttttggttgatttgctcctagtttgagagaagggatgagaggatctggggtttagggttcgtcgtgcgggaggagaggaggagttctgatgcggtagagttggggaagaacacggataaggttgaatctggcaagggcaatatggtcttatcgcgttgccttgttttttaatttaattacatcaattaattttgtcatcttactcatacggaatggaacggtgatggcatacggaatccacgcacactgcttttggtggtatatttgcaattcgtgattttataatggttatttcgagttaaggagtgaaagtagtggcaaatatgcaattctcccttgtcttttggatgtgaggatgaatcatatgatgtgaacctcaactattgtcatttagtttgattatgttactgtgttcatgccagaatgacgctagttgactatgttctcttgcttgttgtctcaaatggtgttttattgatgccaaaatgctgtcaatattacaatttcatgggcaggggcattcttgtcctaattttcatgaaaaccagccatataacggtgttagtctaagctgtgagtccagtggcagttatgttgggttcaaactgtttttaatggcaaatttgcaattacagtttttttagtggtagatccacaatacctgttcaatccagtggcaaatatgcaattgaccctagttaataagggtgtatttagttcacgctaaaattgaaagtttggttgaaattggaacgatgcgacggaaaagtttgaagtttacgtgcgtagaaaagttttgatgtgatgtaaaagttagaagtttttttaaaaaaagtttggaactaaactcggcctaatttagccttcagagaccggtaatttttcttcaggttcaccggcgagagcagagcagcggagacagagctcatcacaaagatcagcagagcaaccaacccacctggagtctggagacgagaccccccaaccgcccaagccctaacacaccacgccgcccgcgcggaagcgcgagatctgaatttccgaagtccggaacgccgcggccgccgccgatggagatccccaccgacgccatccaccgcctccgctcctccctacgcgagcccttctccgcccccgcctccgcctccgcgacgccgcccttcccctccgtcgcggacgccgtggccgccttcgactcccgcgtgggagtgggcgccgcgggggccaccccccggtgcggccgctgcggggccgcgggggggctcctccgcggcgaggggtccgccgtgtgcgcctactgcgggtgccccaggcgggaggggtgcggcggtgtcgccgccttccgcggcagtgtggcgtaccggtggctgctcggctcgctcgggctggatggatccgtgagctttttcttctcctcctcctttcctcatttgaactggttgatctgctcttgttgaatacttgaattattggtgaatcgagtgggatgtgtttttttttcattccattgaactaggtaatttattagaaacctaatctcaagcaaatgctgaatgcaaatcgaagactaggcttttgttctaaatgaagaaaatttaaggtagaaactttagcaaaattttgtgctgaacagtagttgggcaatacctagagttctttccaaaaggctattaaaatgagaaattcattaatttgcaaatgttctgtatcactagtacagaaacatggtttggaatcccggaaatttggattgttcaatagcatgtcctaaaaaaaattcttggctacaacgagcgtcgagcgagctaaataacaatagaaggaccccattatgctatctgctgcagcacatttactatcaagtgtagtccatgggaacttttcttagttttcaatgccatataattgatttttttcccactcaagcttatgattaatgaaatctttggatgcaacctgattacctgaatattgggaattttaagagattggtactgtacagaacacattggaaaggtaatatgcattattggataatgaaacatctattactacaacattgcttttatagtgaacttaagaggaagaacaaagatttgatatcagtatttgatgttatctccgatttgttggatgcgacacttgaatggcgagagggcatgctgtaggtatctataattatgaaacacttaatttaatttgtatactatatcatagttttcatgcttattcactctatgcatgatttggacctacttacataaagaacatatataatgcatagcatgcaaatgaatctcccaaaacaaatatatagaccatcagaagaagtggaaattaaggcgtctctatctttatctttgcttcaactctgtgtttatgattttcattataattacaagcttaaagatttctttaaatgcaaaaaatatccatgttcaagtttcttgttttgccccttttcccatccaggagcctgtagaatttgacaacgagtctactgattcaagtaaaaccaaagaagcactgaagaatgggatggtcttatctgatctgctggaccttaaactttccttcccccctgagaataaggaaacatctggaagtaccgaaaacaatgaacagtcatctgctgaacatatgctaaaattatctggtgttaacctagactcatttttcgctgcaagaatggagaacacaaccactgctgcagttcctactcaaaaacatactgtggtgcaggaaaaacaaagcacagatagtcatggttcttccagtttggagatgcgtgctacatacttaactggaacgaaaacaagttctcaaaacacaaatcaaatagaagttactccagcatttgcaaattgggatgctgactttcagtctgctagctcagaaagtgtcaccgaggactccaagaaatctgacctatttaacagcgcctcgaatgtcaaggcttctagttttccagcacatgtaactgccatcagcccagttgtacctagtggaaatgaaacatatatgagaagtaccaagctagaagattcaaaagatttggcttcagcaagtggcatgctagttaaagatgaaagtaacagtggaatctttcctgagaacaatattgctgagttcaccgagtcctcccttagcaagagttcagcgcatagtgatcaattgcctgcaaggggtgatactggagtcggtatagatgaagcttttgatgactggcaagagtttactggtggaaatcagggaagcctgtcgaatgcaggagaacatatggaggggcctatagagagcaacccctccgaaataaaaaccgtagatacctggcctgttagtagcatggaatcatccaataatgttactgacaactctgttgatgattggcaagcttttacttccagctctggtcaaggaggaaattcggtgaagccaatagaagggtcagctgctagtcaaggaggagatgtggtgaaaccagttggacaaacagcaagcatctcatttgaacatttttcagaagctaattctgttgagttatggcctgtgggcaatattaatgagcttcataataccaaagtagtaaacgaaactaatgattcttttgatgattggcaagattttacaacctctggtcaaggtcaaggtgcaccatctaatcaagttggaggcatgattgaagtctcacgtatcactcagaaagaaacaagtgatgactcatggttcacaacagatgttaaggaagaaataaataaagatttagtgaatacaactaatgccatgttggacgattttcaaagtttttctggttcagatctagcaccacaaagttcatcgtttgtaagtggagaaatgatgaatccttcatttgggcaacatgaaggaactgatactgtgcaatcatggttgggtggcagcaataatatgggtacaaacatggccacaacaaatagtgaagacaattcatttgatatttggaaagattttacaacgtcgggtcatcaaaaagaaaacatttctatttttgagagaaaaaaaactagcacatcatcagagccagctaaagaaactgatccaatggatttgtggttaaccagcaatgcccaggaatctaatagcagcaaagatgctaatagaattaatgactcatctggtggatggcaggattttgctaattttggtcaaaaagaaagtatgaaaattcctggggtagggcactctgcgaaagattcttcaagcaattcagctgaacttaagaaccatgaacagataaatgaagatagtgacccatttgatgactggcaggatttcaagaactcacatccactggatacaagcttacaagttccatcaaattcttcatttgataactctttagtacggatgcctgatgcactagaaggactggaatttgggagctttgcacagtctgttccatcccaaagccaaagagataataaggagaattctaacgaaacaaatacggtttcatccaatcataacttagaaaggttggtggtttttatacagtgttagacttttcacattaaaatgcattttaattcatatctgtgtgcctattccccatttgatgcttgtgcatttgatatctagcactagttacctggcaacatttattggttggaagatgattatactaatctatgtggtgaaagaaagataattattggactaacctgagatttatgttgtttttcaattgtaaacaattgaaactcatggcaccagcaagctctagcagtttgtctaatcatgacatttcaatgttcatccctgatcacctaacgtgccttttagtactctttgttactcttacctctattggtcattttgttgttatactcatcagatttgctgaaatacctgagtgtttgtaagatatttgcagttcatgttgcacagcaattccattgttaatacattcttcatcacgttagtaatataacatgtttccatcatgtgcaggatggttggaaggcagcagacaggcgatttgggttcactgtctaccatttggccaactacaagtcatgacacccaatctgtttcaaaaccggaatctgctgatgcaaatgtagagagactgctgtcgcagatgcacgacttatcctttatgctcaaagatgatctgtcgatccctgataaacctgtaggtcattataagccttgaaaccatgtgtgctttgctacgttctcccaagattcgcttatgttggagttccagccttttgattgtgggacctaacatgggaaaatgggaaatagctcgctgatgtaagtgcagacaaccttgttctcccttttacagcagccttttttttctgagagctacagtgcattgataagcggagatttatactggtattctctgttgcttgccttggctagcagagagctgcagcaccttgctcctcgcttcagtttcagattcagatgctttcattgattactgcttcattgaggcgagccacgaattctgtttctgcaatgtgtatgtaccaattcacggcctgtataaattgtgtatggaacgcaaaaaatgagttgttcaattctttttttcccctctgttgtgagattgttgaggattgagatttacttttgacgacctcgttacaccctttgtcttaaaacataatgtttgtagcggacatctttgcaccttaactgcatcatcctcctaagaaaaccatgctactggcctatttggctgggagaggactcggtttgaaggatattcaaaaatagcgtgtgtgatggagaatccgctagagtatgatttttcacctccatacgctaaacaaaggatggatggccggatagaagccagcatgctcttacttcctgtatgcacagagattttgttaaaaaaatggtttggaaataatacacaatttgtaacacaacagaacacttttatacccatgttttaagttgaattaattagtgcccaatcaggcgtgtgcttgctgtcgcaggacagggtgtaagcgacgttcacagggtgtacgaagagccatgttaggttgggggggaccaagaggagcagaacagcagcaaaaatgggggaaccgaattgattccagtttatcttttcttttaggtgttagctagaacatcgttatctagtttgaactcatgctttttgctcaactacgtccaagtcaaagtaagacgacattatatgaaggccatgttgagaatttctatctgaggtcaggcggcaaatattctccctttgacataaagagttggcaaatattccaaccgagttttactaactggtttcaggatcaggaataagattgagtcatagtttgtttggaaaaaatacgaattaccccccctccgaactatcgtggtcgtctgaattacccctctgaaccacaaaactagatattcttcacctccagctatacaaaccggacgaattaccccctcgacccaatccacggtgttttggtctacgtggcatacacgtggcatcacagtcagcgtttttttaataaaaaatggtgggacctgcatgtcatactcttccactttcccctctctctcactcttcctctcttttatctctcactcttcgtctgtctttctcacggatcggcggtggcgggagacaccgatgggcgggcggcggacggcggtattcgaatgacgggcgagcggagacgactgtggtggcggcttgcggcaccacgcacgggggcgggcggtggaccggggctacaggcctggcacacaggggcggaccgtggcgttcctgtgaccggcaaaccgaagtgacttgcggcggtggctgcctaccctttttgggaacaacccccggccccggctttaccagttgacggcaccgcctgcggtgggctttactgggccccaacaactcttctatacccccccctgcactttggttccatttggtccccttccaacttaagctgtcttccctggtttctcctaggctaaatttttcctccgctctttatgttttctcttccgttctgcgccctccccttcatattgttttcccattttcgacttactgcatgtcttcactcattctttgattcctcttttctatcttccttatcaaatctgtatttttctatctcctctatccattcactattcttatttcattaatctcgcgccttttcgtcttctcttactctcacactttcgcttttctatcgaaactcactcagctct

SEQ ID NO: 15558 - DNA, 7207 bp, Oryza sativa
cccgcggtacggatcatcatcctttttaggtttccactatatatatacctcttgtaagccgccgtgcggcgatgtaacctcacctcagatatagtgaagatattttgctggctgacgcccgtggttttttctctcctgttttgggagggttttccacgttaaatctcgtgtcttttgtgattgatctattgttctttattgtttgttcgcctatcgtttgctaacagaagtagcaggcatgaagacagcggcagccattctgttggtggcggcactggtggcgtcgcactgcatggagatggcgtaagcgatcgacacttgccatgaacagatcctcgtggccatccactccaccgtgaacgtgcaaatcagcggcgacatcatggagctcaccgctagagccgccatggtcgtgcccagtgcggcaatgctgatagcgaggctccacaaggagatccatgcgccgccttccccagtggcggcagcggcgatactagcagcagagagcccgagaaggacatatcgcccttcgtttccatctcaagagagtcacactcggcaccgtaacactacaaattctcctagcgctgtcgtgacggccacaaccgtcttcatacatgctgctccgacgactggttcgggtgcggtggcaccactgttcctgaggaagagagaaggaagaagatggaaaatgaatgagatggatgaaaaatgtgacgtcagtggcacggtcccaattttataaaattccagtaacacggcaataatagatgaattgtaatggcatttatataaataagcacatttacccttaacaaaataaaaatggaaagcacaacttatctctactactataaaagtggggtcctccttctacccctcctatcgttcttagcgcgtccatgcgctccgcgtgagtaacaatcgtattcaatattttattctcggtcacttttctatcccatctataattatataggattgacatgttatagtacgtaatgagacactgtcacagtcatgtttttagtttcaaattaaaaaaaaaaagctcaaaataatacgatgcaataatgtcaccacattttagaaaaaaaaatgcaagcttgaccaagcatgagtgcatgactatagcttttatctataaaataaaaaaaggactgtagcttattgcgcttttattacaaagtcagtttctatataaaatttgcataaaaatattcgatttaaagctgcatacaacagatggcaaccgtgacaaccgacaaggaacccaacatgcggtgtgcctcatgctagcaaaagttcgttttttttaaaaaaaaaactcatgctagcaaaagttgatgcaacagaacaaacacgcgttcaactccaacggttgtattacttgtatgtgagctaaactcaaaatatagttgggcctgactacaatgccatctcaagtcaacaaatgatatgaatttctttttagaactcatcatcattttagtgagaaaaaaaaacagacctggtattctggtggttgtacattattcgtcacaacctctaagcctaccaaaatatatatcagtgtataattcgttacatagttttatattgatgatgaaaaagcgtgatttttcttaaagacaaagacggaacgtagataaatttgaccaatttctcaacagatgatccaaaccattcttttcttttagattcggtaacattacatccctaccttaaaaaaaggagaatgtatattttccttcggctaacaaaacaactacttcctccgtttcacaatataagactttctaacattacctatattcatttaaatgttaatgaatctaaacatatctatgtgttaaatgaatttagacatatgtatgtgtttagattcattaacatctatatgtatgtgggcaatgctagaaagtcttgcattgtgaaacggagggagtaattattcttttatttataggcaatatatccatcaccgacaaggtacctataatgactccgtgaatattaagatatacacctagtcatcaacaacactatatgtatagttacgtgtattcaatacatgggtatgagcatgtgtgtgtatataagagcgtcccatctacactgtgtttggattaagaaaaggaaaatgctacttcctccatttcacaattgaaaactttttagcattacttatattcatatagatgttaataaatctagacacatatatgtgtctatattcattaacttctaaatgaatatgagcaatgctagaaagtcttacaatctaaaacggagggagtacgtaacagtatctcgttcaaacggaatgatgcgtaacggtatgtgattcgaacgggattactgtagcataaaaaaaaaaggaaaaagaagaagcatacttttcccttccaatttgttttttttttccttcgtcaccgtcatcgcacagtacaatcattgtcatcttccctgctcatcccgaagcttctctcctcctcagacctcacctccacgttctctcaggcaagcgagccccccctaccttgcctccgaagtaaccgccgccgccgcggcagctaggtcaccgagcccgggcccaccctcccctcccctcccccacgccggatgatcgccgccggcgccggctcgatgggccgcgccaccgccactccagcccacggggcccattcgcggtggccccgcgccgtcgcgcgcctccgcctcgcgttccgctccccggcgcccgcggccagcggcggcgcgcggtggataggctgcttccgcccggcgccaccggcggcggtgaaggaggcgaaggggaagcggccggaggtggagaaggagcctgcgcggggcggaggggaggacgtgtggagcgcgcaggcggaggccgaggtggcgcagggcgggggtttccccgagcacctcgtcgtcatggtcaatggcctcgtcgggaggtggtggatccgtgttactgtttgtttttggttcatcgctttgcttgtcagctctgatgcaacctgctggcatttggcttgcagtcgtaaaattagcctggttgttttttttttttttgcagcgcggatgactggaaattcgcggcggagcagttcgtgaggcggatgccggaaaaagtgatcgtgcaccgtgagtacccccaatcgatccacaggcaaatctatctcttgcggagttcagttgctctctgaattgtggattgtaaagcaaagtaagatcttttcgtttgtgtgcctattcgcatgtcttgggggtgatatcagggaaaattagaatgttgggaaagttttgacctctcggcataaaaaccgtgttttggtaatctatatagcgtagtcccactttgtggaagaaatcgagttttcgtaatcaacatgctagagtgcaggctacgctgaagaaatatggtttgagcatgcaggatggcaacatgaacatgccattgagacccagtcatttaggaaaaacatattaaccacttgtgccaacttgctaataattgtctagttgggcctgactaaaattaattttctaattgtgtgagaccgtgggagaatcggtagttcacaaattttaatcatacttatacttaagttactatatgagagagaaacataatggtagatccaccaaccagtgtgaccaaatgcatttgattctgttgaaatataattacatccatggattacataacttggagtggggatgaagtaacagaacctgccaaaagaccaccataaagaacactaaggatttatatgacaaaggttgcattgaccaagttagcgccatcagctagttgcagccaaatcttaacaatatactgctgtttgtgtgtgatatctatcatttagaatttcattcttgttgttccagaattatcagtttacatgacctggttctagatagttccattcaaagaaactcttcaagccaatcatcttgctcctcttttttagattgtgcagaggtaaaagtcttttagatttcaggatgatggatatgatgatacatcatttatcattccttctctagttatggttgtttcagtcactatcttgttttcctgtaataagatttagattgccacttcgcatgcaggaagccagtgcaattcggctacacaaacatttgacggagttgacctgatgggtgaaaggttggcaaatgaggtacctaatgacttattgctcaaactaaattttgtcctctgtacaaacctttgtagttgtttgatcgattttttgtgtgcacttgactatttatcttgtcattgcatatgccctatggttcttgttgaagctatttattataattttcttagtttgcatctggtagatgaaatgacgtctgttctaagctgattgatagaaaagtagatatagttattagggaaaaaaaggtgataaaatggtgaagttgttactttttaaatcttattctacagaatttataactatccttcagatgaaagcgtaaaatcaaaattgatctacattgatccatgggagtttgttttcatagttcaaacttgtaagtcctgtgtattcagctacatcatttcatattggaagctaactaaattattataggttttatcagttgtagaacaaagaagaggtgtgaagaagatctcatttgtggcacactctctaggtggccttgttgctagatatgctatagggaggctttatgaaccaaataacaaaactaaatcttcttcggagaagagcagagatgaaggtgagcgcttggagggtttcattgctggcttagaacctatgaattttataacctttgcctcaccgcatcttggttcaagtggaaataaacaggtaagactaatatcctttattgtttataaactagacagatcagttaaccatctctttctctttttttaactttgcataactacccacttaagttgcctctccaagaacaggttaattggtagcgcctgttaattgctactcttatttaattacaattattgaaagtacatatgaggttcaaattttgaagtacttttggagacaaaaaattctggaaattgttattcatcaagcaacttcataaagattaatattatggattttacttttgttgctttcagctttcctatagattacttgcaaatatgtaggtgcctttgtttaacaacatttaaattcttcagtaatgtcagtctcatatggtttcagttttatgagatggcatacttttgtagaaaaatatttcttaagtagttaattagtccaacaactcgataatgactaatatttttgattttacttgttttactttttgattctctagagtttgcaaatatgtaatcagttaatcaccttgatttaacctgaagtagaacaaaacatttaaattcttcagtaatgttagtctcatgttcagattcttccaccagctccctttcttatgtggcctgcctttcctggaaagaagagcttcggaaactgcacatttgcttgttgggagaacaggaaagcatttattccttacagacaatgatgatggcagacgcccactcctccttcaaatggttgatgactgtgatgatataaaattcaggttattttctgtatgatttatgttgtcttatgtgtttaaaatggttggtgaatgtaaatgtacagaaatgaagttcattttctgtatgtttaccttcagtttcccaaagtagtccaaaaatgtttgggtatcatttctgagcacaatatgttctgttatgcagatcagcgttgcgctctttcaaacgacgtgtggcatatgctaatgcaaacttcgaccgtatcctttaacaattaactgcttcgctgtttactctgaattttctagcttcttacaagatatgcacttaactaaataaaaagatatggttgggtggagaacgtcatcaatccgtcgccaacatgagctaccaaaagtatgtcttagaactatattcatgcctaaagaaacctatggaattattacatatttcttttctgttctctttaaattgttggtttacctttcttctgcggttctgcctcttctcagcatcgacttcttgttcgtgatgagaaatatcctcatattgtccatgttgataaaggagcaacgaacagtaatgaagcagaagctcgttctgatctttatgacccagaaggtatatttttctgtttgttagttaccccgaactgtcaaagttgattgttcatcaatagatgacaaaaatcccttctatttgcagaggagatgattagaggccttacacaagtaccgtgggaacgtgttgatgtgagcttccagaaaagtagtcaaagattggttgcgcataacaccatccaggtgtgaacttattacttttccaacctgcagtatatattttgagcaaagtcgtcttcttttctactggtgcctgaaattttgaatagataattgcggagtggcatcttaactgtgattattctaaggaagttggggtatgcagtagaatttaagattttatgtgcttttctgtgagttgcatctagtgaagtattctatgataagatttcacaaaaagtactttgcatggaatgacctacatgcaagaatgtgagaagttccttattatccttcaaaccttcaatctggatggaattgacagccacattgttacatcttccacactatcaaagtataaaaatttgtgggggcgtatcttctttgctgcaaagatatcttaaagtaatgtattgtagtgtgttcctacaagcccatcagtattaccaactcttttctgtcttgaagcatcgacattcttgtccacaagatgccatccatttaaccatgaaaatgccatggtctttctcaactgttatttctccgtattgttgtgaactgatccattattttatattgcaaaagcgagagatgcagatgcacaacttctcaaatctgaccatacttttctgtactctgactgctgttccaggtgaagagctattggctaaactcagacggcgcggacgttatcaatcacatgatggataattttatcgtctagtccctgaactctacgtgctgcactgtaccaatattcagagaattttagcgattggcaattcaattttgcttaggtattttttttcccttgtaggttacagttctcatagataatgtatacagtgttttaatgggccta

SEQ ID NO: 15559 - DNA, 2782 bp, Oryza sativa
  unsure (1)..(2782): unsure at all n locations
gatttttganttgaatggccgntgtgtgatggattccaaagtgtatcataacttgtaccctctactgtatcagagtacaatgaagctaatagatatttcctgttgaattgtatttatatgtgcaaactattacaataatcaaacttatgtattggagactgtgattcggctaaaaggataagtgaaaaaaagatcatctttgctccctcttatttatcccaaaataagatcatctttttaacaatcattacattagagttgatgaaattagagaacaaatacattagaactaaaagtgggaagcaatgcattgggatttaataaaatgtggatttttcaatctttttttctattggtatgtatgggacgagtgaaaaagttattttgggatggaggtagtattcaacaaccttcttgtgttaaatccgaaccattaagaacttgagatgccgattctcactaatcttggataaattggcacattttgagtaatttccagtaaattgaacgaattcgagatgacgattaattgacacattttgagttattttcgataaattgaagtcagctctagataatcaaaacttatcaagattgtaaaccatgcttggcacagctccagcagagctggagttactgcttcataatttcacttcagaaccaactcagagttaaatttaggagttaggcactaccaaacaagccctactcattactgtacttaggagacgactctcggttgggcgcccgatcgggagggggtaaaatcgggctgacgttagcgccgatttatgtacaaaaattactttaaactgatttttctcttaaattacttatccaaatcatgatccgattgtaccattaaatttattgcaattaaatctttaaaacaagaccacacatggatatattccgacgaaaaaaaaattagcttattattgaatttttttaaatgttgcacgatgttccaccaggtatatcggaattgtttcactaagtagatcgaaaatgtttcactcgtttaaatcgggcgttgtttcaccttatatgaaaacaatgtttcagcaaatagcgaaagaatgtttcagttcgctgcaacattatatctatacatagtaaaacactgtgagtactctaggtgaaacatttttcggtggaacaaaaaataaaaaaaattcccttattaggggatttccaaaatatatgggtgtttttttgttgcaatggagtatttcagttcactgcaacattagatctatacatagtgaaacattgtgaatgtactagatgaaacatttttggtggaaaaaaataaaccaaattatcttaatagatggtttcaaaaatatgtaggttttttattgcaatagagttatttgtgtgtgaatacgtggtgggccagctggagggcaggcatgcgcgcgggggggaggggggggggggagcgtaatcattatcgtacttctaattttctctttcaagaatatgatgtgtcaatttcctcaggacctatcctgaactcgcgtagcgatggcttcttcccaaactgcccggcccatctggcccgcgctaagcccaaatcatttccagacaaccccaaaaaatccagcaccttctcgcaccgccgccgccgttcaccggagtctccctaactaactaaacccaaaccccgaactcgccaccgcctgtccgcctccagagtcccaaccgccgccctcgccgtcgtctcgtctcgtctcgcccgcctccatggcgacctccgccttcgcctccaccttcagccccttcccgttccccgcccgccgtccggcggacgacaccctcttctacgccgtctactcgctccccctccccaccgccctcccgccgccggacctccacgccgcgctccggtccctccacctctccctctcctcccacctcgcccccttcctcgcctcccacctcttccaccgcgacgccttcgcgctcaccatcccgccgcccgaccacaccggtgccacctccccctgcgcgctctgcgcctccccccccgtcccgcacctccacggcgcgctccgcttcggcgactccctcgccgacgagtggctcggtgtctccctcctcttcgagctcacccgcgcgttcccgagcctcgccgtgcgcgcgtgggactccgacggggagttcctcctcatcgaggccgccttcgcgctcccgcggtggctcgacccggacaccgccccgaaccgcgtcttcatcttccgcggcgagctccacatcctgccgccgtcgctcttccccgggacgccctccctcgacgccgcgctcgccgccgtccatgatgacgccgtcgacacccgcgcccccgacgccgtccaggccgccatacagcgccgcatcgccgggctgcctgagaaggcctcggagaacctccacaccgtgcgcgtcattgtcccggtgcccgtggcgaaggtgctgaaggaggagccttgcttgatcgcccgcgccgtcgaggggttctatgaccgggacatagacaccatgaaacacgcggcgaggatagagaaattcctcaggggacctggcggaaagggggttgagatggtgaggacatcggtgcgcatgacgcgggcaatgtacgcgcagcttgtgcagcagaactttcaggcaccgaggggttaccccatgccgaggagggaggaggggccggagaagtggatggaggcagaagttggggatgaaaaatgcttgtgggtttgagatgatgtatcacgagaggcggcgggagggggaggaaggg

SEQ ID NO: 15560 - DNA, 9660 bp, Oryza sativa
  unsure (1)..(9660): unsure at all n locations
tgggggggggtctctttncccccaaaaataatattttaccccccccgggggggcttattggggctacatattccgcgggcgggacaacacgggggcactatcccctggcgcgatnggggcttcctcccgggtcgggcacttccggggggggtcggatatggnggatcacttccctgaggagtggtcgggtgtctccttcttctgcggggctcaccggcgcgattcctgagcttcnctgtgcggcgcgtgggctaccgcgggaggattcttcttcatcgggcctgctttggcgctcctncggtggctcgaccgggctctgctcctgacctgcgtcttcatcttccggggcgagctcccaatcctgccgctgtcgatcttccccgggacgccatccatngacgctgcgctcgctgctgtccatgatgacgccgtcgacacccgcgcccccgacgccgtccaggccgccatacagcgccgcatcgccgggctgcttaagaaggcctcggagaacctccacaccgtgcgcgtcattgtcccggtgcccgtggcgaaggtgctgaaggaggagcccttgcttgatcgcccgcgccgtcgaggggttctatgaccgggacatagacaccatgaaacacgcggcgaggatagagaaattcctcaggggacctggcggagagggggttgagatggtgaggacatcggtgcgcatgacgcgggcaatgtacgcgcagctcgtgcagcagaactttcaggcaccgaggggttaccccatgccgaggagggaggaggggccggagaagtggatggaggcagagttggggatgaaaattgcttgtgggtttgagatgatgtatcaggagaggcggcgggagggggaggaagggaaggggagcacatgggaggtttacaggaagagcttggaggcgacagggtgcttcaatggtctgcttcctgggtcaaaagagtacaagagggttatggaggatgcaatgcagtattacaaaagctcgagtttgttttcacgaacaaggtaattttggtatatcttttttaatcttgtgaaattagttctctagtactagtaaattgtcatgtgcgagcatagttggcaaccagttcaaacagaattaatttgctttcagttctcaactttcaaacttgaaaaaaccatgtataattgatgccttgatggtcagttgttaatttctgtgaggtacaatgttacaatcaacaatttaacctgctcaccattagggatgattgttcaattctatcagtagtcagtaaccatgtccatgtgaaatgttagttctaggagtgttctaataatgccatgtgaaattagctgtctagtagtaaattgtcatgttagagcatagtttgcaaccatttcaaacactagctgaatgtccgcgtgttgcaacggaaattttaaaaagaatatcttattatacacattttagaagccccaaacaaattatctctatcctttttctctaatcatctaagctgcttttgcccactttcatatgggaatttggaaggcacatacaccctgacaacaaggacccccacttgtcaaggggttagtggtggtgggtggcagactcaccactcactaccaccattgtagtcttttaaaattgtatagatataaatatagatgtatagataaataatttgctttcagttctcaactttcaaacttgccttgatgatcagttgttaatttctgtgtgaagtacaatgttaaaatcaacaatttaacttgctctcaattctttcagtagtcagtaactatgtcatgtgaaatgttaattctaggagtgttctaataatgtttgtggtatgctagggagatactaagtgctcctgtgcgtcgaattgatgaaatccttgccatgccatactcggctgaggaatttgaaggcagtgaccttcctccgagcgacgatgactcttggttgtataatggggaggatgagttagctgcggaactctgtgcaaggcagcaggaaatggaagagtatgaaactgcaaaacaatacagaaaaagtcaaaggaaaaatgtctcaggcagttctagctcgcagtcaaacgagtttaatcttggagagattacagagtccatgcaagaatttgttcgcaaaatgtcaagctttgagggagctgaagttcctgcaaacaggttttcttctagacttatttaatacctctgtttcatgtgcagtttttcttctattctgttaaatcgaggattgtctacatcagtgattcagttttaattgtccgttggtcttgttcttagataatttaacataagtgacacatttttttctaatattttccattatggataattttccttttgcacttcaatttgaacacaagtcgaaaaagtctaaaccaccatcagagtaaggataggtatgtgatgaagtctgcttaacatgaagtgttcacgttcatttgtcaacaatcaagatgcactaatataacttatcaagtcctataatcatgaatctaaactggctataccatgtaatggtgtatgatacctggaaagtggaagcctaaaacttctgtaattctcttactccaattttagtgcacctttataacttagattttgtccttgttcaactgattgagtgaattaccttattgctatttgatctgaatttttttccctgtttggaaccctcttcacgtttttgtatgctggttgtattggatgcatttcttatatacaaatttcagagcttgcacctgaggattgacatttgactttatcacacaatgttagcctaagatctgcctgtgctaacagtaacccgcattttgtggtccatctctagtttaaacagttgcagctttccatcttgggttttgtatagcatgtttcttatggaatctcagttacctgagcattttagtaaaggaaaaaatagaaggaaaaaatacatactcgaacattggctacttcagggatggcaataggactttgttgtgtaaaagaattccgcacaataacactttatgtgactatcttgtgatacacctgagacatgtcctactgagatgtctgcatctttgaatactcatcaagtcatttttgttcatgtaggaaagacatggaatcagtggatctggatgtcaaccagttcttcaaggccatggaatctgtgctaggtcgttcaaaagatgaacctggcaatgaagccgggtttgatggaaaatcttcatcatctgacatagaccttggtatttcttttcttcatgtcatgcaaatgctatttcattttactgcagttttctgctaggtgctaactcacatggtcagctatttagtattggttcgcccgatactacctcatgaacaaagtgtactttttttgttcatctttcttgggggtttgttttttgggccgtgagctgtgagttcatatgattcaaggagtatgactgatttcaagaactgaagcaatagatattaacatcattattttcctttattttcttggttggggtttcctggttggagatcattatgaggcgcattgaaatcttctgcttcttcattgcacatttcgtaccaaatactctggtcaaatcgatctcattctaatcctatgtctttttgctcgactatatggctggtaactggacaaatgtttatgcccttaactgtgtgtaaagggtgatgtagtaatctgtggtctgtttggcatgggtggagcctctttgagatgcagtagtatgaatagttctcttgaaacatcaatatacataaattcacaaattccttcaccgtattagccagtcatttcgtattctggtttggtgtgaactggatcttactaattaagaatgcttttgactgtgcagaagacgattctgattatgggagtgatttcggcgaagaatctggtgagaagggtatggataatgctttcatggaatcatattctgatgcactgaataaagaactcagtatgaccactatagagaaaagtttcgctcgtgcaccgcaccctgataccagcaatgaggtaattctgtcccattctatctcatgattatgtttagcacagatcgcttgtgtacttctcaaactatgaatatgaatattgttgtgattcctgaaatttcatagtaagttaagaaaacatacttggaagtgcatggaatgcacatactcttttggtttaaaatcacagtcatggatgattgtttattacttcctgaaactctattaatattgaagcagtaatgacccacaatcttcattttttatttccttgtgggtagtaaaaacatgtaaacttgctactggcaataaatcagttcacatgagttaatgagtagttatggtcaattagttgtccaaactgaagtctatcagtaatctttcttccattgtaaacaagttgggataatgggttttgtatcagattcctgaaagaaacttggttacgatttttcgtagcacacttgttcaatttgactgatcctactctaagaaaattttggtatattttgatttcagggtccatcaggtgctgcagatactgatggggagatgaccccagttgatgtggacctgaaccttgttgagagcttccttaactcttactcctctcaacagggtctcccaggcccagcttccaatctgctgggacttatgggtgtaaaagtacctcctgatggtaaaaagccgtgatctttttgtttgtacccatgcacatcaaatttctggaaccatagcaagaacatacatatgatatttattgcaaaacataggagatcatggtccaagtagttttcttgtatgttcaaacctcaaagaaaggaactggaagtaggacttgtgactttgtgagagctcaagcggccagcttggtctctcaacgggcatcatttggataagtaaaattttggcctgacaagcatgttccgttcctgtattccctgtactgctccggtatcattggaagacgtagggctcactcaacacaggccatgggtgtgggacaactatgtactatgagtctatgagacaactatagtcaaagcagctagcatttatatgtggtagtagctaatactgttgtattatgcaattctgtaacatgtcttttgagatctgacatgtatagcaagcagttgtttatgcagttcttggagtagcatatttgttctgaggcatgaacaaacttcagctacctaacataaactgttctgtactcgtacctactcgtgctgtttgtccagtacagatctggagtgtgttgatctcacattgcagacggtgcattcatctcacacggtggaaaatacagctatcaaacaagcaagtttaacctcatgggggaaaaaattaatcatctcaccgtagaactatgggcctgtttggagagcttaagattctgataagcagctggttggtagctagtttttgagaatctggaaaagttgggtttttcagcttctagcttctagttcattttctgaattctacaattaccacttctcagaatctggactagaagctagactgtttgcgggagtttctgattctggaagaagctgcagcagctagaagcttcccaaacaggccctgtaactagaagctagaagtaacaggtacatatcggtcagcgaaaggcatcctttcacgcattagaaaacaacatttttgcacttactcgaggaacaagtcaattacacgtgcaaaaaactgccagagctttggactaggagtagtgttcaatgcacaaaatctttctgaaatgatctcgtcagacaaaggagaagggaaacagcttcagctagctccctgcctcttggacgtgtcaaaaggatgcagcccatcccaattttctgcagcagccggaaccagagtgacatcttgcttcgttatcaattaaataaaaaccactttttttaaccgtaagtccaacatggcagctatggaaagctgaaagctccatggaaatcagggcatctcaagtcaagaaaattacgagtcaccttctccagtactaccagtccgtgtatacgtcctcatcagatcagatattcgcactgattcctgtcgtcatgtacgcggccacaggcaagtgcatttcccttggacaaacaattgacatttgacagcgcttcaactctttttttttctttaaataaaaaccacaaacttaatgctcataagacttgtatactcaaccctataaactcacaaatagacatcctaccatataaacaaatctcagaagattaggttgatatatcttatctcgttgttgatatacctacgagcacctcggaagactgggttgaggcacctcataagattgggtaagggcacctcagaagactgggttggtatatcctgtctcgttgttgacgtatctacgagcacctcagaagactgttatatcttggctctgtcaatgtacctatgagcacatcggaagactgggttggtatattttgtctcgttatcgacgggtacgtcatctatcactgaaagaacaattagccgtatatgcgagcacccatatcaagtctattactttaacccgtgtggctattactttaacccgggtggattgattccactaaaaaaacttaaccggttaagttacacttacttcgctacaacgcttcagctctttgatttaactgtagaaacaacgtctgggtggatatgtaaagcaaaccgaaccccattcaatctatctagtttatttttttaatcactcttaccaactttactttctttgtggatataattggaaccgtttaattgaacttcggctccaagagaaacgaaaccagagttggagcactgtcaaacatgttctacatatataattagacaagagtaccgtacataccaaaacaacgtataggactagattagtcaggaatgatgtatgctcctttgtactcattgcgtattatacacaccaccaaaccaaactaatcaatcaaatgatccattcatccatcatcctttgccctaaaaaacaaacttagaagagaatatccattttgtaactttctttgcatcctatcatatccatcgtccgtgctggtgaatggtgatgcctcccaagtgccgttgttggatggggttacgtcaacctcacaggtgaatctgacaatacaatattaccttttgtatatgtatattcagtatatttactaaactgcaaaagctgactttgcaactcctacactgatatatatcttagatatctataggagtattctttacccttatatgagtactaaccatgattaaagaaattaattagtaacccaactacggagcagggaagaatatattttcaaaaactaatgaactgttctagggattaagtttgatggcgagcatgctgagttgccaaatccgtatgaatagatttagatcagttaaatagctcaattaatactttaataaagtgtttagagtagccttaaaaaataacagttagatgtagacatactacactactaccactagtagtagaaggcagaaggtcctaggcatcaacctccttcgaaagttcaaattacggcggtagaccacctacatcagtatggccacctgtggaacatgatacaaacgagtgcgcctcactgactgaacaaagggactccattacctagaagccaacgactagtggaatctactcggccaaatccgcatatagattacaattcatcggtgcaacaagaactatatacattagagcatctggaaatgttgagccccacctaaatacaagttcttctcttggctaatagttcaaaacagagtttggatagcagatcgactacaaaagagggggtgggcaaaccagctcctctatcctctttgccgcacttcggctgattcagctttacaccttctagcaaagtgtagaccatccaaaagcatctgggtggaggtgcaaagatgggaaaaaacatatctcaaactgtaataatgggaggattgcacatcgatggaggacttgtgatacaaaattacgcatgcggcccacagcccgaagaaagccttgaaatcagctttggtcgtgtttagttccatttctaatatacggacacatatttgaagtattaaacgtaaactaataacacaacaaattacaggttttgcctgtaaactgcgagacgaatctattaagcctaattaatccgtcattagcaaatatttactatagcactatattgccaaatcatgacataattaggctcaaaagattcgtctcgcaatttacatgcaaactgtgcaattaattttttttccatatttaatgctccatacatatgtccaaacatttgatgtgacggaaaagttggaagtttgaagggaactaaacacagcttttgctagttttactctttctctattctctatcaatatacaaagtggtaaagcttttgcccctccttaaaaacaaaataggactgtaaaaaccaaaagaaaaaaagtacgaattacccccccgaactatcgcggttgtccgaattaccccccccccccccgaaccacaaaaccggacatttttcacccccaactatgaataccggacgaattaccccccctcgacccaatccacggtggttttggtttacttggcgtacacgtggcagtctagtcagcattttttttataaaataattgtgggacccacctatcatacactactctctcttttttttgttactctttttctgttttctattttacttaagaggcgcggctttccccccttcagtcacccacgaggtgcgggtttccctcttccttggttgcgtggggggatgaggagtttgccgccgttcgtgccttgctttgcgccaccttgtctctgtttcttcgtcaccggtagaagaaaaagagagagtgtttcttttacttatagatagatagattactacctggtgatgacgacccatcccgctactagcctctgattagtggtggtttttctgacatcttaactcgtctagtggtgttctcttgcggaagatctttaactgggatgtcgggctcggtaccacttgctcatactgttgcaccttgtgaaggacgtcgtctagtcttgcatgtgtcggggtttgggctaatgtctttgggtgcggcggctcccatatcctggctttatggccatatggaaaagcctgataagggttcttatgtcccttttgactgccttgtaggaagtcttttggagttctcttatgccttttattgcagattgcgaaatatatgttggttgttggcattttgggtagtggctggtttttgatatatgtgttggtttttttcctactggtcacacgttttttacgcattctttctttatataactgtcaccttcggttaactcatctcttgatcccntatgttaatggctattctttttttttttatgtagttacttctgactcttttatattcttatatatatatcgatctcttttatctcttatctttagtgatctgcatctttgtaccgtctctttactttgtttcttgttgttattctttatcattctttaatcatatcatttcgattactgtcgtggacgatctatactggaatcggttactcacgactctgctctaggctggtccatttt

SEQ ID NO: 15561 - DNA, 11178 bp, Oryza sativa
cagtatgaagaatcaaaaaattgcaaatttgctggttcaaagaaagttcaaactgacctgtcccatctcaacaagtttctatttgacagaccccaaccaaaaggaacctggattagctttttttaaaccttgaaaagaaattcaacaagattggacgtggcttaggcttttcgtgcactaacacatgtcaagactggtacagctttttcttttcctgtattaactcgtgtcactcatgcacatgtactaatcagttaatacattcaaacacatgaaaaatgaaacagattcaatagaagaactcacagccaatacaagcgaaagaggaagggcggaacatggattgcctttttttcctaactatcagaaggtcgttgctgtctttttcgcattggatttctttcacgagactcggaaatcaagaggatgggaacgactactgctcaaacgcataggactgaaaaggagggagactctcaaccagagccgttagcagaggaaatctttctgcctggatctggaaaggtccgtgccgacgacttctgtcacaatccagatcttaaaacgacaatatgcatttctcaagactgaatgatattctcgtctttgagagaaatcttcgtgcttatcgatttccttacttggatgatttggcagttacactatcagtttcatccatagctgatcgatatacatctcgggcagtacgaacgaacgacttccaatagagcgtcgatctatccaaatttagatagaacggaaatagacttgtaaggaacagccgtcgaggcagtacgaccagtagcctatggcaccaataaaagacaggaagggactagatagactttgaatagctcaaacccgaaagaacacacgttttgcgaatcgaccgaaccagatgaaatgccattgaaggaacgttgaatgcgataggggcggtagtatctacatcccatctgatgatgaaatttatcccaacggaagcaggagtgggagtagagtccggtcaccataaaatggcgaggttatgttatttgatgtctctgaaggggaagaaggggcttgtggcagcagttgagaaggaagaggtgatataagaggatccatgggacgaaccgagagaaggcgaaaaggtaaaccgttagacccccgaagccaagcagaaggaaaagaaaatgagtgagccgactgaagaagtggaaaagtgggaggtgcttccgggaaaattcgtaaacattgattgcgggtagaagaagggaaagggagatgagtgtgagggagcccttttcaccattattaatgaatttttccattagacctagctcttgaaaaagtaatggaacatgcagatgggcagcaactcttcttttacgctaggtatgccggtgatctagtgtttaaggttttggatttaggacctagatgtcatcgaatgaatgctcggtatacttgctttcggaaggaagctaatctgaacactgaatctagaagaaagaagcttttctattttgagagatgaattcaaagagagaaggttgtagaaggtaagtaatccgatgcgcgttcaaatccaacaagaacgtctaatgaaatgacggaagatgcatattattctctcgtagctggggctaagaacgatcctcttatccaactttctgtctgtcccaaaaccgaaccttgcttctgcttctacttgaccggtgcttgcttattactggcattagttagtagcctagctagcgcccttctgtgctattaagcatatcttgcaaacctactgaatgttgaatctcgattgatgtcagaaaccaaccgtagaaagagaggtcgaagcacctgatcactcgttcagctcgtttttcgctcgtgcctgtatggaatgcataagtcattgtgttttggcggtggagaagtacagaagtaaacagtgtgttagtatttagttgtgcgaagcgttgttgccaagacttactcaactcacgactttcacctgcttccggtgacaactaccactctcttatgaatgggagggtagagtaccaagacatagggattagccagcgaaggcggtttatttagtacctttacttggtaaagcatgagaggtgtgccatcttttgccgaaagtgaagaactcgagcgcttgcgagcccaatttgatagcgccagggccgatttaaacgcatccttagcggaacaaggcttcactcctaaaatgaaatcgttagggacccacgctcaatcgtctctgcgcagtcagtccctcgtgcagcttcgaattaaatatatgatgtggtctcgctcattttttaagggctgtgtctttcggagttatgggctcttccctgtgtccgcaaagagttctgcttaaaactatcgtgtctgcttgatcctaagctgcaaatgagtgaaatttggggttgaatttcgatcataaacatggcttcgcttcgtgttattggttcctttatctccgtcttattgggaaaatggcagctcgaggagggcccgactatatccaatcttactggccctatgtgcaaaagttttcaagtcaattttccctcgagtcagtgtcacaaactgagaaacaagtatgatctccctatcgacaaaagtcctactttttcactttttagtgtattttatatgtgctatcatatatatagtgagtgtattttcttgtcgtctggttgatagaaagaacccggaatcaaaccggtgaagggagtcccgagcgcacccttccatcccaagcgtccttcctttttttttcccggttcaccacccactcattaaagtggctacgtccggggggcttacttatcgaccacatacccactattctttcccgacgcctcctttctcttgcttgatggaatagttcaatgcccgagctcctgctttgcttgcgttcttcaccggcgctcgccagatgtatcactcatcccgaaaataaggcaaggagtctgcagtttgttataatcattacgggaatgaatcgcatatgttggtttagaattgctcgggaattcattgatagtgacttttttcagttctaggggggctagtctactcctcttttttctcgatcgagcccctcattctaatcgtccagccctcttcacgaacttgtacaatcaatgccacaaagatagcaaactcgattatcgaatatataaggaaaggggcgacgatttggcaccagatatccggaggtgtggaaagagcagctgtgataagcggaaaaaccatcaaaaaacgacgattgctcgtgaaggtttccacagaaagaccccttggttctggcaaacagatcacaattacaggtacctgagagcataccgatggaatgaacaaaatacgaacagttaacataatatagtcatagatcttaggttgtaacttgatcatgagcgaatttgttgatgttgcacccacgaagtatggaaagtgccaaacattgggaactacccggggaggagttaggaacaggaacaaggagaagcgagaaccacttaaatggaggaatctattgtatttctgcctttgttccccatagcaactggggatcgaaaagcaccaaatttgatgacttattaagggaaagacgaagtaagagcatgctattgaagacgttgcaacatatgtcgggggggcctccgttgattgtgtacgaacaaaatacgagtccaaaggtagggtaagaaagggtttagctaatggagaaattgactcttccgagaaccagtaacgcgtaaaccatgtcaaaccaagaccgatcaatatccgaacggaacggattcgaacttttcctagaaaagtttccggtgcgaaattccattcaatgagtaattcaaaggataaatgcattttcggcatgcggtcggtagggtctacttcccccttcctcgcttccgtccgctatccgttgtgtcatggcacagtgggacatctgtcagccttgcatttctcaacagggctatcttcccttttccgaacatagatatcaaaaaatgatgaccaaggaaaaatgagtgagttgattcattctgtctaaaaactctatttctatatgatatgataatatgtcaaaacaagttcgatagcccattcataacacaagcaatccccttctctcggcacgtgtaactattcccctccttgtctaggatttctgtcttcaggaaggccctaatgagatctaccagtgcttcgttttcattcccccagttccccagagcaccgaaaaagcccatgatagaagtattaggattaagactaaaaagaataccattcataccgaactatcctgaataaggtggattggctaaggagtaggaagtttccagagaataggtcccggtcaatcccaatccctcattctgagaatagtgagaaaagcagttactttatcgtctaaatgtcggaaaaatgggtcccctatcctccggtaataaaattccataagataaagcctgccatttaatggcataataaaagacaatggatttatgcctaatccgtatataggtaaactccaggtccgaacagcattattatctatggatcccccttatgtacatatctctgtggagaatcgttctttaatttttcattgcattaaatatcttgaaaaaaaaaataaaattgactttgatatgtagaggtccagaactagattggtatgtacttaaaaaaagtacttactttattttaggattctacaacgaaatcttatattttctagcaattctactactacgaaacaaaaaagaactcgattttccagggaaggacagctttctcttttggcacgagagactgataaggcaaggttttcttattcccatagggcaagctaggcttggcagagaagaaggatagagaagttctcaagtcaagtagactgggctagggcctattactatagtaaaagcaagcttatagtcgtaccacttttcgaggtagtcacgctaatggctggagtcatgctttataagcttatagccagagggaggatagcgtaagcagactagtgaagagaaagctgagcagaattcctcctcacgagatcgacttgtctacttacgagaatatgcatttcgaaatgaaaagctatccccagaaaacaaagaaaacgaataggggcgtagcgaaggcgcgtagcgatgataatgttaacaatcttctggatgagctcattgctcggactcgcatatacttgttctatgctctacaggctaatctgagtaaagaggaggcgcgaagcgtgagatggacgagagaacacacacgatcggcacatagccttcaaagtcgtttttttattggtagacaccgagaagggagcccttgatcctagatcagtaagagaaagacgtaatgaaccggacagagactcccttgctttattcagtcatgacatggagcttcggccaatcaagcctaggtgcggaaataaagtaaatgaattctattcaagcaagacttgatccaaatggatcccctcaatgctgagcttgttgatgaagaaaaagagagctgaaatagagattgtcttcggtccacgcccaggccgaaaccgagctattaatctctaaatacgctaattgaatgtgctttaagcaaggaagtagccgttcaagaaatgtagaggttgctcgaccaaagccggtcaataaggcagatctgaatgccacaataccggctgttcaattttagaaaggcccatctcctgattgtctcaaatcgaataaaactctttagcaattggtctgacagaacggatggtaaggtgggggacccatacctttattctattcccgtgcttagagcgagtgaatgtttggatcatatgctgccttgcctgatcttactagagtgagtttccttcgctaacgagatgatgcatattctcagtctggactattcccagatttacaaccaacaactagtcttatcttagtccatggagaggaaaaagcaaacgaagcacgttgagttatctttcaattgaattattaaatacgaccgtgaaatgcgtaacttatggcttcggtctctctctttcaattctttgaattgctttgctttcgcgcagccggtgcttgtttggccaaagataaccaaatcgtctgcatacattgagtgagtaatgcacggtgctgtcggtgccagctttataccactgatttgaccattttgctgtgctaggctgaacatttggggaagatactccattaaaattctgaacaagtaagggaacagctctggatcccaagacaagacttcctcttaactagcgaggaggtttaagggaagtttccttcaccgggcctgggaaggatagaaagaagtggaatattcaaagcatcctagtaagaaacaaaacatgtcaaaaaatcctttttctgggtccctgagactcttgtttttccattttgatgttgttataggcttttcacccacccgccttattcccttatgaagagaaagttgactaaataactagattctcaagctctcattaacttaaacctcttctttcgcctacttgttttcctgcttgctaagcggcttgtcttgttcgcctcggcccagcttcctttccgtagtgagagaagtgattacactcgaccatcttcgaggctgctttctgctagccatattcctaatctgggtatccttccttgttcaggaattcctggccatgggcggtattcacttgatatcgcgttcacaagcttcttctggcgtacgtaatgtgaggtctttccttcgctccgctactagttctcctgggccaagattgatttggggcatcatgttcaattgtgagttggacagttcgttccggatctgcatagtcagaaaatctcgttccaaccggtcatgaaagttagtggaagtgtatgactgctttctttgttaggtgattgatagagtttcgttttccataactctcgagctcattcatcgtagaaagcgtgcattgtgctcttcctatcgtcgtataaagaaaggtgtctgttttttcagaaagagagcaaagctgccagaaaagtagaatgccgtgaacaagggtggtttaaaatcgtgcgtgaaccccaatttccactcaatgcgataaaagcggaggcctctctctccgggctagaaacaaaaacgaaagtgcttgcattccattagctagaacccgacagtcgaaggcgtctaaaagaactctttatttcttattggctttcatttcacttcgaggtaagaccttattgtctagtgagtggagtatcatttcctctcttatctttgttcttttccgaactgaatagaaaagagaatagctctcgaaattgctttttccttttcttattcttcctttcctttcgaccatcttactttgaatccgggctcgcctacactctgttccgggctggatgaaagggaatagagctttgactggcgcgaggtctttcgcgaattacgattccaaggagggggttacattccctgatgatggattccttggttttatcccaacaatactaccctatcctacctataccggttcatagcttttgagaattctcttaccgaggaaggcacaaaccttttgaagtagtggaattgccaaccctatcttacttttgttttgggaatgctgattcattttccccttttctatactactcattccattctctttgtctttctccaacaggttaatcctagcatctgatcccttaccaattagggaattctgtattcgggtttgtcttaaagtatttatccgggtaaataagggaaatgaactgtttcattcctcacggctttccctccttgctattcttacctttcacctgtaataggtgtgatgctataccggattatctatccgtggatagtgttttccttcagatctgagtatctcacatactttttttccaaagggttctgtttctggtaccgccaaggggttgttcacgtattaactttccaatgatgctcttttgtacctccatatgtatcttttaggcctgtattcaacttactgaataagtaagaatcccaacttactctctagcttgaagcactcttcaggaatttctaagagggggaaagaagtcaaactcaagcctatccgtcccctcctctgggaaagaggagcaggctgttaggcagcccgggtttaatacaacctctagggtaggccgtgaatcacactgtcaaaaacagagtagtttatacactccaacaaggaagaaatgggaaggcttaagaaaagatatcgtctttgatttacttatccttagtaacctacttactcctcaacctatactatcggatcataacgttcgtgatacgtgtttaaaccctcgctctcttttgttcaaagagtgtgtatcaacctatacttggattaaaccaatccctataagtgagtttagttagctatctcttgcggcgttctctaccgggagagctcgatcttccgcatacgttgagtatcgtttagtgtaaactttttcctatgtttaataacattctcccctctaattacctaccccttatcgaaggataggtataaagatacaattgaatagaagaggaggttgtagcagcactcgtatatgctaaatatcatatattaggcccgtggaactgacagcacgccgaactaataatggggggcgactcgccggagtcgaaccgacataggttaaccctatcttccaataaggggaatcgctttggttacgcagttcagttggcgctaacaaccaacttacgtttgcggcccatcacaggcaaggaaatcgttccaattctatatatgaaaaaaaaaagaaagaggaaagcgtaaatcaatttagttatcttagctctttcagggaatcttctctagagccctacctggagtactaggatctttccttagtcctcccagagactgcatgcaagaaaaccgtagggaagaggacaagctggaagaacactcccaagataaactaaaaatccacgttgacgcaatctctccactttttgaccagcagaggaaaggcacacagagggtgcaattacatcaagaacgaggtggaaggagcataagctcttgtaataagtccggttttttggcatcatctatctatggggccgtacacgttagatagcgggaaggtataacatctgccggtaggaagcccatctggagcggtttggtttactagcatttcaggcattattgaatatagttgcaagttttgtttggctgtaggcagaagtctttggttccgctttgttaacaaacgtgcctctctttgctttctcactttcccagaactgctactttcctgcttttagtacattgcttttcgtatcatctatgagaattctcgtttcagaaactcctcaatatagtcgttatggcaattctaaccatgtagattttattaccaaattgtagttttttcttttgccaattccacgcctctgtaaaaaaatgcctaaaagggagggcgagagttgaagtggatggcccttctatcacctgaaaggctgaaactcaggcatggctttacatggcacacttgctttctttcaggctgttttggctcgcaataaagctagggtcctgatcgagcaagactacgtcctatctatctacctctccaaacacaatatcttgagtacctatgatggtgactacatctgctggcatgtgatgtttggacatagaatcgagtccttgtgaatgggcaaagccaggtgctcttattttacaacggtagggacgattactcccattactgacaagaaagacaccaaattcacctttaggtgcttcaactgcggtataggtagaaggagctggtacggaaaaaccttctgtataaagttcgaaatggtgaattgaggtagagtagaccgatgatccggtagtcatttggccggctatggaaagaaaaagcttgcatctgctccccttaaactataacaggtcccatctctctccaaacctaacgtggtagtttcccatcataaggctttccatctatagattgattgagccattacccaccaaggatcccattcgttcagaactcagttgactgcttctatagataaggcggaacgtccttagttcagcattatagcacatagtctccgacgctactacagcgcttcgctaactcgaagcgcctcgctatgagaatgacgcttcgctaacgctcggctaagtcgtcgaaccctcgcgctgaccattcactttctcagtagcaaaagcgcttctctttgccccttaacttaataaagtatttggaaaagaaagagattcttggttttattgctcctcatctgcgctcgtcaagccaacttagctttttgggaggtgaaagaggggttgaagcggacatttcgaaatgacagcatcgaagatatctatatacacaggaacgcttattccggactgcgttccggaaaaagtagcctacttgacagaaagggcgggcactctcggctcggaggtaggcactctcgtctttcaaccccaccgtcactttgaatttagtggggcactgtttacttacagcctctacgagttgcaagtaatggggcccgggcgggtgaacccaagggtcaacaagccttttttgccttaaccctaaacaaaaatggaaaaggggcctcgctaatagggggcaattggtttcaacccgactgggaaggcccccttggaaccttatgtcaactttcaaccaggtaacccggttcccttttcggacccccctgggcggggccccccaccaggaaaggggttaggcgttttccaagggggccaaaaaaactaataccccctttttttgccccggaaaagaataaaaaagaggcaaacctctctctttgggttccccacccgtgtggtttataaggggggcccctcctctggcgggaattggggcccacacccttatacagagaaaccccttcccggccacaaagggttttctccttccggggttccgcgggttcctattgccccgggttttacgcggcctcttttttttagtttttcccccacaagcgagaattttccccctttttcgggcacaaaataggagccgccctcccttacaataaaaggagggcggcgggggccccccccccaaatctttttat

SEQ ID NO: 15562 - DNA, 2552 bp, Oryza sativa
aaggtgttaataaaaaaggcccgatataaaatacctctcgcaacgcgggaaagtggtgaccccgcggtacacatatcttttaaagagaaaaaggttcttttgccccttatataaaaatgtttgaaaaaaaaaagtttggtgttatatgccccatagggcgcggaaaacaaatttatttttgggaggtaaaaagggtttaggcgacctttcaaaatccagcctgaaaattttttaaacccaggacccttttccggatgggtttcggaaaaagtagcctacttgcaaaaaaggcggccattctgggtcggagtaagaatttttgtcttttaaccccaccgtcactttgaatttagtgggcactggtttactaacagcctcaacaaagttcaaattaaatgggcccggtgcgtggtaaacgaaaggttccatcaagccatttctggccgtaaacccggtaaacaaaaataggaaagagggggactttactataaggggccaattgccatccgcacctgcctgtaagggacctcttgatacctattgttcacttcataactagtagcgggtttcctgtcgcgaacccagttgcgcggagccccaacgaggaaggtgttagtgctttctcatggggtcaataatactaatccctctttttgtgccgggaagaagataagaaaaggcgaagccttctcttggtttccccacctgttgcttctaaaggctgccctctctcggctggattttggtccagcctactacgaggatcccgtatcccgtacatcgtctttctccctcctgggttcccgtggttcctatgccgccgcgtttcccggtccttttcttttagtgcttcgacccgaagcgatagcttgacgcgttttccgtgcataagatggcagcgctccagctcactaaagaatgggacggcagtggtccgccggcaagctcgttctgatcttggacgcagtacattggaatcctgaagcaccaccacgaacgctaccgcgcgtgcgcctgcggtgcggtaaggcaccaccctgttgtgccagcagccaactccggcgtgtcagcttagttatcctcatcaagccacaaccttgatgtctagcttcccaactggtagacggttccctttcccccggagcaatgaagaagggagaagtcagttgattcttccgaagaaccggaagcgaagcgctatgccggggcgaggggacgggaaaagaaactgctccgaagaaagatattggggttcccaatgcttctccacgcccaacgagatgcgccaacctcgggatgctttactcctaaccccacgacggttccgagacggagcttaacctgagtctcggttaagaacggcgatgatctacgtttcacacggcgcacgattccatggatagtttcattcgagatcgtgatggaggacatagcttacgatcatcggctttgatcatgccactaggcatttgattaggacattgcacaatgatccgtacactttgtcgcatctcttcgatacggatacagtaacgatcatagcgatctcctctggtacctactggtacgtcaagatccgattggtcatgaacatcgtaaggtgctgctcttcgcgaatcccagcataccccaggttgggatgggtaggcccaccacttcactttttcactttcacttaggcccgggccaagtcagtggggggaccctatcgggctccttcccccccaaaacaaactgtacgtgggagtttcccttcatacggctcgaatcattctcagatgccacgagaggcatctttccttatgatctggtggttcacacgcgcgcaaacgagcaccggccgcaacagcaaggaactatgaccaatagagtcagacacagagcgtcatacttctttatcttgtaatggttgaggagtttctttctcagagggtgcgggacgcttgcggagtccgtgccttccgtaccaccacaggtcgttcttgggcagatcccgctcctaaacataagggagggatagggggaaaggggccgggcctatcatataaatagggttgtagaaagaccacgtattttcattcgacgttccggggattcgatcgacgaatttggcgagctgatctgctttgatccaggagaaagcccagtcagccaccttttcggtgcaggtcacgtgacctacagctcggctttcgctttttgagacttcctctacccacatctctatgtgcccgcagcactttcatatggggaaagatgggcttaccatgttccatcaatagcacctaacctatgccgattttggcggaccgtgctccaccccggtgaactcatgcggttccgacgtgcccagaggccagaggcgaatccgttcacggtccgtaggaccaacaccattcgaaggttgatggcccgccccgcctagaataggaatctttgactgggcttacgcacattcgctcacttacgctgtcccccctaagctcaccccagccccgggtacgttgtctccaaggcttcacacaaaatcttcagtgacaaaatagcatcat

SEQ ID NO: 15563 - DNA, 9482 bp, Oryza sativa
  unsure (1)..(9482): unsure at all n locations
cattaaaacacactcttncantgtctattaacgtcgtntttaattatattaaanataanttnnccctctttcactttnggccgctttnatanaaaggngcncncatttannagcctgtctaaccaatcctcccccccccncncccccatgttttgtagacctctcntnnncncncgnnnnnnnngnctncatgtcgcacgacctcttaacattacaccactgaatccccaatcctttgcttgctgtgcagtgacagtaccaatatccactaatcgttgtttccagatacggttgccggttgacatctcttctaattcgtcgatacgagaagcaaattgttgtgtggaggaatcaatatctcgacataagccaagaggcagatcttgtgccactccaccaggtcgtatgaaactggcatgcatcctggctcccgggactctttcatagaattccaacaatttctcccgctcctcaaaagcccaaaggaacggagttgatgctcccacatccatagcatgagtagttgaagcaagtgaatgatttgaaattcgagttatttcacagaataacactcgtatatattgagctcgtaatggtacctcacaattcaaaagtctctctacggctgaagaatgagcgtgttcttgggccatcgtagaaacatagatagggtcaactacggaacgaacaacgaaactttacgacagctttttcgtacacgttcacttgcatcacatacacaagtgctctctgaaccgtgcaataaggtcacccataacacggctctcccactggagttaccttagccccgggccatgctattccatgatattggaaaaatggcagcctaactacttattatcatcgtctttaaagctgggcgccttttgaatatgagtggggctcctagtctaggcggcgccttcgtggagccaaaccgaaggaagagcaaaagggcgaggccacacccggcttcgaataggagggggcttagctctggatcccgcctgcttgcagaaatgaatggatcagaaaggggttctatttccgggccgggcaggaggtgaaggccagaagaagaagagaagtgcgccttcccggtaaggaagaggataaaaaggtgctgtcatctatctcgacctgtttcccgaggcgttggaaatgaagaccggctcggagaatcactggcgtgctttctcccccccatcgtttcgccaacaaagaagtcatccttgacttgacgattgaccattccatccctaccgagccgcctcttcgaagtatttacctctgcctttctttttttagaacatacccttcaaatcaaaaagcaaaaatcaagaaaagttcctcgtctgtgatttaatcggccctaagggagtttactcgacccattctccagtctcccgcactgctcaagtgtgcgactccgtatgaggacctccttcccttttgctctacccactctccattcacacggttatcaaagcggaggaagggtgggcagcaggtaccacgagccctctgtcccacacatctatcaagaagcaagtgtagttcaccggttccaccgaatgctcctatctctcggcaaagatcgtgtgagtgtgcagttatgcttcggatgcttcgccatggaatagatcgactcagttccccttcttttccggtgcactcgctttgtatctccgacacacaaggaaggacgcggtgggaagaaagctgccctagcctctgtccggtcgatcattccgctggcatcttgcattcacgcctccgtttgactgccgctcgggaatgtagttgtagatacgtgagtcttagtgggtcgttggctccacctcttatctccttctacgacatgctgtagtcgtcgccatattcaatatgtcacttagtcatatctgccttgcagcgggtcagcacctccgaaagaaagggagggaggacttcattcagtgactccgcgatcgccctctgaacgatcaaaataaggtaaagcttgaagataagttttgtactcgattaatttctcagtccctctagtcgggtgggcgccggccggccggatccccctgaaaaccgtacgtgcgggtctccccgcatgcggctcacgccatttgaggtggcccagcctagcattcattcgcaaatcctgtagtgaaattgagactgctcgacctcggaagctaattcgcgtgtaggtggcgctgtctgtctaccgttgactgtatctattcattgatacattggctcacccccccccctctttttccaagaatgaatgagccgctcggaccttccatttccgtcaaatgacccggcttcccctggctcttccaccgtccgggctccctttcctccctatgctcccccggcgcaggcccaccacgcttcgcgcctgcggcgttttcgccagacggtctttgccagtagtgccatcctccccgcaggctgtctgtatgggtgggttgtcccttgctgctacgttctgttaggcgctatgaattacaggaaattaagtggttgacttggacagcaggcgggttacacgttccactgtgccgagatgtgaggtgcaggtggtgatgatcaccccggggtatgcgctagcgcccttgacgggcactccaggatccgcctacgctcgtgaaaacccaggttggtcctccgaccagatgtgtggataacgaggccaccttcacaaccttctcccttctatctttatccaaagtcaggtagggcggttcgcttgagtcgctcaaccgtccctttgcccggtgctcatgacgcgctacggaacctccaccgtgctagcggcataggagcctactcagcgtcagcggcttcgtgccgcactggagtgatccaatatgtggttccgcacgttccaccacttctccgttcatttccaatactgatcgtgaaacaccatgagcagcaggatgttgaggtccggaattcgaagtgaaattcttgatttgcccgttcctagtcgtcatgggaaagaaataagaaagaaataagaaagagattattcccctagagcttgtccagtaccaccagtactcaaaatgcatctccgcgcgtctacctggcgcttttattagccgccttgcatgcaagcgaagcgctattggcggcaattaatagctcactgagcgatgattgatgcagtcagtcagtgccctcgattattcctgatagaaggatcatggcgccccggaacggaagcattccatccagcagcagcatctccttcaaccacgcgaggacaaaactgatgttagctacattcgagcgttcaccgcacagaggcgatctcgaacactacctatgataataaatccaaaggaaaggaacaagcaacggattgagcgcactagcgcgaaagaacaagctgcttcttgtttagggtcttgactcttgagtctgagagggagaaggcttcccgcgtgggcggattagcaatccctagtcttccataacgcgtattggacttatgtttcctcctcctcgaagatgatggatctatctggtccggttacgaccattctttatggctctgtaccaatagtacagattcgatttaggctctttaaagaatcacccaactggtttttttgctttttagcagtaatcagaaagttagctctttttccagaccagtggccttggagttcatccccgtcctctgccaggtgagaaggaagatgagagatacgttccttagaagtcgtcttcaactttcttccaggaaagcctttcaccgagcgagcagctaagcgagttcatccgcatctgttgtcgttcaagtagttcaaggttattctagtgcgtacggctgggacttctcttaaaaccaccaatccaaaagatctgtcgaccatctatgactgggaaggaagtcactaacctgagaaccgagaaaactatgtaaaagatctgctctcttgaaatagaaatcctttacggaaaaatcttctgtagcttccatgctcttgaattcgctcgcattctctcgaagattggaatgaaacaatccgctattggaatagaagctcttcgggaagagtagcgggtgccatcaaaccctgcttgtgacatagacttgcttcttttctggtcaatcaagatctccgcccgcccaggaaatgtttctcatacagaagttccttgccttcgctgttgggaacacagcttgctttctttatctttctcaataagaatggctaccacctcctgctggatcttcaccttctggagttctttcaggaacaggatatgtaactaatgaagcaagtccggctctatcaatctagagctactagtttcacaactgctattggtggtcaactagtggtggatgctttagctaacatactggaaacagctaaatcaaatggggtgattcatgggcttgtgccacacctagtgcctgtttccttacctgctctgattctccttggccccgctccgggttgatgacagctacaaccatcctccctgttttttctaaccagctcactatccgaattccgttgcttgttctttcgaatgggagttgactttccttttcttcttaactcctaacaatcatcctagccctagtccatctatctctgaatccgagctcgccttcactcggtcaagggatttacctcgttccgggttgatgaacccaaacctacaacccttgcttttctagatccgggtatctccattttcgtaaccagcttgccttctatctccacccacgaatcgaattaacccgataatccgtagttggcaacccctgtcaatgtatgtttgatttgggaggctaccaattctggaatttcttctcgagacatccccgtcagtcaacttctcttcgggatgggtcgttggtttttgtggagataatgtgtcagccatggtagaagtagctccctgagtaggcatgagcgcccgcctagatgaagggattttctcatcttgaggtgtcgggaggagtaaaggagattgactcttctcagtcattagcctttttattgacactagctctttatatagtaatttattttttgagtatcgtatcggtaggcacagatcattggtattggatatatcgttaggttgtgctgagtcaaatcagctccgctgatttttttccgttgcagaaaagagaccccttaccctttttttagaaaatgatgaatatgaagtccgggaggctgcgggtactatggatcctctgactcccaatcgggttaccttcccgggtctcgccggtgttgcctgtaggtcgtgatgtgcctcgagatggccgtctcctgtctccctgctcgtggggaatccgctcctggggcgtcgctctgctgcgtctggcccgtcctctaggcacctttggggggcagggagtgtgacaacgtacacgcttccctttactccatagggccttttcctcagttgcagggtttggtggcccgaaattgacttggcttcgccaaaaggccccatctccaaagcccggctcgcgaggcgtccctctcgctgtagggcggagccccctcgcctcgctcttgtgacatgctatgtttcccttcttccattctcaagtcaagggtgagtcccatgcgtcagtttgtggatcgcggtctcacgcactaatctctacaggtgcccatagtaggccggccgccctacctaaaccaatcatcatatcggtccctaggccccattgctggaaaggctcggcttcaaaaccgtacgtggagcttccgcctcatacggctcctctagggatgggggtaggcccagcccaggcttgtgcggttaaggttgttgtacacgccctcagttgagcattcagttagagacggcgatcgtaggttcgccggaggagagggtgttgcgagcaagattgcacaaacaaagccctcctgcccgcagccctattctagaaatttggctggctacgttacttataaccgcagaacgagcaatgaatccccaacgacaaacgaacaaggggcggggcattttcggggagtagcccccttcagaagaaacttcctggcacatacattaagggagccatcgaaaggtgactgaaacacctgaaacggggactacccgagctaatgatagaggcaagaacactttccggccaagtcccattaattgatcataacgatatcgtggaaatgctgcacggacccatatatatagaaacagaaaaagaagaaccttgatactaaaccagatcgaacaagggatcttcttggaaatgggaagatctaggataggcggccaacctcctggaaagagcgatgtgcatagaccgggtgagtagggatgcagctccgtggaccgctcgtcgggcctgataggtggtggtatcacacccttctcaaaggaaccgtacgtgagactctcgcctcatacggctccgtcctggaatctgggcccccccctttcctttgaccaacgggtcctcgaacccatgggggttatgaatcattcattcattgattgattcaaggtagctttagccattgtgggtagaagctagtcgccagaagcgaagcgatcttccgggccggaaaggaggcctttttttgacgcgtaagctaccgcaaaatgaatgaaggaaaaaggcctcaggattagaaagactaaagaggcatggagggccgactacaagactacgactacaatacaagccatgagcgatagcgaagcctgaaggctttttttcgaaagccccacaactagctatcttatagcagacaactaaggcaagcctactcaactaatctcatgtaaacgcctgttcgcaaaaatccaaatagaaaaagacaactacttattaaacatgtagttgagtgctccgtcgttgttcggatcttgaccgagcccaagcttcccaagctctatgctgtttgggaactccgcaagggtcttaccaccttcttgattgactatatttgagtctttggggtactttgggattatattccgcgccgaagatttgtgcttgtgggctagggtgaatatagcggaccagcggatctagtagttgacaatcgttcggacttggtaaaggttgtcgcagcacctgtagtaggacagaggacttatcgcgatgcccgcggaccaatttactatgtctctgtcgctgacgttggtcaaagaggccacgtggattggcctgggtcttcttcggctaatgagacctcgatcccgaagccttcggagtatctttttgataggcgcctctatctgtatggggaattcgctgctgaaagatcccgcccagtgcccccttccttcccccgccgccttccgaccaaagggagtatacaattttgtcttcaggacactcatgcccgatcgtgagactgcctgttgaacgcctgatggcaccttgctctgacctgagctatgcaacaacgggatcccccttgatctttgccggatgtgcttgacggtcccccataatacgctaacttggggactttttagtccattttttccaagagtctccgctagttgaaccgcgtccagtagacgacctcttccgctcatccccttcgtcagctctttgatagggatactataacctaggtccctaaacttggaatggatggcggagcgtaggtggcaggcagttatatggatacggtgctttacccgtagacgcttctccagctctcgcaagaattgtatgggagtcgtcctcggggggacttcccgaatgaccgtaccgaggaattctaccgtactccgtgcagctatggttgttgattctgcggagcccacccaaaggttcaggccggattgtaggaagtgggtgatacgtttttgtatttctatgagaagaaatacggcacccacgattcccagtagtaagtcgtcggcatatcgcgcgtaacaaatccttattaataaggaatggcttttaaagggggccagcttacgggccaggcctctctctgacctgataactagtatcgcctccccgcccagctctatcagcaggccccttcttttgcaatacttaagaaggtctctcatggccaaattcttattaaagccttctctaccattgaattcggccctcggggtcaacccagcggcttctatgaggaaggcggcgcaaaggaggctcgagggcttgttaaggaaggcggctagggccgctgaaggggggaaaacaaaaggcgttttctggtctccccttcgcctgggggtgcttgtggggggggtgtgccacgacgaaacaagggaatgaaaggttgctttgcgttggatgctctttaccctccccactatgagggctctgttgtcttggggagcgttgaagcctgcttcttttccatacttttcttggtcatcaatacgacgacctattcttaatagaaccgatctgattttctgtcacgtcctgataaattcatcccaaaattaaaattcattcgctaaaaggaataatagaattaattaaaattcgaaaagaaattggcaaacactaaaatacgtacaagaaaaattccaatgtggcccggagaatttttgttaaattctccttggtctaaaatgagccctcaaattttacttgaattttcagagcaccggaaatatttattaaacaacaacaacaattaacaaagtttattaaaaagaaaatctaaaaataatcctccttttcctttgggccaagtttggcccaaagtctcccctctctctctttcggcccgcggccgaagtctccctctcctccctctctttccctcctctcccgggcctcccctaacccttcccggctactaactcaccgctcctcctctttccccaaactgacttctcctcctcccccgtacctgtttctaatctgaccgtctcaccctccttcctgtcattctctcgcccacccgccctctcctctcttctaaccctctccctcccctcttggtgcttccccctaatagctcggtgagccccatcttccttcctgttcttttaccttaccgtttcctccccccccctcaaaccacataaccttccccccctctaaagtccggtttccctcaccctgtgaacatccctcatacccctcatcgcngtatctcctctcttcaactactcccccctccactgccggacatacctcctccctttcataagcgcatcacgaatctctagtggagtggtgcccctgtaaatcaatcattacacacccatctccggagggccataccatctcccgtgacatactctccgtatcactctntggcgctgaactaataattcgtcttccctagtgacatgaacttctcacgcacgctagctatcatcatctagattcttgcgctcncggtgactccaaatcgtatgactcttcttcgccacaacatcgatcctgtctatccactgctcacgcatgtcttatgtctcaccttatcacatgantcgttaggttccacctctcccactcc

SEQ ID NO: 15564 - DNA, 1740 bp, Oryza sativa
  unsure (1)..(1740): unsure at all n locations
gccgccggccgccattcccgtcgacgttcccgctcctcccgtggccggctcccttccccatcctataaaatgggatcctcatcccccgttctctcgttttagccccatcccgagcctccccgtggtccctagctccctccccaccgtcgccctctctctcccacgttgccggccggtctccagccgcctctcccgcctcgccggagcgtcttccggccgcgccgtcgcctcctccagcatcgcagctgccccctctccctcggcctaccctccgtttcgcgcggtgaccgccggaggcgcgttcccgccgtcgccctcctctttccttcgcgccggccgcctccagccgcctctatctccctgcctgagcgccggtcgacgtcgccaccaccttcctcggctccacgacgccgctctcatccccggcatcacctcctcctcgcccgaacttcgccggaacgccgtcgtctccgcgccggcctctccttcctcctcgtcggctcgtcgccccgctgcaccaccaccttcaccaacgtcgtagcggcgtgttccacgctgtcccctcctcctctcagccgctgctgcctgccttcatcgtcatctccgaccgttctcgtcgtcgacgtcccgtcggtcgcccggctcgtcgtctcgcggcgccgcctccgtcgtcggcatcgtagcggcgtggtcctcgtcgtcctcgtccccgtgcagccgctgccggctgtcctcgtcgcctcctcgccggtcccggtcgtcgtcgtcgccctcgtcctctcgtcgttcccgatcgtcgtggcgttcgtccctccgtcaagccgttctcgtccgtcgtccgcgttcgtcaagcgagtcgctgcagccccgtcctcgtgttcgtcctcggctccgcgtcgtcaagcctcgtgccggccgcagctcgctttcgtccaaggatcgccgccgaagccgtcccctcgccgttcgtctccgttgtgcccgtctgtctccgccgcgcccgttcgtcgttgtcgctcccacgcctcgtcgcgtggtggtaaggttccctctccctcgctgccctgtcctcgtcctttcggtgtcgcccgtgccattgtgcggttgtcggccccggtacccgtgtatcggcgtcggcagacgttcgcttgtgcgcgtggtgaccgtgttagtgtgcccgctcggtagccgcgtggtttccacgtgtgcaggccgtgtggtgtctagtggagtccgtttgttggccactcgcctcggttgacacacggggtccgcttccgtcgacccgtggaccgtctctgtgtatccggtctaccgcggtcctttaggttgacatgtggggtccgcatgtcaacggcgcagccttcctgtcttttccaggctagcgcttacacatgttttataaatgcaaagcttaattataaaaacaggtgtaagcgctagcgcttacacctgttttataattgcaaagcttaattataataattcgcaaatctccatataacagcattaaacttcggatgatcataaactggtcatacgagctctgaatcgacccgttcaagtctcgtaatgtttgttataacttnnananncnnnnngngggnnttncagatggttacctctctttgggggnnggaaaaagatacaggatgctaataccaantncagtgttcacaataccaatcgcggattccgagacacaggatttacgtattcnccacgatggaacgtttgggc

SEQ ID NO: 15565 - DNA, 1514 bp, Oryza sativa
ataggtcgggttgccagttcggtccgaatcatcgtaagccttgggttaaggcaggttcgtgagggttcacggccttgtttaataatactgggtagctctaggatcgtctttacaaaatggctttgggcaactaagtgatttttaaatgcggtttactgcaaaacttaatccctatattattattcccttgtacttcccttgcattaatcatgcacctccggtgtggcttgctgagtactgtggttgtactcattcttgctctatcttttcccccttcagtaagagaagctttggagaagatgtcttaggtggagtcctggcttataccccagttgagcgcctgtgaagatggagccgtaggccgctagtccgctgctgtttatttttgcttgtcaggcctgaagtgcctttgtaataatgtaaatattatcgatataataaagatgtgtcttttatatcatgtttgtgtggtgtaccccggcttttcctgggacggggattaatacactagcgttcgggaaaaggcaattttcccggtcgcgacaagctggtatcagagccatctcgactgtaggataagccaagtggataaaacctaaggacatattttatgaataaaactatttgcgaaagttcctttttctccttcccctaatgctatttgcaaaaggtttactccgttcttccttcttcggattttcaactagtactagatggtcaggtcagtgaagaagaggacatcgtcagttgtttgccgaagctccagaagactgcaggatctgctagtgaagtggaggaagcagtgaagccagctgtgaagcaggagtgaagatcttggagaacccgtcgcagaacctaagccaccctctagtgtttcgtttgtagtgtgtttccttgcttgtgtgtgtagcgcatggtttgcatcggtgggttgtgatgtgaccatgctaggttgtttgtttaatcaacttgcagaataagcaaaacaaacaacacatcaacaaaaagagttagttcctttaaggtcttgtccctagttctggtctcttctttccttgtatgcttcctctctcaacccctaccttgtgacagatggataacactggtaacaaaggctatgggaatgatggatccgatgactcaagaacccaaaccaatgggaatgagaaaagcatcaacgaaacctcaccagagctaatccaaattgtggttaaccaaaccaacatgttggcaacagcctttcaactattacagaatcggaacaacccagcaggggcaaccaacgttcaagtacctacagtccagcaacagtgcaagttatcagaatttctcaaaacggggcctccaacctttgccatggccgtcgatcctatggaagccagtgattggttgcgcacagtcgaaaggaagctagggttgattcagtgcaccgaccaggagcgggtaggcttcgcaactcatcagttggttggaccggcttcagagtggtgggataactacgaagcatcacagcc

SEQ ID NO: 15566 - DNA, 1264 bp, Oryza sativa
ttgttagacccgcccataaccgcgggcacggctattcgaatagttttactctggccagaggtgtaccactgtacccacaagacacaaccccacatcatgtcaccatgtgcctcaataccaccacggtatctcggaaaggagttgtgacaatacccctcgcataacacaacccactgcagcgcaccttcctggatcataatcacccccttataaacaaggcatggactccccagcgacccccgtgggcttatctccgccacttctcagtctggtgccccgcaatgaaccatgctatacaaaagataaagccgttgcccatgctggcttgtggttggcacgataaatgtttcacaaccgaaactcgtgaaccggtccttaattgccatgagcacgaccatcaaaactatgtgctcacaacccaccattaccaggttttagttggcacattaattaattaactaatcacgattgaccatcgtgaactatcaataagccatcatgaaataatagtgagtcattagttatcccataagtgtactaatgtttctaagcagggctaagcaattatatctaatatctagttgaaccaatataaataaagctcaactagtccaattgtaataacccaaggtatcaaggaataaggtaatcaagtacgaaagggccataacaaagaataggtcaattccacccaatgacattcgaaaatagatgcaatagttgaatagaaacaatagctttaaataggatcaacatgctcaaagggttgtttgggatctgtgtgacttgccttgctggccttggaactcttcaaactcttcttccgcgaaaacggactcttcggaaacgacggaatctaagcagaaaagagcaaaatcaccaaaacagcacataaacaagcatgaacagtacatgtggatatttttaatgtgtagatctcaattttagaaaaatttagagacttgaaccaactaaatcggagcttagatgaattagttatgaatttttaaagaataaatcggattaaaacacttaaatcggtttaaattgaattatgacgcaataatgaattatttttgaaaaggaaaaggggatttattgcgtcagccggctaaggtttgggtggaccggcgcacgggcggcggttcacacgaacggacggccgagatctacccgattcaagatggacggccgaaaaccgacccggtccaccgcggttcacggcggacggcctttgatgacgccagcgatgaccgcaaccgac

SEQ ID NO: 15567 - DNA, 13859 bp, Oryza sativa
  unsure (1)..(13859): unsure at all n locations
aatcatagaaactacactatatatgagttgttgcttgagttgtctgtattggaagtcgtgtaagcggcttcttccgccttccgggtctagtacgtatgaaaagatgtcagcgtcgtggcgattgcctttcctggtggtgaaggattctattcccgagcggctaaggtccaatccggtattctatttcgtctgtgcgagcattaaaaccaaccatttccgacgtcaagatcaataggaagaaaagggagtctttttctgtcttgaaggttttattttaaatccaaatcgaaatgcctaaacttgataaattgacttatttctcacaattcttctgttctgccttctcctagtaagtagctcacgaggaatggggggacagattccctcaatctcgagatacgaacgtatcgtgtcaaaatttattggcaaatttttcttcagtggtttgtggaccgatagaccttaccttatttttatttttatttccctcatttttttgggactttatattgtcagaaggaggagggaggctttttcctctactctaattggatccttctctggtttgttttcgtttttttttgtggaaggcccagaggttgcttccgctatggagaacccaccagggcctgggcctagtgaagcgggtccttccggatccgctgcgggcaagtcagctgaagcctctactccgtcgtcctcttttttcaatgggctttcgggccagatacccgcaccggattcccccggggaagaggtgccgcaaggggaacagccccgttttgacccttattcaattccggaagttcccctggaacacgtattcggggctgttccagatcggggagagccatccacaagccacaccccgccgaaccctgaacctcaacttggagaagaaaatgccgggccatcaaaccaccaaattcaacatgatgttataagaagcagacttgaaacttgaactccccaaagggaagtaagcgacgatgagatagactcaatcatttttattaagaaagatattatcgatcgcatggcccaattagacccggaccgggatggattctggaatgagcaaaaggaccacttagtcgctcatggaatcctcaataagggtaaagagtataccttacagggactgataaacctttctaaaaaattggaaaaatccggtactagctgtaatgtattcaataaaataaagaagaatgaccgtaaatcatttcgaaagaactacgaaagcaaccctgatctttcttctatgaagaaagtacgtaggcactcctcagcgaggacgcgggttttaaagtaggttctacacattcgagaagacccaggcggattggagtggttgtgcgccggggcaatctctgcttgcatttcgcattggaatttcttgactagcccgaatagatggactcgttcgttcggtcgggcggggcaaatctctaaagtggaattcgtgaaaaggtaccacactcaaatcacatatgatattatgtcaaacaaatcaactagctaaaaagctaggaatttatgtagaagtctgggctggtcagagttcaactcactactcgggctccttttcagttaaggatgcaagggagacttccatgtctggggctgacagctttcgtgtactgaatttctatgagattctcttgtccgcgggaacaaaaagctagtaaattcagtacacgaaattaggatattctagacaacgaaaagctaaacaaagaaaggaatgacaatgagtgtggaaaatccatctacacaaatccactcactacgaggaggtaatcaatcttatgctcaggcaattcattcgtataaatcactactcggggtgtagaggaaggaaatcaggggaatccccggtattaaagtagacagatcaagactagtaggaaaggatactccacgcactagagctttgtctggtcaaagtgctcattctaaggttcaatgcgccgcagaacgagtgctattccttttatgaaattacaccgggaaggaattgagcaagccaagtcatttaactcactccacttaagattgaacaaccccagtcagtgttggttttggggtaaagaaaactatgatagctagctaattcaagaaattctattccatgaaattcttcctccggacaagaaagagtgcggcatcaaaatatgaaatgaaaaactaaataaactaaaaatctctcctctcagtaaattcgtctattcgactaggaaattgaagacaaaggaatttggaattacaagacggatatcagcttgctacttctgactttgactttcaatagggaggtcaaaaactagcacttttttcgaggagtgatcatggtttgacttcgatatattccgggaagatggcttgaagctaatagcaaagtctatttcgactagcttgtggtactagctaggaaattccctaacctcgatatgaacaacttactcaactcaacagagtagcaaatgcccaagaaagcccgagtcaatctatttggaaatccaatctattttctcgtatttgtgtgggaaatcaagctattctagttgaaattcaccagaagaaatgcacgcacttcaatatgccaaaattgcaaaggaaaatccttcgattaacagtggaattcaaccaagaaatgaaaaggtatatataggaaatgcactccaaccaccaaccaataagtgattccgggcaatcaattctatccgcgagttgtggaagtgtttcatttgcctccgaactgaagtcaatcttttccaaaaaaggtttagtaaatgcacatcctcgccgctcggctcctccctcattgcccatagtccctaaagtctgtatgtctcttgtctctttgagaccggggatttcccaactgttccttcccttacaccctaatcttaatacccctgttacccgcctgtaggcggatcctaccaaccaaaataaagtgaccgaaagacacaattgcatcggtccaatgagacatggaagcaccagtagatattgaaagaaaaactattgatcggtattattgttgtagttctttgttcctttcgtcgatgaaagtacaaccacccattttccacactttttcatattgacttaagtcagcgaattacccgcggcgaggaggagagattagaactcctggattgaaaaactttttcttctccttgctaattgcctactcaacacttgaacattggtgtgtttcacattcaactctatctagccaaatatcatagctagcccaatgcatttcctcgtcgtagtgaagtgagggaaggaatttactagcttaactaacaataccaggcttgtccgccgtacttcctatatatagtattgaatttactagagcatattttactaagtggtgtgtgtagtttttacatttcctacgcttttcgtatcaattcctccctctttcctctttcaacactttggcccttttatcatataattgaattgaattgtcttggcatttagcatttgctctcttctgggacctaaagaaagtgagtgcctgtagcgatgagtgccagctttttcatagattgacttgggtgttgcatctctttttccaactcggatttaccattggcttgtcgtcctctcttacctgaccctgtcctatagaaagtagtgtgtagtgtgcttaaaaaaaagcaagtttaaatataacccgcaaaaatgaaagctcgctttgattgagtactcttcttggcttgttcagttcttctcatctgcctcggtaactaggtgcttttaagctactcttgttggcaatttcctttggtttgatagtcggatcttatcttttttttaagaaatcaagccttcctccttagccttgaacagccaccgcccctggcatctcctctgtaaactggatctcttctcttaggttaaacaaccgaatctcctagctctcgatcaaacccttatcccaatcgacatccggaaaggtcgaaatcgtccgattttagcatgaaaggcgatattaatcgttcaatttcattcactcgcagatcagcttccaggtctgcttcggccaatggtgctgtttgaagctttctttctaaggaaccaaaagaggtgggtaagacaagctatagagatgttccacaaacatcttacttgaagctctgtttcgagtgcactaagcgaagaggcaagtgatgagtacaaaacatggaaaggtcagtatagcttgaatgaactacgtagtaaggtttagtactaagcatgattaagtcacggtaactaagtaccggtaacgtttaatagatagaagtaagtaacaagtaccggtttagcacatatgggtcacataggcataccgataggataataggcttgtacgcaaggtcaagtataggctagagagaaagaccggtatatgtttatgttgagaagaaatgcattgtttgatttccgaagcaaataaaggcgcgcagcgaaaggcatgcatgtttcatttgcaggtgctgccggtccagggctcttcggctgagcttactaaataaaagaaagcacggcctggtttatgggaatcgtaaatagacgaagtggtgttttttcctttccttgaggatctatgcttttcatggctctctttctaacgtggatgacaggtttcaaatagtggatcagtttcttaatagccttttctaagtgcttttcgttgccttcttcttatctttatgtacccaggaaaaagagaagaatcttcaccattaccatcaccagtatcacctccaatggttggcgtccctttaattgtcatttagtagtagataggtttgttgaggacataatctcccggccttattcatgcatgataaaggtagcctttcatagtccaaagcctttgtgtgcttttgtattgaactcttttctacaacgttgaaggattgccttacgggattagcaatggcttaataaaaggattaaaaaagggcttctcttaggtcccatactagatgaccacccggaactggatgtactcgtactagaacatttggtgattacccaccgggacttcctactaagtatttgacacttccatcaagaagaaaactataaagtactcaatcaatgcgaatagcaggaatggtacttgcaaaaaaaacatataggaccagagaaatgggaacgaggctgacctatccaggtagtgaagtctacctatgctaaagagcaagttcaatatttggttcgagtagccagcctattttcaggagtggcttattatagtattattaaaaatcatacgaacaaagaaagcctattttaggagtccaccatatcaagggaaagggagatcaggcttggccttcgctttgcttattcatctttctttctttgcttttgaatgacttgatgggtctggataataacaagaagagtcaaggtagcgaaagtagctatactctagtagctggcggggctagtggtgaaggaaatcaaatggcagagaagacacggattcagacttcttttttcaaatagcccttggtggtatgcagattcattgaacgaagaaggcagtcttgcttcctcacgaacaagatcggagcacccaaggttaggcactcgattggatgttcccgtacgtactctagaagcaagatcgcgggacgtccctataacacatcgctgacgtcctcaaggctttcgttgtcgaagagtgaaagatctcacaagtcctccatacgtcagtttctattccagcccagcaacgaagtgcccgtcggtctgcaacattccctggtacaatgctaggaatatgcagtcacagataagtcaagaataagtgagtatgtacgagtcaactcataggtttagtagggctactagaaagaggagcttgggacagagctatacaggactgcttcttgctactccaagagataacaccgctaccaagccaaaatgcgtatcccgatgtcgacttgcgttcatctggacccaaaataaccaaaaagttccagaggcatcttccattcatttcgattttggtctttctgcaccatatttagatcttccctttctacgatccggaattcccagtaaatccttgactcctcgaatacgatgggatttcacacctggcgaatctttcactctacctcctctgactaagactatagaatgttcctgcgaattatgaccttcgcctggaatgtgagcaaatatatcatgtcgattgctcaaccgtacttttgctatcttacgtagagctgaattaggttttttcggtgttctcgtcgaaacacgcaggcatactccttgcttttggggacattgatccgaagctcgagtacggtccgtgcgctgtttttcttctctaccatgacgaatcaattgattttttgtaggcatccctctttcctatgtccttcccccctttgccctttcactagtggttactcccgatccgaagcaccccttttccattcatagagaaatccaatcgtcaaaatcaataaaaaggccatcatggaccaagatccaaacagatcaatcttgttaggaggtactgcccaaggaaaaaaaaaggtgacttccagatcagggataataaataaaataggaaccggataaaatcgtatatcgaaacgacttctggcatcaccggagggatcgaaaccacattcgtaggccgacaatttttctggataggtcgaactattggaagcaaatggaaaaggaacaccgagtggaatcaaagaaactagcggactgatcactaaatagatacaaataggtgcaaattccgacaaaaatgcactttcataagccgttatcgctaaatctatccgtattccctgaagaactgtggcgctttcatagccgtttctcgcgttgtaaacaccaaaaaaaatgttgtccatgaattcactttttttattcaattgagctataaaatctttccataaccttttgcgggattggccccccaaaaaaagtgataagcgcgactcaatcttgtcctttgggcccgggggaacggcagcacttaatgcacaaatagatggaataacagcaaatagcatatttcttctatccttcttatccgtggaactaatcttcatcatagggtaactatatctttttaaagctctgctcccaaaacaaacgggagactttttcgttttgtggccgtggcgttgggttttccaacgaaaaacaagaacattctttcacgaactttcatgacactttatcattcggaaccctctccgtattagtaagcccacaccttcgtaacccaaggaccgacgaacagaaattgaaacaacgcaaccgtactatctatttacgataatttgattgctgacaacatcacgcttctctttcttattcttatttatataactgtcactttaccgggccggaaaagtgacaccgtcacgtctcagagtcgtatgcctggaacaagaagggtcgtcgtacaatttcggcgattcaaaaaaaggaggcgagctccctatccctctttgtctttccacttccctcgttcaacgaatcaatcgacattttgtacaaattttacgaacagaagctcttattttcatatttccgtattcctttcttaaactatgaatttactcttttggaaaaaataagtctctttgtttgaattttagaactttgaattttttaccctagaaaaaaaaagaaaaacctaaccctttgaatctttggtatccttcaaatctcaaccgggactaaagttaagatctttagtcccggttggtgctaccaaccgggactaaagatcccgggggggcctgacaggtcctgacagcattcgaaccgggactaaagatgatctttagtcccggttggtaacacaaaccgggactaaagatcaaatatgcccgttacccttttgaaccgggactaaagatcatctttagccccggtttttattgcatccgggactattgtggaaatcggccgaccgacgaaagatggtttctctaccagtgagtaactagaaaaaatgcccgtatcgttggacgggtgaagtctattttaattttattattgttatatggtttagttaagatgaaatttattgtaggagttcgcttggatatatatgtaattttataaaattataagctgcagttaggagtccgatcatcttaagttagcatgcgagtttttttaaacaaatactccgattcaaatacggatatatatttctaaaagcaaataaacttaaaaactgactcatacaagaatgacgtaccaaaatacaggcaaaaacatcttcaacttttataatagtagagatagagaatagaagagatagagatagagaagagaattgatatagattaaaaccaaagcataaaattaaaaccgactcaaacacgaatgacgaaccgtggaaacatcttcaatttttataaccgactcaaacatggatgatggaccgcagaaatatcttttatttttataatagtaatagacttgtaaaattttaattttggtttacatgtttatagagtaaacagatgtatatgcatgtatatacgtgaggcagaatatagcggtaatagatcagaagcagctttgcatgatatacggctgtactctttccttgtgtgacgtgggcagttggaaacgtgggcttgactacaacatgtaccggcttaatatatactgggctgtgatttttggaaagaatacagataataaggatcggactgatgaagagatacacgagcgattagcggcttaaaacacgttgcgcggaaggaaataactacaaacacgcttaggactctgaacggatgacggatttgcgacgtacgaagatgatggcaaaaacattttaaacttttataataggtagagatacacggaaggtggaattatgcacggcatacgtggttgaatgaatatattcgacaatatactattttcagtcgtattttggttgattacgactgccttgttttggtttgctttttgaatgtatgatgaattcgaatccaaatacacaatttatacgcgtacgtcggtacgtgtactttatcagcaacacacaaggatacatgcgcagatattgtatactattctctcattttttttaatatagacgacgttgacttttgaacatatactagtattatttaatcatttattttatttaaaaattattgtacaaatgcatataatatataaattacgcttaaataattttagtgataaaacaactgacacaaaataaatgataattacgcaaattttttgaataagacgaatggtgtcaaatgtgtgttcaaatgttaacgacgctatcttaaaaaaaatgatgcagtcaatttatctgcaccaaataaatgcgccagaagataaatcacacccacttctcataccactgatccaatttgaacttcccaaaacactcaattacaaaatgtggagattatggatatcccatatctacacggcgatggtatttggactgaatacaggataccaaatatagatagaatatcttatttgtgtctcgggtttgtttctcaacttgtacatcaaggaaataccttgagacttagtcggctacgactgtattttatctgtatctgcatattccgttagggatatagattatcttttgtaacacggactccttcccatatataaggggggtccgggtgcctctaggggcagttgttgattttctccaaatcatataatcaataagacactcggcggattcatccccggacaggagtagggtattacttcttcgataagaaggcctgaacctgtataaatcctttgtctccaaacccatacacttttccagcttgatagccacccccttttattattgccgaaatctagtttcgacagttggcgcgccaggtaggggttgcgtcaagcttttcgccgatcagtgcaatgggttccgtctccggcatcgacgacctcgtcttcccacccgggcagacgtttcggttcggcagcctcgacttcgtcaccaacaacttcggcaatgtcacaccctgaaaattcaaaatatataaattgttgtttaaatggaatttctagaatttattttaaaagtcttgaaaagaaaatctaagtttaattaataaattccaatataaaattgggccagataaaatttcattaaatactttgcttaattctttaattcctagatttttctgggatttatttgagctaaggaagtatttttaataaatggaattgcatttaagaaataatttaaattgaaaaggttttaaaaagtcttcttttggctttgggccgaaagtcggcccaaaacctctcttctctctcctcggcccagccggcccagtcagccgcgcgcgcgcgccctcgctgtcgctgacaggtgggtcccgcctgtcggagccgtcgtcttcctcgggccgaaaccctagcgcgccgccgccgagccgccgccgctgtttccttccaatccggccgctcctttccttctccggccgaatcaatagaggggaaatgatctccgggatctcctctaccttttctcctttggaatcttcggctaaatcggtttggaaatcgatggattcgagttcgaatcggatcggctttcctctctccaagccgcgagtttccttcgccgttgccgtcgccgtgggccttcgccgccgcctccgagcccctttaaaaggacccccggtgtctcctctacccgtcgcagctctcgccttcgcctctcgtcgccggaagagctctagcgccgtgtgccctagcttcgccgtcgccgccgccgcttcagccgtgctccgccgtcgctccagctgtcgccgtcgctcgggaagaccgccgccgtcatcgccaagtcgccgccgtcctcgtccgccccttcgcagccgtcggaacccgccggagcttcgtcgccgtcgacaacccgaaggtagccgccgcttccttctcgtcgccgtcgccgtccgttgcttctccgccgtcgttttggtcgtcggtgagttcgccgtgccgtccgctacccgttggtgtcctccgttcgtgccgtagcgccgccgttcgccggtgagcgtgcgccgcccgagccgtctgcctcgccgagccgccgccgccgtcggtgacgtcatcgctggcgtcatcaaggccgtccgccgtgaaccgccgtggacccgatcgatctcggccgtccgttcgtgtgaaccgccgcccgtgcgccggtccacccaaaccctagcccgctgacgcaataaatccccttttcttttcaaaaataattcattattgcgtcataattcaatttaaaccgatttaagtgttttaatccgatttaatctttaaaaattcataactaattcatcttagctccgatttagttggttcaagtctctaaatttttctaaaattgagatctacacattaaaaatatccacatgtactgttcatgcttgtttatgtgctgttttggtgattttgctcttttctgcttagattccgtcgtttccggagagtccgttttcgcggaagaagagtttgaagagttccaaggccagcaaggcaagtcacacagatcccaaacaaccctttgagcatgttgatcctatttaaagctattgtttctattcaactattgcatctattttcgaatgtcattgggtggaattgacctattctttgttatggccctttcgtacttgattaccttattccttgataccttgggttattacaattggactagttgagctttatttatattggttcaactagatattagatataattgcttagccctgcttagaaacattagtacacttatgggataactaatgactcactattatttcatgatggcttattgatagttcacgatggtcaatcgtgattagttaattaattaatgtgccaactaaaacctggtaatggtgggttgtgagcacatggttttgatggtcgtgctcatggcaattaaggaccggttcacgagtttcggttgtgaaacatttatcgtgccaaccacaagccagcatgggcaacggctttatcttttgtatagcatggttcattgcggggcaccagactgagaagtggcggagataagcccacgggggtcgctggggagtccatgccttgtttataagggggtgattatgatccaagaaggtgcgctgcagtgggttgtgttatgcgaggggtattgtcacaactcctttccgagataccgtggtggtattgaggcacatggtgacatgatgtggggttgtgtcttgtgggtacagtggtacacctctggccagagtaaaactattcgaatagccgtgcccgcggttatgggcgggtctaacaatgtctttcgtgattagtctcacacctctcatcatagtaaaagatgcttaaactggtaataatctgattagctcctggtttggaatggtacattcctagtttggagatagaactgtgcagccggggtggttgttcagaatggttgggcctatacaacagggtatgttgtatagcgttggcttaatattgtttaattacttaactgttttgttaaaattctcaaatgtttgctaaatgctgcttttgcaaatggaaccctattatgccatcctttgttatcctgtgcacttgcatatttgctgcgtggcttgctgagtatgtcatatactcaccttgcaatcattcatcagaggaagagttctacaatgaggctgatggtgtggaggattaggtgtagccttggtcaagctgcctgtggagtggagccgtttgcgccgtttatttaatttccgctgctagaactttattgattgagaggaactatctacctctgtaatgacattttattcgcttattaatcagagtaatatttgtactctattatcaatttgttattgtgtgcctcggctgattcctggacgagggttcacacacatgtaagcgtttggaattttggatagaaattccgggcgtgacaggcaagatctctctccttgactcggtgtcagaccagtcgggagagaaccggatttcagccccgtttggactcccaaacgcggctgaaagttacttcaagaccatctcaatcgagttggcttcaaaccactcgggtgagatcgcatcttctccaacatcaccagatcaagatgatggggcttacccaccgatcctgatgaagctccccgacgatttggcggccgtctccatcacgacagcgtctccatcccgtaggcctaggcggaagtcggcttcaacaccgacttcgcctagcttcagggaagtcggcgtcattcttcaaccactcggacggtttcgacggatcagctggattgctactacagattttccaacgttgaatcgcgccccaaccacattgtggagtccgacgagtttagctcttgctatcacgacccgggttcttgacgactttgacgggaagctatattgacactacacccctctctacttcgntgtcttcatggctgataacgagacagaggagcactgtccaagcccggnagaccgaagcacgttctgagacttgacgttcccccctggaggaggagcttctagcccaagaacaagaaccggntctggcgtgagcacacagagcgtgaacgcgacccgaaggaggttaagaatcaacgccacaactttggagacagtcgcccagccgctaacctcattggccaaaaatgtttaaggggaccggtttctcgacccttaaagaagggggtgccggacaccctctctgaccttctctagggaaaagacttattaatttgtccttgtgaaattttaaacaaaaaaaactatttgggttggct

SEQ ID NO: 15568 - DNA, 13160 bp, Oryza sativa
  unsure (1)..(13160): unsure at all n locations
gaagcgccgagagatggagtgacctaagaggaaggagtgccaaataaaacgcctccccaggggttgggttttcttaaagcgtggccccggttttcctatgaagagggcaatgggcccacccaatataggggtgagccccccttgggcccccagctttcccatttatgctccggcctttttattggtgaaattggaacgaaaaacatttccacacagaaacagactatgcccttgttggcgccaagctattgaggtnnnnnnnnnnnnnnnnnnnnnnnnnnnnnnnnnnnnnnnnnnnnnnnnnnnnnnnnnnnnnnnnnnnnnnnnnnnnnnnnnnnnnnnnnnnnncggggagagcctaaattgccaactacaccgcctctatactagggtgtcttcatgggcggataacggagacggaggagcaatgccaagcccgggagaccgaagcacgtcgcgagactgaacgtcgccgactggaggaggagcatcaagcacaagaacaagaacggctacggcgtgagcagcaggagcgtgagcggaccgcgaaggaggctgaggatcgacggcagcgagctttggaagcagggcgccgagcgcgtgatctcatcggccaacaagatgttgaagggacaccggttttccgcacccctcagcagaatgcggttgccgcgatcaccctcctcgacaccctcctcaaggaaaacgagctcaatcaatctgatcacgtcgtcaacatcttaaaccagacgaagaccatgattgcggcttcggtcccagttaactccgaaagcgtccacacgccgactggcagccgagtcccccactcccgatctcatgactaccgtcatctaagcctcagcatcaccggcgcaggatccaatcgcaggagcaggggtcacgacgagcggtccgttcactcacctcccgaccatcatagggagcgccgagtggaacggcctcgctcaccacctcgtcgccgccccgtcgatcttcgcgacacaatcatacagcgccgagcagctcgaggccatcatcatgcgccggaccgccacgacgacgacctcgacggagtagcagccttcaccgacgacctgcgtcgagtggattggccagccggcttcaagccgactggaatagagaagtatgacggtaccactaacccagaatcgtggcttaccgtctacggtctcgcaatccgcgcagcaggaggagacagcaaggccatggcgaactatttaccagtggctttagcggattccgcccgatcttggctccatggattgccccgtggtacaattggatcttgggctgaattacgcgaccacttcatcgccaactttcaaggcaccttcgagcgtcccggcacacaatacgacctctacaacgttattcagaaggccggagaaacccttcgagaatacatccgacgatttccgaacaacgtaacaagatctccgacatcaccgacgacgttatcatcgccgcattcaccaaagggattcgccacgaagaattggtcggcaagttcgggcgtaagcctcccaagacagtcaagcttatgttcgaaaaagccaacgagtacgccaaggccgaagacgcccgcaccgcatcaaagcagtcaggtcccagttggaagccaaacaagggtacgccggctaagggaggaggtggaagtaacaatcataaggaccgcaagcgtaagcctgaggaacttgttgcaaccgccactcactcttctcgacagcgttcgcgcgtcaacacgttcgacaagatcatgaactcccaatgcccgcaccatcctaactccaaccacgtggccaaagattgtttcgtctacaagcagtttgcggagcaatacaccaagactacacggaagaactccgacgaagaacaaagtacgtcgaggaagaaggacgacggtgacaccccggcaggatttcaagaccaccgcaaggagctcaaccatatcttcagcggcccctggcttatgagtctaaaaggaagcaaaagttgactgaacgggagatcatgctggtcagcccgacacaccccagtatcttcgatggtcagaaattgcaatcaagtttgaccgctcggatcatcctgaccgagtggtccacccggggcggtaccccctggtactagacccagtggtccgtaatgtcaagcttcgcagaaccctcatcgacggcggcagtgcactcaatatcctcttcgccaagaccttggatgatatgcagattcctcgctccgagctaaaaccaagcaatgcgccttttcacggagtaattccaggattatccgcaactccactcggccagatcaccctcccggtcacttttggcactcgggaaaacttccgcacagagaatatcagctttgaagtcgccgatttcgagacaacataccatgccatactcggacgcccggcgttagccaagtttatggccgtcccgcactacacttacatgatgacgaagatgcctggtccccgaggagtcctatccctacggagcgacatcaagcaagccgtcacatgcgacaaggagagttgcgacatggcccaaacccgcgagatggcgtcagcccgagaggatatccgactggctgcagccacggcgagcgaaggagaagtgcccgctaccaagatttcaaaaagtggagaaagcgaagccaagactaaaaagattcccttagatccttctgattctactaaaactgctgtaataggcgccgagttagattgtaaataggaaagcgcgctcatcacctttcttcagaacaataaagatatctttgcgtggaaaccatctgatatgcccggtattcctagagaggtgattgagcactccttatatgtcaaagaagatgccaagcctatcaaacaacgactccgccgattcgcacaagacagaaaagacgcgatcaaggaggaattaaccaagctgttagcagcaggcttcattaaagaagtccttcatcccgactggctagcaaacccggttctagttcggaagaaaacggggcaatggcgcatgtgtgttgattatactgacctcaacaaatcttgccctaaagatccttttgggttgcctcgcattgaccaggtagtcgactcgaccgccggctgtgagcttctcagttttttggactgctactcggggtatcatcagatccgactgaaggaatccgactgcttgaagacttcattcatcacgccctttggagcatactgctatgtcaccatgccgtttggactaaaaaacgcaggagcaacttatcaacgtatgatccagagatgcttctcaacgcagatcggtcgcaacgttgaagcctatgtggatgatgtagttgtcaagaccaagcaaaaggatgatttgatctcggatctagaagaaaccttcgcgagcatccgcgctttcaggatgaaattaaaccctgaaaagtgcaccttcggagtactgtcagggaagctgcttggttttatggtgtctcataggggcatccaagccaacccggagaaaattactgctatcctcaacatgaaaccgccaagtacccagaaagatgttcagaagctgactggatgcatggcggcgctcagccgatttgtttcaagacttggcgagcgggggatgcccttctttaagctactaaagaaaacagacgacttccagtggggacccgatgcacagaaggccttcgaagatttcaagaaactcctcaccgagccaccggtcttagcctcaccacacccgcaggagccgttgttgttgtatatagcagccgcctcccaggttgtgagcacagtcttggtcgttgagcgcgaggaagaaggccatgtccagaaagtccaacgatcgatttactttgtcagcgaagtcctagccgactccaaaacgaggtaccctcaggttcagaagctgttatatggtattctaattactaccaggaagctatctcactactttcaaagtcactcggtaacggtggtcacatcatttccactcggtgatatactgcacaaccacgaagcaaacgggcggattgctaagtgggctttggagttgatgtctttggacatatcattcaagccccgaatttcaattaagtcccaagcgttagctgattttgtcgccgaatggaccgagtgccaggaggatacccccgcggagaagatggagcactggaccatgcattttgacggatcaaaacgactttcgggcactggagcaggagtggttttgatttccccaactggagaaagattaagctatgtgctttggatacatttttcggcatcccacaacgtcgccgagtatgaggcgctccttcatggactgcggattgcaatttccctaggaataaagcgtctaatagttcgaggcgattcacagctggttgtcaaccaggttatgaaagagtggtcctgccttgacgacaatatgatggcatatcgacaagaggtacgcaaattggaagacaagttcgatggactcgagcttagtcatgttcttcgacacaacaatgaagccgccgacagacttgccaactttggatccaagcgcgaggtggcgccctctgatgttttcgtcgaacacctttatacgccgaccgtacctcacaaggatactacccaaattgcgggcactcatgacgtagctctggttgaagccgattggcgagagcccctcatacgatttttgacttctcaagaactcccacaagacaaagatgaagccgagcggatttcaaggcggagcaaactttacgttatgcatgaagctgagttgtacaagaaaagcccttcagggattctgcaacgctgcgtatctttagaggaagggaggcaattgctgaaagacatacattctgggatatgcggaaaccatgctgccgcacgcaccattgtcggcaaagcttaccggcagggttttttctggcccactgcagtgtccgacgccgacaaaattgtgcgcacgtgcgaaggttgccaatttttcgccagacaaattcatctaccagctcaagagttgcagaccatcccactgtcttggccgtttgcggtttgggggctcgacatggttggcccgtttaaaaaggcagtcggcggttacacgcacctttttgtggccattgacaaattctccaagtggattgaagctaagccggttgtcacaatcacagcagataacgctcgagacttcttcatcaacattgtgcatagatttggagtgcccaatcggatcatcactgacaatggcagacaattcaccggcggagtttttaaagacttttgtgaagactttggaatcaagatttgctatgcctcagtggcacatcccatgagcaatggacaggtggaacgagccaatggcatgatacttcaagggattaaagcgcgtgtttttgaccggctaaaaccctatgccggcaaatgggtgaaacagctgccatcagtactttggtctttgcgaactacacccagtcgggccacaggccagtcaccttttttccttgtctatggggcagaagcaatgttgccgagtgaagttatattcgagtctttgcgctttcgaaatttccgtgaagaacgctacgaagaggaccgagtggatgacttgcaccgattggaagaagtccgcgaagcagctttgattcagtcggctcgatacttacaagggctgcgacgttatcataatcgcaatgttcgatcccgtgcctttctagtcggcgacctagttttgaggaaaattcaaactacacgagatcggcacaagttatctcctctatgggaagggccatttatcatctctgaagtcacccgaccaggttcctatcgactcaagcgcgaagacggtacactcgttgacaactcttggaacattgaacatcttcgtcgtttctacgcttaagcttatcattgtacttccctatcttgactgtcaacatcaagttttcttcttgacgttgtcagtcgggggctatcatcataataatggagtgtgattttttatcaatttaatttgcttacttggtctatcattgccttgtttggtttttctacttcgtctgcgaggactgaaagtttttaatagcttctttgggttttaggctcaacaaagcttgataaaagcttttaagaaatcaaagacttggctagaattatcaaacacagcataaatacaccagtattgtacaagttgaacctccatttgttacattcatagtcagtcagaatcagttttttcatcatcagagttattactactcggctgaaggtcggtattgcggaattgctctacaacgtcatttgcaatcttgtcagccgcgttttgagcattgctgataagatcaagagcagcttcttcgcttgtcccgtctgcaaagccatcaatggcgtcaatttcaatccttgggtacaaggatttggtcatcgccaatgccatgctagctcccatacttccagctttcttgatattcttgaaatatacatctggagcaactctcagcttgtcgaagatttcggttgcgtcgagtgcactcggaccactgttattgaggaacatagcttggacaagtggtgtagcgacattagcgacttcatctcttgctccttcaagcattttgatcttaccaaccaggacgtcaaattgagcttgagatttaattttgcggtctacaaaacacatttatgatcaaaatctactgccttaaaaagagagaagttcagattgtcagctggcggtaccttcaacctccttcaaggccgagtccctttgcgcagccagttctactttgtctcttttcaagacttcaatttgtttctccatctgagccatcctggtggcttgcgctgtttgaaatccaaatgtttgaggatacagttatgacagcataaattaatgggacagatctagaagattaccttttgatgaaccactcagctcgaagtttgaatcctggagcagggcaattcggtcccttaattccttctctgtctttttggcaagctccttggcctcgtgtagctggtccctgactgcttcaagagttcccaaatgaggaaccagcttttctaaagttgctgtcttggcttcattgcgaagatggattctctgcatgatggttcatggtttagttctgctaaagagaaaacaaagtcatcaaaggcagtcacccagaggatttacattcacaatgcgagtggcttctccaagtgccttcttcagctggcacacttcctcatcttctttttgacgatttatgacgatgccggcagcttgtgagttctcgtcccaccatttgagcaagataggaggacgagagtcgtcagccgcctttatgcgagggatttcttcttcgtcatcgcctggtggtcctgatgtatttccaagatattagacgaataagctggagttattcaaatcggcatcacttgagaagatgagttacctgaggatgttcctagctgagcgtgaggcgattcttgttctttatttgaagacccaatcatagcgtcgttaccagcctctggtccttgagaagtcgtcgtctgcgcttcaacttcgggaatttcttggtctggacctacgtccgactggtttccagtcgggggctcttgggttgttgtagtttcagttgctgccgactggtctccagtcggaggctggtcactcggatcggctgtatcacctgaagtatgagcgccagtcggctggttctcggcagtcggctcagaatccttggatgaacttggctctgtcacagccggatcaggatcttttccagttggatctatgtcggatggtttcctgcaaagtgtcctttcaatattcagtattattttcatgagagaagcataccggagcgaaatggtaccaagaggtttatgcctggaagatgttttgatctttggcgttggacggccagccagttttttcttgggagtggtatgctttgggagtttattgggtaggcctttgttcccagatttgtagccgtcgtcgctttcgtcgtcgttaagcaccagctttctcttgcgagaaccttgtttgccccagtcggattgaaggtttgaggttgcaagtccgatctgattgtcggccctccacctcccttaacggtgtgctggcgaggagaccggcgctgagtaattggggggtcagatttcatcaatacatattcctgaatgagatgcctccatggttagttaactcaacatgaagacaagattatgttttggtcatgggttgaaggtttcagatacatacctgcggaggcggattgaatgcattatatggcacaactggcagctgatgtgagtagccgacgacaatagcatttgagaagattttatacattctctccttcatgattttaaaatccagagagtctggttcttcacgattaggatcatgcttgccgtcaaactcgaatgccgtacgggatctttctttaattggtgccaatcggcatttgatgaagtgccgagtaatctgctctccttgtaagccttgttctttgagttttagcatgcgatccatcaattccaaggcttgggctgcttcatccccaataggaagagagttccaggtatcttggtacaccggaggaagacaagagtactcaggaagagcgggctcaggattctgaatataaaaccagttcgcatgccaccctttgtttgaagtcttgaagggcatcgagaagtacttctggctcagagttcccctcagctgaaatccggcccctccgactacacatggcttactcttgttcggttggggtttgagaaagaagattcggcgaaacagagcgaagtggggtttaattcccaagaaggcttcacaaacatggacgaaattggcgatgtggactatggaatttgggtttaggtgatgcaagctgattccatagaagcttaatatcccgcggaaaaatttcgaggtcggaagagcgaagccgccatagaagaaatgagagaagaccacaacctcgtgtgtatcgggggacggaaaagcctcaccgcacgctggccgccacccgatgatctccttggcaggaagaacgccgtgcgccaccatctccttcaggttctcctctgtcacgtcggatggcgcccattggccttcaaagctttctttctcttccgccatcgattttacccgaatgcgctgatttgattcgagggatggctagggagaggtgagggattgaggcggtggatcacgggaaggattttgatgaactttttgaaggtggattcgagtggaatggtgaaccctagtttgccggcgcagctctgtactgtagcagggagtggggaaaatggcgagagttccggcggggaagacgaagtgacgcttggatctcgggatttcttgttaagggtatcggaggtgcaaatgggcttaggcctgaacagtacctcagcccagtacttttgacagcgtggcccattgtgctccttagggacttaggcattttttgctttggcaatctatgcgcataatagtgttgcccaatgctgataaaatcctttttacgtggtcatataattctttggaattattgcaatgcaaattaaaaggtgcccgacagaaaggtgttatgctgtttttgtaagcttttttaggctacaaaagctgtctgggttaacttggaatgacttgtttttaccatagtcgtttctttggtatgttatatgcctgttctcattatggtaaatagtcatagcctaggctattagacttatttattaccataatttttataatttttggtgggtaatcttagagttttctattcggatgcccgtcaagtgtgttcattcgtgaaccttttagagtgttaaccactcggattctttttattatggctaaaaagcagtcggctagaatgcctctttgggcgtcgcgtatgcttttgtcatatgatgcatgattgtgctattattttgttctcaactatatgtttagtttgttaactaatcacatagttgggggctacacctaattaggtgcatctattcgatgcaccatattctttatcttttcgccctttacagtctttgtcttcgctactcggcagatcttggcatgaaaggtttgaagcactcggatcattatctttgagaaggctatgatggttgactgcaaaggtcgtgagggctactgtggagattatggatatcccatatctacacggcgatggtatttggactgaatacaggataccaaatatagatagaatattttatttgtgtctcgggtttgtttctcaacttgtacatcaaggaaataccttgagacttagtcggctacgactgtattttatctgtatatgcatattccgttagggatatagataaatttcatgtttcctcttttggcttctctcttgtccactcgtatatcgtggcatcactacatccatggcattcttcccaagcacaatggacccaaaacccgccataatgaggtatgtaaaaaaccacttgtatgccatctttttggctcttatttacgtgcctactgtcaagctctatggtcatcctttcaagagctagcgagtttggttcattgtaaaacccccgaatacaatctacttgaatcgtccttttactattttttttattttaccctagttttagtccatctttgtcagtttgcgccgtaaaccgtccgtcgccgctgcgagagtgcgacacctctttgtaggtttgtcctgaaaaccttccgttttgcccacgagacgggtagttatcctcatatcaatctaaatcggcctagaggctgattttgatctctaaatcggctccgctagccggtttagcttttctttttgcaaaacccatcttgatttggctctttggctagatcgaggtggttggcgactctaaatcactgcaaggcgtttagttgttgcgatcgtgcttgtcgacctatcaaaaaagttgccaacacgatttttggcgactccactggggaatgatctaatcggccatattacggccaaatttcgtttaatctagtagctaccgtttcgtcaaatcaagtttcggctaaacggccgaaattaatctattatcgctggattaatataatcggcggcgagggtatttggtcatcaccgaatccatctgaacacttgccgtgtgtactgaagatcatcgtcaggggcagcagccggctcagcaacgctgtttcttttgtttcgcactgcaacagagaaaaagatcaggctactagagccgatctactgagagacaagcagcaggaatattgtttctttttattgctgcacactgttaccgagaaggatcaaaagaaaaaatcaaagccggttcaatttgcatcggctatcaccaggaagtttcagtttttgtaaatttttgctacgtacacacacagtaacataccgacggaaatcaagaccgtatattaatctattcggtcaaatatttcggctatgagctatatggccggatttaatcaaggaatttcttcatcaactaagacgagcgggaacgggtccatcaatattgctacccaatacattagatccgatcaaggcgtcatgagaggaaatgtcctgctacctcaagttgtaatttcaccaaaggtaaccttcgattcgcccaacccgtcctttgctattcaaaacgttaataatcattgtgtagatgcatatgctacttctagttttgctcctatacaatatgcttataatactatgggagggtcaacgggtgtttatacggccgattacacgggaatcggctatatgcaaaacctagctaacggtatgtcacaccctgaagttctcctcccaagcctaaaattaaatttataaatcaccctaagaaaatgccggtgcaaatcgagagaaaaccctaagaaagtaatacaaataataatcgaatctggcatgtggaatttttcttgagttctacatgtcgaaattcactaacaggatttttagtggaatttttagagctctcaaaataattttaaccaattaaaattgagcaagcaatattttaattccagggaaaatccttttcttccttttctttttctttttcccccttttcttttcgagtgggccgccggcccattctccttcctcctctcccctccgctgggccggccgaaggccaaggcctagctaggccggccgcctccctcctcccacccgggacgccgataggtgggccccacctgtcgggcccgtctcctacctcgcgcccgcgccgccgcgcccgcaaccgccgccgcgcccacgcctccgcctcctccgggccacgtcggtcacgcccgcgcatgcgccgcacctcccgcgcccactctcctctctctcccgcccgcgcccgcgcccgagatggccgggattcgatattcgaattccgcctctgtctctcctctcccactcccccatgttggccggcggaatcccgcccctaccggccacgtccgagacttccctcccctatttaagctccgccgtcgccccctctctctttttccccatttcgccgaactccctcgtgctccccatcgctcccgcgccgtgcacccacccgccgccgccttttctgctgctccggccgccgctagcagccgctagactcgctgccgcaccgcgccggcgccgccgttgggttcgcaaggacgaactccaccctgtccgcccttcctccgtcgggattcgtcgccggaattcgcatcccctntgcgctccgtgagttctacctctaccgccgcctttcgccatggatgccggncgccgtgggtcatctccctctctctaatctctctcttctccttccttaggcaccccgaagcccgttccgcgttgcncgtcgtctcccgtgctttgccgcgccgttcgccgtcgtcttcctccgggccgccacttgtgcgaccgggaaaattgcctttcccgaacgctagtgtattaatccccgtccaagaaaaacccgggtacaccacaccaacctgattaaaagaaccatcttttatattcggataaattacattatacaaaggaccttaggcctgacaataaaataaacagagcgacttaggggctaacggtcatttaaagcgctcaatgggtataagcggactcacctagaacttctcaagtttctt

SEQ ID NO: 15569 - DNA, 2077 bp, Oryza sativa
  unsure (1)..(2077): unsure at all n locations
agttttcatctgtattcaggngatcacatgttccctcaggaatgatcacactaagaaaacgagcgtttcgctacctgaagcaaggggatttgaccgtcacagagtacctgcacgagttctatcgtttggctcgctatgcaccagaagatgtggaaacggatgaagaaaaacaagagaagtttctccaggggttaaaagatgagcttgcagtgcaactactcctagaggattatgaaaattttgagaaacttgtggacaaagccatgcaacttgaaagtgagcataatcggatgacgaactgcaagagaaggattgtcaacatcctagtatttccaggtggtaaccaaagacagcgcactgagccacttccgatcatcggatcttctgttgggtatcacgagttcctgccccaagaagatgaacgcaatgtagacaacaacaacatcattcaccaagatatcgacgatagtatcaatgaaggcacccagaatggcaaccctagcaattttgactctgagaaagactccaagggtgatagcaataatggtaccactgatgccgatgttagcaaggatttccaaccaccaattccaactcctagtcaggacgatcgttcccaggcggacaactcagcaaagaagacgttgatttgttacaactgcaaagaaccaggtcatttctcgagagattgtccacagccgaagcgtaacctgcgtcatcactccggccattatgcaagaagaagacaggtcactcgccttgtggtcactggagcaaacgccgtacctgtgaggcctcatgttaattctaacccatagtagaaacaatgtaccgatgttaagcaccttccctttttgtttaagacagtgcctcgtattcatgtaatatgggaaaaattggtaataaaaacaagttctaagaggattcttttggaagatgcggatatgtgatcatgtgtataattgtttactgacaaaggagacctagggtctcgtgccagaggaactatattctaacctcgagctaataaccaacctgaggatggaaaagaaaatcaagtgattaaccaaagagacatttgtttggactaagagtttcagatgtgtcttttccggatcaaaggcaatgacagttagtatagcttttggcgaaacacttcaaggtttcactgaaaggcagcaagccaaaggacctcatcgtcaccagaagcatccacaactctcggagtgaagagtacctggtggacaaagtttaagaggtgattgatagaagataccagcaaaggtgttgattatcgaaccaagaagtaggtcgaaaggtgattgataagagaaatctaaaaagaatacgtcagggctgaatgtgtaaaggaatactttgaatgctaaatgatgacaagcatggtatcttagtaatgacgagctgatctcgacgcatgacatgaagtgggtaacttgtatgaggttgactccaaagatatgaactatgcaaagttctggaactgaagccccatcttcaagtgccgcaacccagtcgaagtcagctaaaggttcaaccagggacaggtcaggtgaagagaagattcaatctgcaacaggagatcgagccaagcagtccagagtgaagaagttttgttaggcaagtttgttatagaagacggagcggaagaagtcagacaagaagagaagaccgcccaacctatcttcttgctagcctcctcgaatctcggggacgagattcttgtaaggggggtggatttgtcacgtcctgataaattcatcccaaaataaaaatcatcttctaaaaggaataatagaattaattaaaattcgaaaagaaattggcaaacattaaaatacgtataagaaaaattcgaatgtggcccggagaatttttgttaaattctccttggtctaaaatgagccctcaaattttacttgaattttcagagcaccggaaatatttattaaacaacaacaccattattcaaagttcaaataaaaggaaacctaaaaatccctcctcttcctctttgggccaagcccagtgggaagtcctacangggnttaagggggcg

SEQ ID NO: 15570 - DNA, 6749 bp, Oryza sativa
tttttggagatagaactgtgcagccggggtggttgttcagaatggttgggcctatacaacagggtatgttgtatagcgttggcttaatattgtttaattacttaactgttttgttaaaattctcaaatgtttgctaaatgctgcttttgcaaatggaaccctattatgccatcctttgttatcctgtgcacttgcatatttgctgcgtggcttgctgagtatgtcatatactcaccttgcaatcattcatcagaggaagagttctacaatgaggctgatggtgtggaggattaggtgtagccttggtcaagctgcctgtggagtggagccgtctgcgccgtttatttaatttccgctgctagaactttattgattgagaggaactatctacctctgtaatgacattttattcgcttattaatcagagtaatatttgtactctattatcaatttgttattgtgtgcctcggctgattcctggacgagggttcacacacatgtaagcgtttggaattttggatagaaattccgggcgtgacaagttggtatcagagcccctttaaccctaggttatgccaaatggttacccatagaagccctctgaaaaatattgaaaaagtagaactgttctcctccctttctcttttaattaaccaaactaatggcacatgcacttcataatttttttttaatggttctcattcaaaatttattccagtgttattagtactgtacatctattactgtactaatggctcatttaccagcaaaagttttacaatactgttttatttaatcttgctgcaataaaataaatttagcatgttgattttataatttcctttcatttcttttgaaaccagttattcaaaattacaaaatttgtgacctcgtttccaactgttttaatttatttcgcaaagcttggtttactttatttacttccctttttactctgattttctaactttattcaaattaatccaaaaacttgtgctattaattggataaaggtcttaactccctcctttcacttgtctttagatgccgcgttacaagcctgagtacctgtttggtgttgagggttttgtccaggagttgcgtacgatgtcctttgtcattggatttgggactgcccctttttatgcccagattcctcatgatcgtcatgaagagaagtgccgagtcaaagtcaccttgaacagcaatagtgaagaggtcccctcagtgatgtttgaagctggaggaagaaactacatccatgcatgtcaggaggtggcaaggattgccataggagagctccgtgatcgctacagtgatcaattggccgacactgagtatcgctaccatcctcgccaacctcagggaagtgaccgtggtagttaccttgagactgaaggaattgagaatgatgttaccacgaaacatttggttgagatgttgtgggctatggatgaaagtcgtgcagagactgtgttagcagctcaagatcgtgaagatcggaatcgtggtaagatttgcaagctagaagacaaggtggatcgtttggagaaggaattagccgcattgaagggagaagcaccgccgcagaaggccaggattcgtcttaccgcaaggaagagagctctatttgtccctcgctatcaactggcgccaaaggttcgtgtggtggagaaagaagttgctccagctcaagcggatcctccggtcatcatcataagtagtgatgaagaagatgaatccaagcgcaaccattccaagattgagtgggtagcaactcaagatgatgaagacgagccttcaatcgacctccgatgcttggaagaactagagtgacttgctaagtcgttgttttagatcgttgtgttagtttgcttgctttaagtttgcttgtgtgtggctcgcatgtgatttacatcagtggtgggatgtaattgcatgtgtttgtttgcttttgagtgttagaaagttggtgagtttagtggtgtgagagtcttcagtttgtaataatgaaactcagttaagatcaataaaagttaaagtaattctctgtcctaagtagtttccccggtttctcttcttgtgccctgtccatgccagatggtgaacactcgtagcaatgggaatggtcccaacaaccccaataacaacacaatggagagaatcccactctggcccaagttcttgctcaacagacacagcttatgaacatgatgatgcagcaatttcagaatcagcaaaaccaagggaataatcatgcacctccacagaacaagttagcagaatttcttcgtgtgaggccgcctgttttctctagtaccactaatcctgttgaagctagtgattggctgcatgccatagagaagaagttggatttacttcagtgtactgatcaggagaaggtctcatttgcatcacatcagttgcatggccctgcctctgaatggtgggatcatttccgccttaacaggactactgctgaacctatcacttggcttgaattcaccgctgctttccggaagaaacatataccatcgggagtagtgtctctcaagaagaaggagttcaggtcgctttcccagggatctcgctctgttacggagtatctgcacgagttcaatcgtcttgctcgttatgctcggaaagatgtgcgcaatgatgaagagcgccagaagaagtttttgagagaacttaatgatgagctttcttacccactcatggttggagattatcctgatttccagaaattagtggataaggctattcgtcaggaggacaagtacaatcgcatggagcagaagaaacgtcggattgctcaattcaagacacaacagggaaataatcagaagccgcgtcttactttaggaccccagcccatgccacagggaggttcttcgtctgttgttcgtccgcaacgtcagttcttcaacaacaatgctggcaacaacatccgtaatcaagctccacgtcctgttgcagctccagcacagcaacaacctgccaagagggagcaaggcaacaagcccgtggtgtgtttcaactgtggagatccaggacattatgctgacaagtgtccgaagccccgacgcgtgaaggttgtctctgctcaaagtaactctgctgtaccagcatcaaaggcccgtgtcaatcatgttgctgctgcagaagctcaagatgctccagatgtgattttgggtacgttccttgttaactcagttcctgcaacagtacttttcgattctggtgctacacattcattcttatctatgagttttgcgggaaatcatgggatggaagtagaagatcttagacgtcctttgatggttagtactccaagtaatcaagcactctctttgcaacgtagcccctctgtcagaatagaaattcaaggagtaccatttctggccaatcttatcttgttagaatccaaagaccttgatgtcatcctagggatggactggttagccagacataaaggtgtgatagactgtgccaacagaaaagtaactctcaacagctatgatggtcgagttgtaactgttcatgcattgtcatctgagtctttaaggtcaagactgaaccagataactttggaagagattcctatagtccgggagtatcctgatgtgttcccagatgatttacctggtatgccgcctaaaagggatatagagttcagaatagatttggtacctggaacaactccgatccataagagaccttatcgaatggcagccaatgagttggcagaagttaagaggcaagtagatgatttgctacagaaaggatacatcagaccgagttcatcaccatggggagctccggttatttttgtggaaaagaaagaccatacccagagaatgtgtgtggactatcgtgcactaaacgatgtgactatcaagaataagtatccactacccaggattgatgatttgtttgatcagcttaaaggtgccactgttttctccaagatagatcttcgatcagggtatcatcagttgagaatcaaagaggaagatatacctaagacagcttttaccactaggtatgggttgttcgaatgtactgttatgtcttttggacttaccaatgcccctgctttcttcatgaacttgatgaataaggtgtttatggaatacttagacaagttcgtggtggtctttattgatgatattcttatctactctcgaaccaaagaagagcatgaggaacttcttcgccttgcattggagaagctacgagaacatcaactgtatgctaagtttagcaagtgtgaattttggttgtccgaagtgaaattccttggtcacgtcatctcagccggaggagttgccgtcgatcctagtaacgtggaatccgtaaccaattggaagcaaccaaagacagtttcagagattcgcagtttcctaggcctcgcatgatattaccggaggtttatagagaatttttccaagattgctaagcccatgacacgactgcttcagaaagatgtgaagtacaagtggtcggaagaatgtgaacagagttttcaagaattgaaaagtcgcttaatatcagctcctattttgattttgcctgatccaaagaagggttttcaagtgtattgtgatgcatccaaacttgggttaggttgtgttctgatgcaagatgggaaggtggttgcctatgcctctcgacagttacgtccgcatgagaagaactaccctactcatgatattgagttagctgcagtcgttcatgcattgaagatttggcgtcattatcttttcggtactcatacagaagtgtacaccgatcacaagagtttaaagtatatctttactcagccggatctgaacataaaacaacggagatggttggaattaattaaggattatgacatgggaattcattatcatccgggtaaaggctaatgttgtagcagacgctcttagcagaaaaggccattgcaatgctacagaaggacgacagttgccattggaattatgtaaggaatttgaaagattaaatttgggaattgtcggtagaggtttcgttgcagccttagaagcgaagcccactctaattgatcaagttagagaagcccaaattaatgatcctgatattcaagagatcaagaagaatatgagaagaggaaaagctattggtttcttggaggatgagcaaggaactgtatggttgggtgagagaatctgtgtccccgacaacaaagatctaaaagatgcaattctgaaagaagctcatgatactttatactccattcaccctggtagtactaagatgtaccaggatcttaaggaaagattttggtgggcaagtatgaagcgtgaaatcgcagaatacgtagcagtatgtgatgtttgtcagcgagtcaaggcagaacatcagaaacccgccggtttgttgcaacctttgaagattcctgaatggaaatgggaagaaattggtatggattttattactggtttacccagaacgtcatcaggccatgactctatttgggtgatagtcgacagacttaccaaagtggctcatttcattccggtaaagacaacttattccggaagtcgcttagcggaattgtatatggcaaggattgtgtgtttgcatggcgtccctaagaagatagtgtctgatcgaggcagtcagtttacttcaaatttttggaagaaacttcaggaagagatgggttctaagctgaactttagtactgcttatcatccgcagacagacggacaaaccgaaagggtgaatcaaattttggaagacatgttgagagcttgtgctctagatttcagtggaagttgggataagaatctaccctatgcagaattttcatacaacaacagttatcaagctagtctacagatggctccgtacgaagcactgtatggtcgaaagtgccgcactccgcttttgtgggatcaaacgggagaacgtcaggttttcggaacggatatcctaagggaagcagaagaaaaggtaaagatcattcaagaaagattgcgagtggctcagtctcgacataagagttatgccgacaatcgccgtaaagatttgagttttgaagaaggagactatgtgtatcttcgagatgggacctgttatagtttaaagggagcagatgcaagctttttctttccatagccggccaaatgactacccggatcatcggtctactctacctcaatcaaccatttcaactttatacaaaaagtttttccgtaccagctccttctacctataccggaattgaaacacctaaagggaatttggtgtctttcttgtcataatgggaagaaatcgccctacccgttgtaaaataaggagcacctggttttgcccatatcccaagacctcaattttatgtccaaaacatacattcccaccagaagtagtcaccattattaggtcctaaagataatgtgtttggcagaggtacataaatgggactgttctttggtttaacaggacctttttttattggcgacccaaaccccccttaaaaaaccaagttgtccatttaaacccctccctgaattcacaccttcagggaataaaaggggccatccctttaaatttgccctcctttttagcttttttttaaagagcgggaatgcgcaaaaaaaaaatcacctggtaaaaaaatcccggtgtgaaatcccacaccctttttgggggtttttaacagcaattttatataatctccaaaactttcttaaacacgaaaatccctctgtaaaaggaac

SEQ ID NO: 15571 - DNA, 6351 bp, Oryza sativa
gatctagtgggcaaagcaagctcaagtcaagtagtggaatcctacaagccgaagggtaagggtgctgggggttagtgatcttaccatccaagaccctcgagtcccagaataaagggatagtagtagaaagttggtgctgtaggaagataagaatccaaagcctaaaagggatagccccctagtttgatagtgaaggatagcttactatactattcccgccactctactatatctatatgaaacacagcaacacattccacttatctcctgctgaatccagtgaaagatcacaggtttgtgctgctccacctactagatcaagtctatcatggaaatatatattcctgtcatcaaatcaagagaataaatggaatcaaaacgcatgatctttcgttatgctttgtaggcactcctgagaaatagcgtagttgacaagagaaagggaaatcagcaaagtcaaagaaaaaaacaatcaagaaatgcgtcgagtagtgatgtgaagtccattcgattgatcaataaggtggcggagccaatgtagtccacaataaatagtaaagtatagcgatccgttaagactgggttgcttttagttgtaagattgaaatgaaaaaggtgagtcttgattaagaatgatatgcctcttcggcgaactacctacacggaacttgtgtattaagtatcaattgaaatggtttactccttaaggagatgtacgaaccatgaaagaagagtgggtatgagggcttctttcatttgcattttgatctttagtagaatcgaatagaatagtaggcattgtcaaatctcaataaagtagcttgtgctactttctctttcattcctatgtgattgtttattgagtcgaggatagatatggcaaattctctggcaaattctctggttctctgctttcttcctctgatttatcagataaataggaaacttaagattcatatgctaggaatcattctttcctcgatctcgatggccaatctgcgtaagtaacggactatcctctttctccttcttgctccatgcataactcactgcttactaggtttaaggtacagctatcctcgttcgtcgtctggaactgttctattgtttatatcgatcgctcttatccccgttcttaatccccggggcaggctccctcatcactcaatcgctgcgctgattcgacatctgccgctttcttcccttcgttctttctcgcattaagggaaatgctggctttgcggaagtccagggttatcgggcttgagtggaatctttctcactggctttaacccgttcagtcgggactcggcgtcgagcacctgtttgatccgttttattgctccctatagattgtttcggacaggacctaggtctatgcgccgaccaaggaagggattgatcaactagatcgataatagggactcgcacccacatctggatttccgtccgctagagcagttgcgcgaaccgttgttggaatgatatgagaaaagaagggtgatgatccgcatagtagactaagaaatatgaaacatcccactacattcccttactagttagagaaagattagcttttcaggagttcgtgtcgtctaccactagaggagcacaagttggaattgagttcgtgataggaagggcaattgggaggtaaagatctgggaaagagttatttgacatgtgcctaggctagttgtcctaagaaggatcacccgtcgagagggcagcgaagagtaagtagagaattactttgagcttgtaccttcaattttcaatgaaagatttagtacttcttggatagcccttgagtagtgctaggaaacgaatcctgtagtttacgtacgttatcagtagtttctttcctttgattgacaagaaggaaaagaagctttgcgcgaggagcggcggggacagagagagtaggcaccgaagaagcttacccgagcaccgaactaaccaaaacctatccttttgctcttggaattgacaccggaaactactgactgaaagtactagctttcccctgtagaaaagaaagcataagcaactagtagtatctaaaggaagaagagtataaataagcatcttactctttaagggcaagctaagcaaggagaagttttcctttaaatctctagtttcaagcggttaggtcagttcgaagcttagagaaaagtggagttgaagttgggcatttaggaagttatgttgcggtatcagaccactctgtcgaatgagttgaatacacttattcaaaggggagaagcttcagttcaagtttccgtttttgttggaaatccagaaaccatatcagtcgaggtatttactttgttagtttccgttgctagagtaagttcaaccccgcggagtggagatctttttttcaagactgaagtgaaagttgggaatgaatagtatcttcaatagtgaagtccagttgttatagttcctaaaagtaaaccattggctggctcacgtactggcctggctgcttagctttcttaaacacagaattcctggtagatcgattggctttcttatccttactcagctgctcttcaagtgcttttaccaaagcaggtatttaggcaagtaaagacaaatccaaatcttacttatgaattgaaaagggcagatactagccaagttctccttctgttaacagctcagttcttacaatctatgatatcaattggcattgcagctttttgttatgctaagtattcttcaatgcaagttggtgatatcactcattcaggacatggctatgggctgaagggcaggccaaagaaatgctcgccgggagggctgcctagggccttgttttgtattctgaaagtagtttttcaggtatatttagcccatgaggattactaatattagtagttagtagctatttgaaggtcagagtgaagtaaagcagcccatttgggcattgtcccccgctcttcttgcatagaaacacaagctagccagtgaccttctagctaaagtagtagcagttgcagccattacagaacaccttcaacttttccttgaacatatattgagagaaatctatccatgagttcatcatggacgacgaagcagaacaagctgttcgagagggcgctggcgacatacgacaaagacacgccgggccgctggcagaacgtggcgcgggcagtgggtggtggaaagacggccgaggaggtgaagaggcactacgacaagctgcttcaagacctgcaccacattgagtcggcaggccgtcagggttcccaatacggcggcagcagcagcagcaaatccaaaggtggcagcagcagcggggagcagaggtagttaagtaatacgaatccatactaggaaaatgtgagtcctaggcactggaattggttctcttctccctaatccctataagccagaaagggtaataggcttcagtgtaagcatttcctcacacttgtcttcgtgggccactttatgttgagcaggaggcgctcactgttctcgttgaagctgtttatacaggttttggtggcaatccgagtgagattgaacctgctttttagcttcttcttcgctcttctctttccaaaattcactacgaattttgactacctccttagtcaccctatccactctcgtcctgttttcgggttccctttcaggggatgaggatatttcgatgatttatccccccgtaggtggaaaacgcgtgggtgagtagagtctgtgctttgctttggggggcaccggcaagaagcttctcggccaccctactctgacttgattagctacttactagtaactaggatcgttcaaacagtcagtcagcaatgcgtacttctttcctagttgagtggatctgcgtagcagagcccaatcttctaccacaagctctgacctgacttgttgtacttgattcacccacgtaaatagacaactgggataagggcttgaatcccataaaagagaagtgagtccgcatgtcggcaaatgatttggaattgaaactggccacagaggaaaccgaagccctaactccccattctttctatcttacatcgccatcgagccctggctgtagagtcacaggtttataatcgcaatggatttctgttttctttggcttttccattcgcttcgttcaaccctgatctggatagatagctcggcttctattagctgagaatggttttgtcaaggaaaggtttcgctatacaacaacaatgaactcacttctgatcaaattggatgaatcggtaatctttctctgtcttgtgagagagagtcacttgctgtattgagagcgggtgggtgactagtcaaaagcaagagatttcacaacttctctgttgagcttacccaactactttatccttaccgaataaccagttctatctgaataatgcctttcctttctattggaatggaacacactgactatctattgaatcgacttgagaattctcgtaatataatcgcttttcctatctattggaactgcacacactcccattgctagcaaagctcaggagatagaatttgagatgaaggaatagcagagttgacttctttcccgggcatcactcactctcgcaacaattcggacagggaagggatataatccattcaattcttctgcctagcttttggcaatcaattccagatatcggaacagagactggaagcagcaaccagggctccatagtggtgccgtgaaaagagcctctcagtattagatagaaaaggctttccttgcctgcggatctttgtgcccttcaagtgccccttgctgctgtgggtaagaacgaacatcgttctagccagctagtgagagtttccccattgatctttgatctggctaatcaattttcaggttttttatttccttcaatgccgctggtgcatagtcagacttgcaggggcagctcaatcaagtagagacaagaccagctgttgaagcttggcagtggaatccaagagataagaagtagtatagagataagagaacgggattcaaagtagtagtagttgaaataagatagagcaagcaagagtagtagtattagcaaagaagattagaattattgtatccgctaatgggtagttgatacatacggacttagaagggcgaccctcacttccgtcaatcggctactggttctcggctgctaccatgctacctttttacaatcaatgaaatggcgctcacgaatagataggagtccgtccttcgaaaagaagatgctcgagcgtaagttatcgttcgtaacatgcctacgttagtcaccaaaagcaggtacggtttggttaccggaagaaaccctgaactcggaaagatatgctaactgggtgattagaaaaaagtaaggacacattgggttcgccgaacccttcaatcactcatccctcctgagatggaccacgagctggtggcaaaaaggataaccctctgactaggattgatagcgattctcttaataaaggaatatgcctcgtccgaggaagaatggcaagataggcggatgacgaaggagcagggtgaatagaaacacaatctggttgaagaaaaggaactacccccggggggccccggatagctacgaactggaatggaaggttatccagatccactagccacttctgttggtccgtcctttacagcaagaaagagatcatcgaggcggaagaaagatgaggtatcgatctcaaagaaaagaagaacttgaaagaatcagagattcaagtcagaagtgagggataaggagtcactctcagaacgataagtagatctcgcatcttcgttcctagtcaagagatggggaaagtaggcatatgaacggtaggaaggctcctgcttctttgccaaggactattaccgcgatgccgggccaaggagcggatctcggaataaagacatatccgtcactagcaatggttatcgaaaccttgaagggaatagacaagtacagtagggaaggaggtactccagggttaggtaaatatctgggttcgagctaggggttatattggttacgaggaagaccagaaggaaataaagcaggttagcaagcaggaggcaggaaagcaagatagttagcaagccggatcgaaagatagggcctttcgcactaagcaaaactgggtggatactttattttattgacctgttgaaaggaaagaaaacacctcgctgtgatcatataacctttatcgtaggatggtttgaggaaaacctaccggccacaatgattggtgtaaaatagggttaaattattcccaaatccaaaacgaatggggtatggtgtgcataaggaaccccttttctgcaagggagggacataaaccgatctcttttcc

SEQ ID NO: 15572 - DNA, 1627 bp, Oryza sativa
  unsure (1)..(1627): unsure at all n locations
atcacgatacgattaatctgatggcgcagcacgaacaggaaatagataacctagccctgggaaggaaagggaacagtttagtccctccaatccgtcaatcaacgatagggttacccagaattctaattaataggaaggttggactacctcgaatggcaacatgctcgctgattcctaccactcctatctacataactgctccagagaagggaaggcagatgtcagtgaaacgggtaataatacaccctcgactactgggtgagtgagaaaagacaacatcctcctccggttacactccctgtggtgctttcagcgggggattcgttatggaaagcgggaaactcaagtaagtacggcttttcgatagctaatacgagttgggatgacttgttccttttttattcatgtccgcgtttcttatagaggttagtaaatcagcaatagtgtccttgcccataagactctaattctaggttcctcctaatttttctataatcaacatgttctcttttttcttttcgttttggattctaaagcatatacgtgaaacacaatctactaattttttatttgatctatatcttgtctactagtatttataatacttcaggagctaatgaaactattttagtaaaattcaattctctcaattcctcggcgatcgcgccaaaaacgcgagttccttttggatttcctttttgatcaatgataaccgctgcattgtcgtcatagcgtattattataccgtcttcgcatttgaactctttacatgtacgtacaattacagctcgaattacttcggatctttcccgagagaagcaaaaattactttcgagggtttagttatggaagccctacccaacggaatgttccgcgttcgcctagagaatgacaccatcatcctgggctatatttcaggaaagatccggtctagttctatacgaatactgatgggggatagggtcaaaattgaagtaagtcgttatgattcaagacattatcacttatttattctcattataacgtatgcctttcgctgcgcgcctttatttgcttcggaaatcaaacaatgcatttcttctcaacataaacatataccggtctttctctctagcctatacttgaccttgcgtacaagcctattatcctatcggtatgcctatgtgacccatatgtgctaaaccggtacttgttacttacttctatctattaaacgttaccggtacttagttaccgtgacttaatcatgcttagtactaaaccttactacgtagttcaatccagctatactgagttctccatgttttgtaccatcactttgctctttgcttaaggcactcgaaacaaagcttcaagtaggaagtttgtgggacaattcttataggtggtcttaccaactccttttggntncttagaanggaagtttnaacagcaccattgcccgaananaacctggaacttganctgcaagtgattgaattggaacgattatatttcgcttcattgctaaaatnggccgaattcaaacttttcgnatgtcaagtggtatagaggttgacccgacctagagatatcgttgttatacctcaagaagaatccgttcaccggggaaggacgggccggggtg

SEQ ID NO: 15573 - DNA, 1149 bp, Oryza sativa
  unsure (1)..(1149): unsure at all n locations
tttagaatccaaancgaaaagaaaaaagagaacatgttgattatagaaaaattaggaggaacctagaattagagtcttatggccaaggacactattgctgatttactaccctctataagaaacgcgaacatgaataaaaaaggaacaagtcatcccaactcgtattagctatcgaaaagccgtacttacttgagtttcccgctttccataacgaatcccccgctgaaagcaccacagggagtgtaaccggaggaggatgttgtcttttctcactcacccagtagtcgagggtgtattattacccgtttcactgacatctgccttcccttctctggagcagttatgtagataggagtggtaggaatcagcgagcatgttgccattcgaggtagtccaaccttcctattaattagaattctgggtaaccctatcgttgattgacggattggagggactaaactgttccctttccttcccagggctaggttatctatttcctgttcgtgctgcgccatcagattaatcgtatcgtgatcctggtatcgctcgagcatctctttctgatgaaacctttgcccttgctttctccactacacctggtaacgcacagtgcttctttcttcgatctatccaagggaggcttattgctttaagcagagtatccagttctgcatccgttaatgatttctgaacatagagaaaagaattgatagctaaagtttgcttttagtagtttagtcaccaatcaaaaaagtagctaggctgaagccgaagcacattccctagcgtactagcgtacgagagaagcacattccctagcgtacgagatatgccttttaggaaagagatcccttttatgagcaatggtttttgataatgctaacccctgttcaaagcaaaggtcgaagctggccaccctttactcggcatccgttctcatatgcatagatgctccaataagcttcttttagttagccaagcgggtcatgtggatgggtcaagagatgcgtacaatccgtcacaacgaagcgctcacccttccgctggggtggtttggtgaatgaattacanacatgtattagaaaaaatttacttttgggggaaagaggataacctccattgaaagagagcggtattattgttaggggg

SEQ ID NO: 15574 - DNA, 1199 bp, Oryza sativa
gggttactttattcccggccatttggggaatttggaggaaactttccacaggaacagtgttcccttttcgccaggcttttggtaccttaaaattccaattattctaaagttggtccaactcgtgttcattataaggcccgcagggtgttgaattccgcgaatatcccgaagtagaggccccctaggtggggtttattattatagggtgacagggttatattattcccattccattattatttgttcatacaaaggttaaaaggcaggttaaataaagcagtgccacggcgggattttaattaagcgataatgcaattttttaatcaacaatattttaccaactgggattccaatatgttcaagatatatgtgacttgccttgctcaagaagaacgggcttcgggaactttgggcagcgaccgcaaaacacggcttcgggaacctcgggaacgacgaaaggttcgcgaagcacacaaacaaagctacaagcgtataaagaagcaataacatcacataaaaccaaagcacagggttctttaggttataacaaacattaggagacttgaacgggtcgattcggagctcgtatgcccagaatatgatcatccgaagtttaatgctgttatatggagatttgcgaattattataattaagctttgctattataaaacaggtgtaagcgctagcctggaaaagacaggaaggctgcgctgttgacatgcggaccccacatgtcaacctaaaggaccgcggtagaccgaatacacagagacggtccacgggtcgacggaagcggaccccgtgtgtcaaccgaggcgagtggccaacaaacggactccactagacaccacacggcctgcacacgtggaaaccacgcggctaccgagcgggcacactaacacggtcaccacgcgcacaagcgaacgtctgccgacgccgatacacgggtaccggggccgacaaccgcacaatggcacgggcgacaccgaaaggacgaggacagggcagcgagggagagggaaccttaccaccacgcgacgaggcgtgggagcgacaacgacgaacgggcgcggcggagacagacgggcacaacggagacgaacggcgaggggacggcttcggcggcgatccttggacgaaagcgagctgcggccggcacgaggcttgacgacgcggagccgaggacgaacacgaggac

SEQ ID NO: 15575 - DNA, 1610 bp, Oryza sativa
  unsure (1)..(1610): unsure at all n locations
cgctcctgtttcagacaggttaaatttataattccatgggtgcggcaacttttgattccccattaaagagggactaaaacccaaacatggtggtccatttgattttgagagaaaaaactgcactgttttagggacngaaccctaattgggttctggaatatgggcaaggactgcaaaatgcttccatcccaggaaaagcttccttctattgtgtgttaaaacggaatacggttcttatgcttggaatcgccctccgaaggtttatttcccttggctcggcctggagtaggtcggggaaaaaacacaactttttcattaacgacaattcttttttgaggctgtcaatgaagagaatggttgctataatttattgcccagtcagggtgcagcaggaggagcattggtgcattgtttctgctatgggttctgattaacacgaggcttacggggtcgggcgtttgctccagtgaccacaatacgatggaaatgtctgcttcgtggtagatggcggtaatgtgaggtcgatttgctttggttggggacagttttggaagtaatgcccttcttcactgcagttgtaacaaacaataactttcttacactcgggttcttcatcttgaacttgatttctcagctgctgtattggaacttctaaagggacaacgcagatactggcctctgtcttgtcagctggtggctggggctgaaattgagcattgacaccttgtggtagtgcactcattgaagttggagctgttgcaacgcgggctataggactgcttcgggatgcatggatgacaattcgttgaggagcaagcttctgattgcagggagttgcgtggactgacgtgccggcagctatgtttctcggttttgggcacttgtcggcgaaatgacccattccttgacaattgaagcaacagatgtcttcccggactcggcattttcttttctcatttcgattcctctgtcctggcactggagttaggctgaaactgtaatcttggcgaggattggtgttgccttgatgcttctctccgttggaactggcgggttggttagccatcttctttgtcagcagaaaactgaattgacaatcttttggtacatgatcagttccttcacaaaagaaacaagtgatcctgctcgttggacacctgtcgggcggatggtcttcctcacaatgaacgcatgtagaggcacacgagctggcaacatgaccgatttctccacaacgagagcatgccttaagttctattttattctggttaaagccttggggagacttcgcatcttcatcatctgaggagacttgatctgaatcttcactaccagacactctacctccattagctaaaagatgctctgtcaactgttgtgcacctcgggaggaatttcttctccgatgttttgtcattcctggtggaggccattctgtgctggtaatgatcatcttacggacttcatcttcggttcgcattggtgtttttcttttctgctgaggacgctcccttgcatagtgcacttgctcatcacacgtaaagcaaatgttacttgcttcttttgggccaacaggtggcacgtcatcatgggtccttcgggatgctgtc

SEQ ID NO: 15576 - DNA, 2154 bp, Oryza sativa
  unsure (1)..(2154): unsure at all n locations
ccacgagtgaaaccctgagagcgctttgaganggcaatgnngagagcttgtgctctagatttcagtggaagttgggataagaatctaccctatgcagattttttatacaacaacagggatcaagctagtctacagatggctccgtacgaagcactgcttggtcgaaagtgccccactgcggtcttgtgggatcaaacgggagaacgtcaggttttcggaacggatatcctaagggaagcagaagaaaaggttaagatcattcaagaaagattgcgagtggctcaatctcgacataagagttatgcccgacaatcgccgtagagatttgagttttgaagaaggagactatgtgtatcttcgtgtcacgccttttcgaggagttcattctttttcataccaaagaaaaaattggcaccgcgttttggtgggaccttataagattgtcagtaaaagaggagaggttgcttatcagttggagttacctcaatctttgcaggaatccataatgtgtccatgtgtcacaattgaaaaagtgtttaagggtacctaccaaagaagctaatattgagcagatagaagtccaagaggatttgacttatgttgagaaaccaatccgtatcctggaaacaagtgagagaagaaccaggaatcgagttatccgtttttgcaaagtcccgtggagtaatcactcggaagaagaatcaacttgggaacgagaagatgaattgaagttagctcatccgcacctgtttgccagttcttccgaatctcgaggacgagattctgtttaaggggggtaggtttgtcacaccctgaaaattcaaaatatataaattgttgtttaaatggaatttctagaatttattttaaaagtcttgaaaagaaaatctaagtttaattaataaattccaatataaaattgggccagataaaatttcattaaatactttgcttaattctttaattcctagatttttctgggatttatttgagctaaggaagtatttttaataaatggaattgcatttaagaaataatttaaattgaaaaggttttaaaaagtcttcttttggctttgggccgaaagtcggcccaaaacctctcttctctctcctcggcccagccggcccagtcagccgcgcgcgcgcgccctcgctgtcgctgacaggtgggtcccgcctgtcggagccgtcgtcttcctcgggccgaaaccctagcgcgccgccgccgagccgccgccgctgtttccttccaatccggccgctcctttccttctccggccgaatcaatagaggggaaatgatctccgggatctcctctaccttttctcctttggaatcttcggctaaatcggtttggaaatcgatggattcgagttcgaatcggatcggctttcctctctccaagccgcgagtttccttcgccgttgccgtcgccgtgggccttcgccgccgcctccgagcccctttaaaaggacccccggtgtctcctctacccgtcgcagctctcgccttcgcctctcgtcgccggaagagctctagcgccgtgtgccctagcttcgccgtcgccgccgccgcttcagccgtgctccgccgtcgctccagctgtcgccgtcgctcgggaagaccgccgccgtcatcgccaagtcgccgccgtcctcgtccgccccttcgcagccgtcggaacccgccggagcttcgtcgccgtcgacaacccgaaggtagccgccgcttccttctcgtcgccgtcgccgtccgttgcttctccgccgtcgttttggtcgtcggtgagttcgccgtgccgtccgctacccgttggtgtcctccgttcgtgccgtagcgccgccgttcgccggtgagcgtgcgccgcccgagccgtctgcctcgccgagccgccgccgccgtcggtgacgtcatcgctggcgtcatcaaggccgtccgccgtgaaccgccgtggacccgatcgatctcggccgtccatcttgaatcgggtagatctcgggcgtccgttcgtgtgaaccgccgcccgtgcgccggtccacccaaaccctagcccgctgacgcaataaatccccttttccttttcaaaaataattcattattgcgtcataattcaatttaaaccgatttaagtgttttaatccgatttaatctt

SEQ ID NO: 15577 - DNA, 4947 bp, Oryza sativa
  unsure (1)..(4947): unsure at all n locations
tccttgnttgattcgntgcttaggacccttgtaanncanttaccgatctcataaactcagtattccattcatcccagcagtaccaaaatgtccaagacctcaaagaaaagttctggtgggtcagcatgagaaaggaaatagctgaattcgtagcactctgtgacgtctgtcagcgagtaaaggcagaacaccaaaggccagcaggtttgctacagccacttcagattccagaatggaagtgggaagaaatcggaatggatttcatcaccggtttgcccaggacatcatcggggcatgattctatttgggtagtcgttgaccgactcaccaaagtggctcactttattccggtgcacactacctactcagggaagaaattagcagaactctatctagcaagaatcatgtgtttacatggtgtacctaagaagatcgtgtctgatcgaggaagccaattcacttcaaagttctggcagaaattgcaagaagaattgggaacccgtctaaacttcagcacagcctaccatccgcagactgatggtccgaccgagcgagtcaaccaaatattggaggatatgttaagagcttgtgcgcttgactttggtggagcatgggacaaaagcttgccgtatgctgagttctcctacaacaacagttaccaggctagtctgcaaatggcaccgtttgaagcactgtatggacgaaggtgtcgtactccgctcttctgggatcagacaggggaacgccagttgtttggtacagaagctttaaatgaggcagaagaaaaagttagagctgtcagggaaagattgagaatcgcgcaatctcggcagaaaagctatgcagacaaccgccgaagggagctcgttttccaagcaggggattatgtgtatctccgtgtcactccgctcaggggagtacactgcttccaaaccaaaggaaagttggcaccacgctttgtgggaccatatcggattttggaacgcaggggtgaagttgcttaccagcttgagcttccctccaacatgcttggcatccataatgtgttccacgtctcccagttgaagaaatgtttgagagttcctgaggaacaggcaagtccggatcaaatcgaaatccaggaagacttgacgtatgcggagaagccaactcgtatcctcgaaaccagcgagagaaggaccagaaacaaagtaataagattctgcaaggttcagtggagccaccactcagaggaagaagccacttgggaaagagaagatgagttgaaggccacccacccgcacctcttcgccagctcttccgaatctcgaggtcgagattccgtttaaggggggtaggtttgtcacgccctgaagtttccccctctccttgctttaaaaattggctaaataaatcgtccgaagaaattatcttaattatcctagagctaattccctaattaataaatgcaattaataatcggaaatgcatggtggaatttttcttgagttccccatgctccaatgcattaacaagatttttagtggaattttcagagccttggaaataattttaaccaattaaaaatgagcaagcgcaatattttaatcccaggaaaaatcctttttcctttttttttcctttttcccttttcttttcctctttttctttcttgggccgtcggcccgatccagctcgcccagccgtgttcggcctccttccttgggccggcccgtttccccttccccctctcttcgggacgctgacaggtggggcccacctgtcaggtcgtccccttcctccagctgccgccccacgccggcaaccgccgctgccgccccacctgattcgctcctcccgcgcccacgccacgccgttcccgcgtcctccccacgacgccgcccacgccctgtcgctcctgccccgcgcacgcgctcgagagggcggcactctgtctctctctccaccccacgtcgccggcggtttcggccacctccccggccacgtccgcccccttccgcacctataaatcgctcccccgagtcccctctctcgtttcccccatttaccgtcctctcccacatcccctaccgcacccgcgccgtcacacccgagctccgccaccgccgcccatctccggtcgcgcgccgccgccactatagccactgccgcgccgcgcagtcgccgccgtcgcgctcaccgagcccgcccgcacctcggccgccgcttcgttgccgcgaatcaccgccggagctccgattccttcgtgagctcaccattgtttccatctccggccggccattttgggtcgtcgcggtcgtcctctccatccctaactcctctcctccccttctttgggtgttgccgccgccctccgcgcgtgagccgtcgtcttcggccgccgccgtcgccttcggccatgcgccgccgcctttcggccgtcgccgccgcttcccgcaccgtcggtcaccgccgtcggtggccgtgcctcgccgccgcctcgccttggtcggccggtcggccttgaggccgagccgagcccggccggcgcctcccttgcctcccctttgagccaccgcctggtggggcccacctgccaggcgccacctccctccctttggagccgctgacccgtggggcccacgtgccggcgccccccctttggctgacgtcagccctgggctttattgcgcaataaagtgattaaggctttttctttattagtaaaaacacagtttatcttctaaaattcataagtaattcatccgagctccgtttaagtccattcaagtctcagtaaatcaagaaaaatgcaaagaatccattaaaaatagttttgtttcctgtttcagtagtcttatagcatgttttgcttgtgtgctttgtttgtcgcgtagatttcggccgtttcgtcgatccgcggtttctcgaagacgttactgaggtctcatcagtgcgagagcaaggcaagtcatgcaatacgtttgatcatattgtacccaatttacaaatatcccgcatttctattaaatgttgcattcttttacaatatcatgtgggatgggtcctactactcagccatatattgtttaccttatgccattgacaacttgggtattaaaatgactagatgttggtttaggaaatgcttagccatgcttagttctactagtacacaaaaagggaatcacattaaagcatagactttgattattggcaatagctttggattggtgccaccgcaagggtgttggttaattaaaatacactgaatggtgggctgtgggtgcatggttttgctggtcgcacccatggcaattagggaccggttcacgggaaaccctgggagacttaccgtgcttaccacaagcgggagtgggtaactgcttgatctgaagtatagctcgaccctttcctaggcaccggtggcgagggtgggcgtgatggagttgggtcggccggggtgtccggttgtccagctgccggattcactgcggcgcaagaggggaccgcctactgccttttgaggggtgggggtgaaaccttagcgtggtgtggatggttaggggagggttatgtggagggtcttgtcacgatttccccctttgcagtatcatggtgatacttctgggcatggcgacatgtgtggaatcgtgtcttgtgggtacagttgtacacctctggccagagtaaaactattcgaatagccgtgcccgcggttatgggcgatcaaccagattcaccgtgattagtctcacccctagtttaacttaatgaacgggtgtagttcaggtggttggttgggcctgttgcaacgtggtgtaacgttgaacagtgtttggttaatattgataattgctacaaactgtttactgctttcaactactgcttttaaatgctatctttatgcaaaagaacccctagcctcctttggttatatcctgcatcatacctcctcttccggtatgacttgctgagtacagtgggtagtactcagtcttgctctcttttctcccacaccagagctgaagatcttcctagttggagctgttttgtcaaagttggtttcgtcgctgccgtcaaggattgcctgtggagtggagtcgcccgctgctgaagtcaagcttcccggtttagctcgcttttatcttttccgcagcatttgtaatcttttctatttttgtaagacgtggatctgtatgtcaacaattgtcgtttgtgtaccctggctggtcctggatagggatttaatgcacattcagcttagaaattctagttcgagaatttctgggcgtgacaccgcggggtggtcgtcgtcgtcgcgcccgacctcgccgccaccgcgctggatccaccgcgcctgacctcgctgctgccgcttgccgccgtcgtcgtcgccgcggggaggtcgtcgtcgccgctgtcgacgggtggtaccgcgactacggtatttggatggtatagggatcgtcgataccaaggtatatgcgagattgatgtaaaagagatggagacatggatttttatacaggttcangcaccttatctaacaggtaatagccctacattctattgggccgaaaccgtgttgctctttattatctggatcacacaagtagaatatttggngaaaacctatctagnttgtcgtcaacttggtggcaggnataaccaacacgtagtcaacgacaaggtagtctttcttctcgagcatgaacttctcgagatcagagatagcgctagaatcctnttagccggccncgtaggcaccggatgccgtatgtttaggctaatctctgaattcagaacctgcggtgtgggtggcttaagatatggtggggctgatggcctgtggcttcgtttttctcctgggggcttgttattaaccacagggtgccctgtgcaaagaattggagaccattgtaccaaccgaagcctggaattatataaacttatggcctcctttcc

SEQ ID NO: 15578 - DNA, 2088 bp, Oryza sativa
cggccgggttgtgggggaaccacacatttccggttatttctccccccccatttttatataaaacagggtttaaattgagggttttgggtggccccttccacaatgtgtgaaccttaaaaaggttttgaataaatataaaaatccaaacatttttttcttcttcccacggttctttaaagtgctttttttaaaaaaaaccccctcaccctctttggtataaaccggaaaaaacctcctcttcgggtaaactttgctaagacagggggaaagaccacagttgtggtctcttttcccccacacaaaagttaaagttctcctagtggaactgtttgttccaatttgttttcgtccctcccgccaagattccctgtaaagtgaattgcccctttctaaatcagctttccggttaagctcgcttttatcttttccgcgccattggtaatcttttcaattttggtaaaccgtggatctgtatgtcaacaattgtcgtttgtgtaccctggctggtcctggacagggatttaatgcacattcagctttagaaattctggttcgagaatttctgggcgtgacaagttagcatcagagccgaccttgaccgtagggcaagccaactagaaaacctaggagccctctgaaccctttttcatatgcatatgcctttttcacttggattttgtttcgggaaaatttggggtttgcctctttggttggtgggaaaaaaaatcttggtcgttcattcggatcggatctttaaaattagctcagtctagggttttagtaaaattttatttggagtttattcgacagtcagtcgggaatctattgggggttatgcattaggtcgtgtctatgttcgatggggcaatgttatgcgcatcattttccatgcaactagtctatgcattaatttattgtttagtcagttgcattagtgtcttttgtctcggttcgtggaaaaggttgttccatgcataaaaatcaccatgctaggttatttatttgagtcatttgttgctttgtttaatttggatttgagcatgaattggttcctatcccttgtctactttagatgtcagtcctatccctcgattgcaagcgccccccgagcttcagagtcgccgcccttagctttatcgtcttcttagtctgtttgcttgctagttttcgtgtttaggtttgttgcttgagggttagtcggtggtcgatatcatgtgtcagtggtatgactgcctcaattaggagttgcgtgcctctttttcagtgttttaatcaagattaagataattgcacttaaattcataagcaagattagtttctgagcctcctgtttttctttcttttctcatatttctacctatccccctcagatggtgaagacaaggaatggttcccgtgactccaacaacgccagtggcagcgaagagctgatcgatggagcacgtgccaacagtgcatctggcaacagtccgtccccaccgcccgagaacccaacaattgctcaggtgttggacaatcagactcagatgatgacaatgatgatgcaacagatgcagcaacagtaccatcaggtgttgcagcagcaagcacagcagcagtagcagaacctgtagtttggtccctccacctcctcagtccaaactattagaatttcttcgtgttaagccgcccaccttctcaagcaccaccaacccaatcgaggccaacgactggcttcgtgctattgagaagaagctgaatcttttgcaatgcaacgagcaagagaaggttgcttttgctacacaccagctgcaaggtcccgcttctgtttggtgggacaactacatggcgacccgtccggctggggcagaggttacttggacagagttttgtcatagtttcaataaagcacaagttcccgagggaattgtggcacaaaagaagagagagttccattccctgcaacaaggaaccagaacagttatagagtatttgcaagagttcaaccggctcgcgcgctacgcccctgaagacgtgcgtaccgatgccgagaggcaggagaagtttataaaaccccaatcaagccgctccaagaggggactgctctgc

SEQ ID NO: 15579 - DNA, 989 bp, Oryza sativa
tgcgtgtgatatgtaccggcgcgtgtaatagaaaacgacgtgtattgagaggaagtgcgccattgtagagagcgagcggcgagtagaaggagaatgagtaatacacgcctcgctatatgatgcggcgagagaatatcggcgggggaggagtccaccgcctttaaatgggagagtggaaggggaggtcggccgagaaaccggagaagtttaggacggggctttaagatggaatccaagaggcgggcttttagaaggggtctttaccagagccttgatattagagggaggtggaaatcttgggaggaggcgcggcggactatccctccttgtgtgccggttgggcgcccaactaatcacaccgcttggaggaaaaaaccggctttcctcccccagtttgtgattgcgtgggtggcttcacacacagcccccaagttttgggtggttgtaagctcggacaccaggcctaccatggatgtcaggagtttactgaggtggcatggggcttggctgcaaccaaccaccatttctatgggtggtccgccaaatctttgccggtgggttgcgcttgcatcccagtaagctcctagttgatttgcaggaaagtctcattggtcgaggcaggtttgtctcttgggccccgcaaaaaaaggttttgggtcacctgtctgtccgcgcattcatgacgcataatggatggagcccgacgatagggagtatatctgaaggcgcgccgatgatatgtagcccatgttttggagatcagatggaaaatgcgaggtttgtttgtgctgtttgaaggttgggtgtgaagatggaggtagggagtgttctcaagagggcaaaggttcaaacggctgttgagatattagtgaatggggagaacggtcaatgtgtgtacgagagaatgagaattctgaggatagaagctgaaaactgtgtaagtgaaggaggatcattagccaccggtctacgcagctgagtagatccca

SEQ ID NO: 15580 - DNA, 3583 bp, Oryza sativa
  unsure (1)..(3583): unsure at all n locations
ctcttcccccatgcgacacgcatgccagtgggccccaccatttatcttgcctccacatgccacgtgcccctatcaaacatgtttcaccaaaggtattcacaatgtttcactatgtatatatataatgttgtagtatattgaaatattcttttgcaacaaatcacccacatattttggaaaccctctattaatgaaattcgtttcattttttgttccaccaaatatgtttcacctagtgtactcacaatgtttcactatgtatagatctaatgttgcagtgaacgaaacattcttttacaacaaatcacccacatattttggaaaccctctattaagagaattcgttttattttttgttccaccaaaaatgtttcacccagtgtactcagaatatttcactatgtatagatctaatattgcagtggactgaaacattctttcgctatttgctgaaacattatttttatataaggtaaaacaatgcccgatttaaacgatagttccaccaaaaatgtttcacccagtgtactcagaatatttcactatgtatagatctaatattgcagtggactgaaacattctttcgctatttgctggaacattattttatataaggtaaaacaatgcccgaattaaacgattgaaacattttcgatatacttagtgaaaccaattccgatatatattggggaacatcgtgtaacttttaaaaatattcaataataagcttaagaaaaattcgccggaatatatcatgtggtggttttgttttgaagaattaattgcaacgaatttaatggtgcaatcggatcatgatttgaataaataatttaagaaaaaaaatagtttaaagtagttttgtacgcatgtgtggcgctgacgtcatgcccgatcggtagtcccctccgataaataaataacaaaaacgcataaattggacttcgtgttgtcaggtattttttagaactgagttatttcttgaccgccgctgattccctcaaaatttctgcatatatatatatatatatatatcctattatttcactacttgaaacaggcgaagatggcgccaccgtgcggccgcgtggtcctcttcccgatgccgtacccgggccacaccatccccatgttccacctcgccgccgtgctccgctcccgtggcttctccatcaccgtcctccacaccgagctcagagcgccggacccggcggcgcatccgccggagtaccgcttcgtggccgtggccgacggcaccccgcccgagctcgtggtgtccgaggacgccgcggcggtcctgacttcgctcaacgagacctgcgccgcgccgttcgcggaccggctggccgcgctgctcgccgaggagggcggcgtcctgtgcgtaatcgccgacgtgatgtggtacgcgccggcggcggcggcgccagagctcggcgtgcccctgatcctgctgatgacaagcagcgcgtcgagcttccggacgttcatggagtaccctcttctgcttgaaaggggcttcttgcctgtcgacggtgagtttactccatgtgtccatcgcttggagctctgtgtttttctccctacttattttgcggaaattatgaagatcatcaagttattagaaatattttcaacatattaggtagattttctagataacgagatatagagagtatatagatttaaggtcctgtttggctaatgatatagggaaatgatttcccatctattaaaagacatctttaaatcctaaccatttattctccctctttcatttaatcctaatctttcattcatttcccaatcccaatcccactcccatttctcattatccaaacacaccctaacagtcaagacttggcatccagcagaaaagaaagaacagttttttttttccggggaaaagtaatgatctattactcaactaaagcgtcagcacagacagtctgagaaataaaattacaagaatcaccgagccaaaaatcggaaacagactcagagcaagccttattagctagcaagtggcttgcatgattctgggatcggtgggtcttctgtaagaatgaacagattcaaccgtctctgcagttctagttttaatcttccttgagatatggacagtgttagccccgtttgcttttcgtttgatgtggattttgcccgagaatcaaaagcaaaaccgaataggttgattctgaaagtagattattataattatactctgtttttctatcaaaatctgacaactggtacagaactacttttattggacatgatgtatatttaaaataattaactacaaatatgtatttatcttctaaattacttatagaacttatcctaatatgttttttcgtatttgttgtttcactgattcaatcatttcaatcaaaattcaaacagagttattttcccttatgtgcaaaatctttactgatactaaatataaccccttcatataaatggttctactccatctatctgttcatccatttctccttattttagatgcccaaaaggacactctagtcgacattctcccccctttccgagtgaaggatctacagcgcattgacacgacaaacctctacagcttcgccaacgtgcttgccaatgtagtcgccgcagcgcggctgtcatcagggctcatactcaacaccttcgacttcatcgagggtgacaacatttgcaggatccgcgacgagctctccatccctgtgtttgccattggtccactcaacaaactcataccactcgtcggaagaagcagctttcttcccccagattgtgattgcctgaggtggcttgacacacaagcccctagctctgtgttgttcgtgagcttcggcaccatggccaccattgatgctcaggagtttctggaggtggcatggggcttggctggcaccaagctaccatttctatgggtggttcggccaagccttgtccgtgggttacggctgcattccagtgagctccctagtgatttgcaggaagagatcaatggtcgaggcaggatagtctcttgggcaccgcaagaaaaggtactaggtcacccttctgtccgcgcattcatgacgcataatggatggaactcgacgatagagagtatatctgaaggcgtgccgatgatatgtaggccatgttttggagatcagatgggaaatgcgaggtatgtttgtgctgtttggaggttgggtgtggagatggaggtagggagtgttctgcagagggcaaaagttcaaactgctgttgagaaattagtgaatggggaggaaggtcaaaatgtgaaacagagaatgagaaatctgaggatagaagctgaaaaatgtgttagtaaaggaggatcatcagacaccggtctacgtaacttagtagattcgatattatcttttggaaaatgttgattatctgcacagatataacgtagtcatgtcttcgactaatacttgtagcctctttaaatgcggatggtctaatagaggctaactgaacagcgatggtaaatcgtagaagttaaacaaaaggcaatgacatattatcttctccatggctggcgccatcagangtgcaatcaatggacagg

SEQ ID NO: 15581 - DNA, 1832 bp, Oryza sativa
  unsure (1)..(1832): unsure at all n locations
gttgtcgtcaccgcccactcgtcgttgccgtcggggtcaggctcattgtcgtcaggttattcagatctcgaaaatcaatgcaaaccctgaccttgccattcttcttaataactggaactatactagaaacccattcagcgtatcagcaaggacgaataaaaccagcatcatacaatcgtttaatctcagctttgcaggttcaagcatatcggctttacatctcctcggaggttgctggcgtggcctaacccctggtttgataggtagccgatgttcaacaattgatcggctgagtccaggcatctcataatactccagagcgaagcaatctctaaactcttttaagagctctatcagcttggttctaaactccagagataagtttttactaataaatgtcggccttggccgatcgcctggacctatgtctatttcttccaaatcatcggctgacatgaaaccttgaccttgcttgtcatcgagatcatctactgtatgcttagtgtagacatctaaaccctccacgacaccctcaaaataatagctggngttctccatctntaattggctgtatatcagaatcggatacttttagaaaatctccatcccagacttttccagataaacaatcaaggccatccatatcccanaggggctaaatagcactggcaacattaactgaccttgtcgctggcacgatctctatcttgtcgccttgccattgaatcaaacattgatgcattgtcgaaggaatgcaacaattggcgtgaatccaatctcttccaagcaacaaggtgtaagaacccttcccatcgatgacaaaaaacgtagtaggaatagtcttactaccgactgtcagctccacatttagaacacctttggtttccgatggattaccaccaaagtctttgagcaccatatttgtcttgatgagatcctcggcgtttctccccaacttccagaatgtagcataagacatcaaatttaccgcggccccaccatcaaccatcatcttagacatcggcttcccattgacatagccgtttatatacaatggtttaagatgccgattatctgtcccctcaggtttctcgaacactgcctgttccggtgaaagaaccaacttagccgattcctcttccacctcgtcgacatcgacttgatcgatcccgaattcggctggcaaggtaaagaccatgttaattggtgccgtcacaacactcttccctttggccaacctttttgcctcatcggctgcaacatcatcggctagaggaacctgattcttaacacgccactcctgcctcggttttgctttcctcagccgatgattaatttcttgttcaaccgaacagagatgaaattcaaatttcgaaacaagagactaagccaaacttcacaagatggtgcacaggtattctaagcagaggatatatcacagaatcatccacagaaacatcacagaaagagacaagagcgattttttcccgaagttcggatcttgcaatcctactctccgttgaggagctccaaagagctgggtctcaattaaccccttgcctcacttgtgcaaaaatcccagaggaaatccgcagccttcaaccccaaacacccctaggcaaatttctagaattgagtgaccaccaagatccaactcaacctactaatagaaatccaccacaagtgtgggttgctctacttggaagacctctagaatctcagcacaagaacttcactaacttttttcctgggattaaaatattgcgcttgctcatttttaattggttaaaattatttccaaggctctgaaaattccactaaaaatcttgtta

SEQ ID NO: 15582 - DNA, 3878 bp, Oryza sativa
  unsure (1)..(3878): unsure at all n locations
tggaacatgctagtgcgggtctattcggtgaggagttcatataagcacgaaacctccataatctattcagccgactcatagaaatataatcaagagagatatggggagggtcggtagggatcagacttctcgacgaggtcaaccggacagtgcacagttgataacaagaggagacgtagtgctgtgattgtagggttcggatcatgttgatcgaaagccgaatcatgtttgtcaatttccatcaaatcaagagttatcaatacctaccggaagatcgagacctagtttcttgtaataaaatatatagatggtagtcatttgaacgtgttacatgtgtaggtttgggcgtccatatatgcctatataatgggcacggtgatgcacacaataatcaaacaagattcacagaaactaccatcaataacaggactcctgcacttcatacatggccactgccagctctataaacaagaggtttagcctcgccggtgccacggcgcttgtcaccggtggcagcaaaggcatcgggtacgtataatcaacttaccaaatcaaactgactaattgtttggctcatacgcttcatcattccagtggtgcaaatttatcgaagcatatcatatgaattattaaccatgtagccgcgccatcgtggaagagctggcgagcttcggcgcgacggtgcacacctgcgctcggaaccaggcggagctgagcagatgccaggaggagtggacggccaagggcctcgccgtcaccgtctccgtctgcgacgtggcggtgcgcgccgacagggaggcgctcgccggcagggtgtccgccatgttcgacggcaagctcagcatcctggtagaagaacacgagcacgcaccatgatatgtgatattatcttctaatccagtataatatctctatatggacacgaaccgatgaaacggccggatggatatatatatatatgcaggtgaacaacgctgggacggcgtacctgaagccggcggcggacctgacgccggaggagacgtcgaggttgatgacgaccaacttcgagtcgtgcttccacctgagccagctgttctaccctctcctcaaggactccggaagaggcagtatcgttaatatctcgtccgtcgcttctgtcctcgcgttccattctcttcctatctactcggctgccaaaggtaaaaaaattaaactcccactctgtatgctatggacttcttgtcctattgcacaaaacaacaagcctagcttgcaaatataatttcactgaactgcacctcctccttcaggtcatatatttgacgacgcttaggattagattttgtttaacttttaaatttccaacgtaccattagttttatattattagaataagtttgtaaaatttaacagaaatttatgttatgatggtatagtttgaggcaaatacatgtataccgtatagcatgatatttattacatcctaaatgtatcgttgtcaaacggtataaatccaactccatctatctagtttattttgtgagagcgtttcacccaactcaactcccactatcaggtggatctaaatctaacttcatctatctagcttattatgtgagagggttattccacccagcgttatttcagatctcatgttttattttggcacgtggcgcgcacatccagcgcgagagaaattaatgaattgatttatgtgcacttgcttctcaagttgtaataatcactagctatgcgctttgtaacgtcaggagcaatgaaccaagtcacaaggaacctggcttgtgagtgggcgagcgatgggatcagagtcaattccgttgcaccgggctacatccagactccactcctaactgccgtaagttcctcgttttacaaatactccctcctcctattttatgacgccattggcttttcgaccgacgtttgaccattcgttttatttaaaaattttatacaaatatgaaaatatttatgacattcttaaagaacatttgatgataaatcaagtcacaataaaataaatgataattacataatttttttaataagacgaatggtcaaacgttgaataaaaagtcaacggtgtcatacattaaaatatggatatggaggtagtaatatttttcaaaaataataatagctaggtactataattttagtgccgctttgttttagtatcttgctacggcctattagtgtcttgacatcagagataccgaaatgaaaggtatgatgtctcattatattttaattttagggatcataaaagaccttttttttttctaatgaacgggcgcaactaattaataagactgtggtccccggacgatctcgattacttgctggacttttgtaaactttcctagagaggttgaacagttcggaaagcataatttggggacaaacaaccgggtggcatgtggtattttgcgttttgtacaaaattatatctttaaaaaatactattgggttcatctgttgtttgtcaagctaactgtttttttttctaatgtatatatcacttacatgtcacaatttttgttaaggtgaaataaacagtgttctaactattttcaataagaaattaatatactttagtgcaaatcttagtaatacataaacacaccaaattataagctaggaagatgcaacatctggattaataaaataaaatcgaaaagttacactaaattatacaagagttgtgatctttcggattaagggtttaataagctatttaatgtgctacgttttagtcgatggcaattaagaagaaaatatcagatgactgtaaagctaaacaccatttgaccatccaagtacattaagaattgaaaagttttcctacatttaatgtgagaattccaacctaattttgctatatgtcagatgagactaaagtggaaattgtaagagaaagaacataaataattaaatactatttacgaaagtttgtaactaggacatagtactacttattatgaaaaagtttataactatgacatactacttattatggaaaagtttataactatgacatacttatatttctcatatatattgttgctaacacatggtgcctgcactgcatgtgtatagttcgtggccggcaacgatttcgcacaggttgagttcaaccgtcttcctttgggccgtctcggtaaacctgaggacatctcgtcgttggtggcgttcctgtgcatgcctgcggcctcctacatcactggccagattatatgcgtcgatgggggccgtatgctttcttaataaactctacatatacaaaataaagatatatcatgtatcataatatattctactgaattgggagacttccaagaagaatgaaatctttgtgtgcccgtgtaccaaccacacacaacaggctagctagtcttctctgcatgcgtagagcatagactgggtgtaatgtgtaaaatggccaatatatatttgtattaagtttgggaaatcatgtggagaagattggcaagccgagtgtaatgaattttccatgaaataaaatttacggttcctatgattattgatacaaaacagtatgaatgagaacctgattngtttgacttaagatcattatanggttattcatgctgaattggaaaaataactatttattggatcgtncctttatacactagtacagataatttattgtgacgcttcctaattgtctaggtttggcggccgtcaccttgaagtattcaaaacagccccaaacgaggncgacaaagattacttgcacaaaccttgtagatggcataaaaatcgagccggtacggatgaaacctattgggagggcttcaactggagaccacaaaggtaacgtttgaattttggtcggcctaaccaagcag

SEQ ID NO: 15583 - DNA, 4524 bp, Oryza sativa
  unsure (1)..(4524): unsure at all n locations
aggccccaccaggttcgaggttatattcctggccaacaaaatttaccgaggccccctctatttcttttccaaattcccctgattccacccaaaattataggttccagccttagtaccttttaaacatgggaaccgggtaggggacccataatcccttatgaggggttgaggaaaaacaaagaccttcataccacctgttgttagggtctgcccgtttgggcgtcctacacccaaatttcagttcccaggaggtcagaaaaagcagcagtgtcgatcccattgaactgcagctcaccgagaatgtcacggagaaatgtcaccgaatcccagtcccatggtataaagtctttgaggtacctgatttagatttcagtaaacaaatgactacatatgattgagtaaataatatgggcacacatctgcaaataaaagtaacattattatgatatagttattgtagtgaatactcttttcatatatatactcgaactgcttgtaaaataatttaacaacaatgttctcttctccattgcaaatatacaaataaataaaaacccatgaaacattaagctcaatttattgtaaatcccatcatcatgacatcataccatctcattttcaaattacattttcaaggaaaaaattattagtctgcacaagcagaatttgaatgacaactaatagtaaaaactgaaatcaagaaaatgaataatctgaaaacttttccctgcattagttagtacagagtacgtgcagatcagtggtgagagggacataccgaactccttggcggaggtcgcgctggaccggacggcatgggcgaagcccggtcggcggggaaatccatttgcgatgcgatgtagagagaacgaaggaagcacgacggtgactggatggtagcggcgcgatggtgacctgcgggggcgacggcgattgacggtgacctgcggggagacggcggttagggttgggaatcgcaaggcgaggaggtgcgatggtggtgagggcttccggtggcgaggaacggttgggcgaaagcgtaaaaagatcggtgaggaaagcaatgccggtgggagagatcgctgcggagcagatcggcgcaggcggcgacctagcgacgggagggtgaggatggattttttttcggaagttacgggggatagacggggtgagcgtgtcgatgagtctgaccgttggataagcgttgaagcgatgaggtgcgttggatgtgtgacatgatgaatgatgaatgagtaaaccatttgtttaactataggatagattagacattctcaaaaataagtttatggggattggattttagcagtttcatagtgatgcatgccgtttggacgtacatgtgtgttttcgtgtaattcaaaaaaaaattgtatttttttcatgtgcagacgctcaagaggaccgtatgtgatgtggttgcattatgggtcctcttagagcctactggggttctcatgtagaaaaaattatttgtgaagtagtgttgtgaaaaataatgggactacattaagtgaaaatcaaaggtcggatgtttttgtctcttcattgaattttattaggccatttccaactcaagacactagccatagtttccttaaactccacatcattaagaaactagtaatagacactactcttccaacgcaaacaccactattccatacttaaatttaatgctacttatctcacataatgtcttggatgttatgtagaaaccatgtctaatgcaagacgtggtttccttctctttcctcatttattcacttgccacgtcatttttcatcctaggtggcatcttatttaatgctatggacaacatcctagtcattgggttgggaatgcccttagagaaagtttaatagtatagcccattactagctccaaatcatttatagccaatgtaatagccaattcatacaatagttgcttactatatgtcacgcccagaaatttagcccaaatttttagactattttgtgtattaaatccctgtccaggactagccagggtacacaaaatgacaagtaataaatagatccaaacgtaaataaagcgtaaaatacttaaagaataggcacttagtcctcacactgaaacaaaagcagcagcagcggaaaaggcgatcctagcggggcttcagctccactccataggcaaaactcaactgaggtctgaaccttggtcctctaacttcatcttcagctcagaagcactacacttctgaaaaaggggaacaacagcaaggctgagtactaccaccgtactcagcaagccacaccaatgatgcagacgtgcaagggcagacaaagaggggtttgtggctatttgcataaaggcggttgtaaaacattttattgagcaaaacggtaaaacagttcagtaattaaagtaatattaaatttccactgatcaacgctacaccacgttgaacaggcccaaccaacctaccagaactacagtgcattgggtcgatttattaagtgtgagactaatcacggtgaatctggtcgatcgcctataaccgcgggcacggctattcgaatagttttactttggccaaaggtgcacaactgtacccacaagacacaatccaccggcatgtcaccatgtcatcatgtgccctgatgcacacatcaccatgtcgagtgattgtgacaagacccttcatataaccccctctgaccaatcgcaccgcacctcaggtttcacccccactcctcgcaaggcagcgggcagtcccctctcgtgccacggtgaatccagaagccgatcaactgaataccccagccaacccaactccattacgcccacccttgcctgggaacgtcagccagaggaaagctatacttcaagtcaggcagttacccattcctgcttgtggcaagcgctgtatgtcttccagggtttcccgcgaactggtccttcattgccatgtgtgcgaccagcaaaaccatgcacccacagcccaccaataagtcgcattttagttggataattatggccaataaacatggccggatgtctcgagcacgcagctcattcagatactaaaaaggtctaatactgcaattatcccattaactgagctagtggtaattaagcatggctaagcatatagttctagctatgtcacataagtaacatgagctagtcgatttatcatccaaggttgacaaagaacagatatcaagtaaacatggcacaagcgagcagataggtaaaccctattcccatgtaattagcaaaacatgcatatttatttgcaaacgataaaacatttataaattgggatcaacatgcacaaggggaatgtgtgacttgccttgcttcttcaaacaatcttccgaactcttttcttcgcgaccgcggactttcgaaacgacggatactacacgctggcacgcaaaacaaggaaaatctctaataaataccaaggaaatagtacataaaagtaaacaaacatgtagagctcaattttagatgagttttgcaagttgaatggctcaattcggagttcggatgaattagatatgaattttagaagttttgaaccattttaatggatttctagaattattaatgatttattgcgcaattaataatggtttatgacgtcaccaaggggaataggtggcgccgacaagcgggccccacctgtcggtggctcaaagaaggtcggcacacggtggactcggtctacgtgcgcactgcccgcgggcgcaccacatggcagccacgaggtggccacggcggacggggaggacgaggtggcgccgatgtggcaccacagggcagcgacaccaggcggcacggggagggccacgtggacggcccaaatcgcccctgtagggggatcgggcggccacgggcgagcaggagccggctcaccggctggccggccggggagcgacgatgcacggcttgatggtcgccggcgatgaccactggcgtggtgacacacgcgggaggcggcggaaaaaggggaaagggagaggagatggaggggttcctcaccgaggggcgccggcggagctctggcgaagggaggtggcgttgcttcggcgacgggcggcgcttaggaagaaacggacgagggtggccgcgacctgcggaaggggaatgagggattaaggaggggaggaccggagcggtgcagctaaaacaatggccggtagcgacagtactaggtggagctcaccttgagtgatagggatggggtttcggcgatgattcacggaggatgagcggtggccgagcttgcccttgggacggcaaagccggtggaggtggttgagcggcgcagcgacggctaggacggcagtggtggtctgctggagacggcgtatggtggtggtggctcgggcgtgtggtgnaagtggcactaggcggttgttttggaaaggtggagtggcggctggcgtgcggcaaggtgtggcgaatgtggtgnaggcggtggtgcggcatgaggtggctgggnncgccgacttgagactgaattcaaaa

SEQ ID NO: 15584 - DNA, 1691 bp, Oryza sativa
  unsure (1)..(1691): unsure at all n locations
gagaggaggaggtggcggaggacggcgnccgagctattgcaggtggtcggcggtggaaaatttcggcagcctaacggtgccaaattttctagggttcctgcctggacttagaaaatttggcacgggggtggctgcccttatatagggtgcggatcttcgcaggcgggggtctgcctgtgaagatacgttttggcttttttcgcaggcgggccgcccggctgctaagatgtctccgttaaatattttcctaggagcacacgccgcctaaaaaaatactttcagaaaagtgtaataacgctgctagttcgatctgtggaaccccaacttgtcagattcatcttatatttgcaatattttcagattgcatcttctactcacttgcttgtgttctcgattctcttgtaggatatagccttatcgggcaggtcaatcatgtttcggctcgattgataaccaagggaggagtggtgtagtgaatgcgaggggttcaatcgtcttgatcaaagcctttggatcatcaacgttgagtctccataatcgatttaacacctataggaagaatgagaccctagttcctcatcacatgatttttgccatatggcgggtcttgccgagcttagaaatttaggactgtgacaatattagaaatacattatgtacaccaagaaatgatgtttaacttatttgctccattatttcattacttttatttataaaactttggtatgccacatgttccttatttcttgcaaatccattatttaaattttagccaatttctattatacaaaatatatttgtcccagaaagaaaatctcaatggaatgacaaggaaataattggctcaaaagatgaagcatgcacttctcattacatcaatgttgagaattttattctttaacgtatgtttatatcacgagatcaaattttggttggtttgaagcgtattaaggagataagctagcaaaattcttgtgaattatccactcaattcacgtaacgaggaggtattatttcagggatcaagattgtggtaggccttgtccctccattcttccagctcagagagctgcatcttcctgtgctgtccggctcccttcaagtccatgttccaagtccggatagcccagtgcgccctgtgttccaactctaccgaaagatgacaagtcttcccatagacaagttggtatggtgacatgccgatgggcgtcttataagcagtcctatatgcccaaagtgcatcagatagcttgttcttccatgccttccccatctcattgacagtcttctgtagaatattcttgatttgtttgttactcgtttctgcctgtccacttgtctggggatgatatggagtggcaatattgtgctgagcccaaagttcttgcaataagttttggaaggtcttatcgatgaaatgagaccctccgtcacttatcaccatatacggagttccaaaacgagggaaaatagtctcgtggaacatccggcgagcgtgcttagcgtctgcggtcctgcatggcattgcctctacccacttggacacatcatcaacggccactaggatatactcgcagtcataggactttgggaaaggtcccatgaagtcgatgccccatacatcaaatagctagacttgaaggttaaaattcagaataaagataagtaatattgaaaaaatagtccatgta

SEQ ID NO: 15585 - DNA, 7643 bp, Oryza sativa
  unsure (1)..(7643): unsure at all n locations
ggagagatggagagaaggagagagggagtgggagggtgggaaggaatataggctagcgattagagaagagtaagagatagggtaagtctatacggatacgaagtaggataggtataggctaaagaggaagtagagagaagagtaacagtataggtagagtagaaataagagtgagttaggatgaaggaaaggggagggtagggagagcaatagtcaaggagagggagtattgaaaaatgggtagcagggcaaagaataagagtacgtatacgagaactgaaggagaggagagaggaggacaggggggaggggaggagggtgtagcaagaaagaggagaggagagggtgggtagggatagggtaagtagaataagaaagagtatggtagagaggtaaatgggcggtcgagagtgaggaggagagggaggcgagattaagagactgaggtaaaagatacaagctaacgataaagcgaatgttgaataaagtgttagacagcaaggttcgaaatggcttaaggagacgacagatggtatgtcaagttgttacgcggggtttgacgaccacaaacatcggtgtacacgcagatagtagcgggtagggccccgaaatgcgttgaacgcaagaggaagagcttaagaggagatgacgactttattaatcatcggtgtgcttacaaagtgcaccagcagcactccgtcgaagaattttgactaaactcgaaaccataactcaaaagtcaaatcaattgctctataaagcgatagagggaagcttnnngntnnnnntntggtngnnttagttcntgnaattngatcctacagttgcaagccctattccatgacagttgataccaatgctaagctatcctccactgatggtaatcctgtgattgatctgaccgtctatcgtagtcttgatggtgccttggagtacctcacctccactcgatatattagatatctcttatgttgtccagcagattttataccgccataaagcgtattctatgctacctttgctgtactctggatcatggcctttacttccaaacattcctccacatttgacttagtggcatagtatgcagctgactaagctggttgtcccgacacgaagatgtttacttaaggctacgtcgcgtttttaggtgataaccttgtctctttgtcctccaaacgtcagaactatgtctcccgctccagttccaaggctgagtagagtgtcatggcaaatgctgtggccaaaatatgccgggtcaccgtgctctactgtgacaatgtcaccgtcgtctatctctccacaaacctagtacaacaccagcggatgaaacatgttgagattgatcttcactttgtttgtgattgggttgctgctggtgcggttcatggtcttcatgttccgacgccatcacagttcactgatatcttcactaaaaggttttcgtggtgctattttcttcgagttccattcaagtctcaacgttcggcctaccgactataaaacaaagggggtgttgtgtatctcgtgtatatggcgcacgactacaaaaaccgtttttgcaaacaggtggattgcattttcgcatgcggttggccggtacacatgcgcgagaaggtctgcaaagatcacgatctttgcatgcggccagtgcaaccgcatgcaaaaatcggattttcgcatgctgatgcttaagccggctgcatgcgaaaatgaaaaatcgcgaaaaaaaaataaaaatccccaaaaaaaaacccctagccctaggcgcccgagctcgccgctgccgctcgccaccacgccggatccatcgcgcccgagctcgccgacgtcgtcgtcgtctcggataggtcgtcgtggccgcacccaagctcgccgccgtcgtcgtcgccgaggttgtcgtcgccgtacctccgccacgctcgagctcgccgtcaccacccgtcgccgtcaatgtcgccaaggtcgtcgtcgccgcgaggaggtcgtcgtcgctgcacccgtgccggatctgccgccctcgagctcgtcgtcgccgaggggagctcgttgtcaccgcgggggagagtgccggtgccggatccgcgtggaaggagggcggctgaccccggatctgctcgggggagggctacagtcccaagatccgatctggccgcctcccgcccccgtgtgccttctttcaagctcaccgccgccgcctttcgagcccgcggcagccgcttttcgagccccacgccgtcggcctttcgagccccgtgggaccgccgccgccaacgcttcatgtacttcctggctctacgccatactgcccagccgagagggaggccgacgccgataccgacgagctccgcacacgtgcgggcgggctcgggcgcagaacccgccgcagaggagggcggacgccgatgcngacaagctccgcgcgcgtgcaagacggctccggcgctgcaaccgcgtgcccgcggcgcgcacgcacgccgccngcggccacgcgggcctcgtcggcctcgccaacgctccgtgtccccccctacctttgggccgcactgccccgccaaagaggaagcccgacgccgacgccgacaagctccgcgcgcgcgccggcggcctccggcgctgcaactgccggaaagggaggccgatgccgacgccgacgagctccgcgcgcgcgccaagcggctccggcgctgcaaccgcgcgcacgcggcgcgcgggcacgccacccgcggctgcgcgggcctcgtccgcctcgccaacgcacacctccgcgccgatgccgccgccctcagccgccgccccgcgtcaccgtccgccgctgccctcgtcgtcctcccgctgcagtgcacaggcgtggtcgtcgtcgttggcggcgatgttggcgctcacgaggcagccgagctccatcttggcgcggggctggagcgccgggtcatgggtgaccagcacagcgtcgccatagctccgtgccgaggccgccgcccccgcgtcagcgtcccccgcctgctgctgtctagagagagagagaggggaagagtggaggaggagtatgacatgcgggtcccacaatttttttaaaaatagaatgctgactggactgccacgtgtacgccacgaaggccaaacccaccacggattggattgagggggggtatttcgtccggtatgcatagttgggggtgaaaaatatccggttttgtggttcgggggggggtaattcggatgaccgcaaaagttcaggggggtaattcgtactttttcctatatgataactcacctcgatttccacaaacaagacccacatcgctatgcagatgaggcgaactttcgccgccaaaaactatttcttactttgtctgagtggaggttgcgatatgcccgtccacggtccgcctgcacaaacacttcttcactagtggagccttaaaccgtcctcctgatgtatgaattatcacaggcggaactaaaacacgaacgggttaagttgtcctcctgtaaaaatttttttatatatagtcttcttccttctcgaaccctgttcagtttaattagccgagatttttctctcccaaaacaaacaaattatagggtggggttttaaactcgaaacttttagtggattttcctaaggcggtcagatccatacattctcacacttgttatgaagtttttttttgctttttttttgtcttatctgtgatggatatcttttagagctctatgtgtgtgtgcatatttgtttttggcttttatgcttttttatattttaattttgtggcaggtgctcgcactcataattctatgcatgggaatcatgtgcctaacctgctttgaacctacacacatacacagagatatgtactgctagtagctcactatctcgttgaatttctgaatatattagtcaacacataatataaaataagcatgtgattagatttatttttgtaagggcaacatgccgttaaaaaagtgttgctaaaacaatcatatatatgtatgcttagataatcatgtattatcacagaagaatatgagctgggcaacctctgtaacatgttacagtatggtgtttgtgaattttcggccaaattctgaaagttttcgtctcaaggatattttcatcattagaacaaaattgtatgttactaatagaggctaactgaacagcgatggtaaatcgtagaagttaaacaaaaggcaatgacatattatggaactgaaaacagtcagtggcagattatggatctaggccatagacaatggtacacgatagattttctctaattagatcatgccattacaaatatacagtattaaaaaaataccactactaatcataaatcggctgccattagcattttctaaaatttgaaccatgcaaccatgtacacatcaggcacccgtgtactcgttttttacatacggcattttcgtatgaaccattttgcccttctctcccaagttccagccttccccctctcccccaccgccggcaagtacatcctcgaatcagatcggtcacccctgccttccgccgttgcagtggggactgggacaagacatggatccaattacatttagagaaaaataaacattaaaaccttcactaggtatatctaactggccttgatagacaggagttagagatgccaaaaggtaatcttcaattttttatatagaatacagttaacaatatttattctaaaaccagagattattacctctgttttaaaatgtttggagttgtttgcatttaaagccccccttgattcaaaagaaattcgtaagaattttacaggatttcatttctatagaaatttttacactttgaatcaaagaaatgaatcctatggaaatcctatgaaatacatatggaatgcctaatacaatgcaagtttggaggagttataacatgaggttctacctcatgaaaacttttctttgagtctttatctcttctctaattcctgtgtttttcctacggtctaatcaaacggccattcctgtattttgtaattatctgttttacatttatattcatatcaaaatcctgtgtttttcctattcttatattttctcaatcctgcaattcaaatgaccctaaatattacgatggatcattagtgttctttgaaaaacaacgtaaatatcgtttctcagcttgttgtgacttgtatcagtacgatttatatttttctatctgcactgattttttttaataagatacagtatatagttaatagggcgtttgtatttaatacagagtgtgtactatagtgaaagaaataaatacgataatacatgcatcctagtcacacgggttaaaataaaggacccaaaaaacgtgtaacacctgcaacatgtgtttgtttcttttcaatatatttgttttgtatctatggtgtgcattactgttgacgattggtcattgcaaatcttattacagcttactttaaatgacaacgtagttggtaggacagtatctcttaaatctttgacaaaatattcctaacgggggacactatcgcgaactgttagagattatacatacgcatgactggtttaggagtgtggttgtctgggaggcgaggcttcgttcgtttcacggtgagtttagaatatttacggtgcacgtgaaacgagcgtagctcaactaggtagttttaatttcttgtgatggaaccagctcaactagattcaaatcataaatttaacatggcgctcggtaggcgacatgcccgtagttactttgccaatcaggagatatgttagcccaatcttccggagatgttaattgggtagagtgtttgtgtgttcatagatttgaatacacacgtgttgtgagcgtctgcgtttatactgtgtttctaaaagaactaattagtatataattaattaaatattactaattacaaacttaatttttttaaaaaaaatcaaaaattattgtagactatgatcattttctacacctccatcaacatgactgaggtgcccgccattctcgttttcaatatccactgtaacataaaaccatttaccaaccgaatactttaataagactaataattaattgttatatatattcaaaagttaataatgttatgtgtttgaaaacacagggtgtattatagagaaaaaatggccaaatacgatgctgcatcatcatagcaaactcgcacgagcaaaaaatgaaaaccccgaacgaacgtgttgcacctggcaggcgtgttggtttcttttcaatattttttttatctacggagtgctttatcattgatggttggtcattacgaatcacagattactttaatcactagttgatactccctccatttaatcactagtttttttaattttattttagtcaaactttttaaaagtttgaacaaacttatagaagaatatggtaacacttataacaccaaattcacactactgcaaaatatcaaataagtgtcggcactataggtgccagaagtgctaaaaccagcacctataggctttttcccacctccgcgggttgaaatcgtaaaaaaccgacaccttgaagtaattataggtgtcggttataaataaaaaccaggtacattgtgtcggttttttaaaaaaaaacctaaacctttaataaaaaatggcacctataattaccgtatttttttaaaaaaatggcacttatgaattgagccaagccggagggccccaccacgacgcatcgaggagataaggtccgctcgctcgttcgaactctcttgtctcctctcgatctctcttgttctctcccctctctatctcgctcgtggcggctgaagaagcagcgtcgacggcgtcagtggcgcgcgccggaaaaaccgcgcccgcccgaaggcgttctccctccgccagatcaggcgggagaaagggcggcgacggcggcaacggcccggcaggtatgggaggaacgtcgggcgccctctcctccgccagatccggcaggaggggaggcacggtggtggcggacggcgtggaggcgggagggaggcaacaacgacgtattgcagcaggaggggaggcaacagcgacgtattgcagcaggaggggaggcggcaggcggtgacgcccatggagcggcggtgggcggcgcctcccctcagccatatccaatgactgccctccatggttacccaacggtgagtcttcaatttctttccgtgatttgggtggagatgaattgatgttgaatttatgtgatgcttctgtgatttgtgtggggatgaatcaatgttgaattatttctgtgatttgtgtgcggatgaatcgatgtgatggttctgtgatttgtgtggggatgaatcgatgttgaatttctatgatggtaagatgttgatattgatgaattgttgtatgtgggatggggagctggctcgtgcatcgagccggtttttttgcttttgtgcctctcaaaggtgccagttgtgacctagggtcatcagtgccgcctctgagatgctggttgggaaaaccggcacccaagggtttttcaatcagcacatttatacctttatgtagtagtgttgttttattaaaactgaatatattttgatagttttgttttatgttaaaactattactattattacgaggtcctcaantggcatcgggcg

SEQ ID NO: 15586 - DNA, 2938 bp, Oryza sativa
tgcgataatgacggccgcatagatgaactagcgctacgtccacaccacgaaagaagaaaaaaaacgaaaaaaagggcgagcagcaacagatggccaatccgccgctaccgaccgccagcctcttggctgcacgcggagccgatcgcccgcactgatcacctgtcccggccgcttgcggcaccgccgcatgctgtacggcaccgcaagctgcctcaccagctcatcgcttaccaccgccactgctgtagcaacagcacagcgcgagcgagaaaccctaacgaaagaataggaggggagaggggaatggaggttgaaatatctgaccggtcttaaccgaacacaaattttttcataggccgggatcctttccacaccgggttggtccacgggggttgggtcatgaccccggccgttccgggtctaatcgaacatagccttatggaattagaaggcttataggtgttggcaaaactaaactaaggtcagggctatggcctaagcttatggcaaggtaaaaaaaaattcaaaacaatttattattttttgttttatcatgtgttcatttatatatcttcttccatttattccctttattgaaatatttgttgtggttttgaattcatatggtcttttatgttttttatcctattatgatgaatcttgatatagattggtgttcacaaacattttgggaaaaaaattgttactgataaggttttattagtgtttcacttatatgggtgtagtacaacttatagcaattatccgaagtgtcaatgaacctctattttaaaagataggttcaatgtgggctttcattttgctataaaccttgttttagattgtgtgggtgtgttatttataaatgcattcctgattttacccgttgtcatggagtttgatcattcgttctgattgttgtcatggatactgattacgatcaaatattgaatattgccttgtttattttatttcttgtacaatgtgaggcatgtgttgatattaatcacttacaatttattagtatatgcacttttagcttccttagggccaaaggtcaaacagaacattcacttataatttattttggcacaacatttatatccttaacacatttcaaattttaagtttcatgtcttagggttaaaagatatgaatcatcacattttagagttacgagcactagttaaaacatagataaacacaatttttagtgtggttaataattacctaatttggtatattttgcatactgtgcataaaataaacttttgaccaattttattcctgtttcaacagatagatcagcttgaattcacaaaattttagaaacaagtttcactcaatttggagttgatttgaattagttataaattttcttaggttaattcacttttttcttcattgaaataattataagtgtattacgcctattttttattcattttcccgaattagttttctaaaggaaaagtccccttacactgacaggtgggtcccagtcattttattaaagaaaatattatttttagtagaaaatgttgaaccatggtgacggtgaaactttaccatcaaatggcaatgggtccatgtgccaggaacgagagtttctttaccaaggatctggtcctagatgtcaatgtcccaaattttcattaggacatgagcatttgcatgagatattgatcaaaacatttcctggtgagctccttatatcatacgctcttttcttgggaaacttttattgcatagcgtaccggatgagactcctctaactttatgcagttggggctcacatgtcagtggcataactatatatttacatatatttacattgtaggaagtcagcgatccgtttccaacagcacctaagctgagagccatccgatgagcttttctattcgtgttgtacttcatgcattttgtttggcgcacggatccgatgaggcgacgaggcaacggcacatcgacgcgatggtgcgcaagcacaagtgcgactggttcggcctacctcgaagcagcaacgtgctggcgcaggtctgcatcatatgctacgtgaacgcgatgcaaggaaggagcaagtaagagagagcggtggtcctgcgcggcttgggttagggcacgacgggcggtacccctcaagcactgcagcagggtgcgaccggccggcccgggtcatcgacagaaagctcaacagagcagggtgtggtggcggagcttgccgagttgccggcacggtgagcacggctgccattgctgttaggaaacgatggagaaataaacgataaaaaacaatagatcaatcacagaagacacgagattttaacgtggaaaaccctcctaaaacaggagagaaaaaaccacgggcgctagccagcaaaatatcttcactatatctagggtgaggttacatcgccgtacggcggcttacaagaggtatatatatatggtggaacctaaaagggatgacgatccgtcttcagcctccactacgctccggcccaagccttccggagacgggcctccgctccattacagaaagtgcaaatgaatttgaatcacaagtcaacaattgcgaggcggcctattgactggaagccatgcgggcctaccggagctgtcttggttcgcttggtggcctgccggctctagtgggctgtttggcctattggctggggcattcttgtcaagccccactgctccggtaggcagccctggtaggaccaagggagggaaagaatggatgggtttgttgacataaaaagaaataagttcacttgtgcttcctcatcttaacatcgagatttttttcttttaccaataaaaaccaaaaatatatacacttaaactcaaccaaatagtcttatgattggtgtcaatgctactagagaaggtcttggagattagatactcgcatatcaccgtcaattcaatgacg

SEQ ID NO: 15587 - DNA, 1523 bp, Oryza sativa
  unsure (1)..(1523): unsure at all n locations
cgggatgactccgctttcgatggaccactaggacgatctatgcaggcgctgaaccctcttcttcactgccgtcttcaggtgccggcttctcaaccaaaaaaccgaaaatacgcacggttcccatgccggcaataggcgccagcagcggctcctctggtgctgctccaacatcggccgcctctggccctgcctcaaccggtcgcaatgccgctgcctcggccggtgcagcggcttctgcagccgcctcttcctctgcctgatcatcctgtggcggcaatgccgctgcctcgttggccagcgcaagcagcgccggtgctgcaacttctgcacccaccaccattgacagtagtggtggctgatcaagtggttccgacgaagttacctcagcggcggccggagtaaggtccggcaaaggtggtggtccaagagagatgtgcttgctcagcgacattcggctccttctcgttcacggtcaccgtctccttagtttggtgcttcctcatgtggccgccgagcgcgaaacctgtcttccactccatgccgcattctctgcaccgatgcttgctgctgtcggcgccgccgtggcacccgtcggcccccgctccgctgctgccctgctcggaggccgccgccgccgctgccttgctcctgttctgggggccggcagcgtggccacctagcccctggtgcgtggggaacgccctgccgcagccctgcatcttgcacatgtatggtagacttttttgcggcgccccttcgacgacgacgacgacgccggcgttcggcgcggcagccgctggttggtgaccgacggcctgattatgattgggaggattggccggcgctggtggcgacggcggcgcgctgctgctcccgtgtggaccggaaagatcaagatcggttctgggctcagcgaccacagtgacacgagagntgtctgccgcattatacttgggggttgcaatggattgttgaccgtggacctcttatgtgccccgtcacgggcttccgggtgtcgaacttcttttcggcagatgcggnacgcgaacaccttccgcgccattgtcgacgccgcaacttcttgcgcggcngcaaccgaggccaatgcgacaattgcgctttccgtgcttggtgtcanaacccgccccgcagaggttggcggcccccgtacaacattgttcaaggccgcaccgtttgtgcttcccgcaaccatctccattgttcggggagggagcccggnccgttttggggcctgccgtcctcgcttcggaccccgaacgggaattgtacaaactttcctcttgattggcaatgncgccaatttggccgcgggagggtgaacacctccatgggccctggttggatatccacctctatagcgccaaatatttggggcttcttttgtgggcttagggggctcaatccaaaaggatacaaaaaacggcctcgccgaaaagctttgggnagaaaaaatctctcnctcgcggctgcgggtgttggtgtccacatataaacgtcggcgg

SEQ ID NO: 15588 - DNA, 1596 bp, Oryza sativa
  unsure (1)..(1596): unsure at all n locations
cagttggacgccgctttgtgatggatttgttgagattgaaagccgatcagcaatttactttgggggcagagcagcaaaaggctttggatgatattaaggatatcttagctctactcctggtttgattcctccacagaaaggaataccgtttaggttatatttatcggccggtgagaagtcaatcgtctcagtcttcattccggagttggaagggaaggaacgagtcgtattttatcttagtcgtcggctcttggatgctaaaactcggtacccgatgcacttattgacccctggtgctaaatcggctgaacgatttgctgtcttaacggagtctgttggatcggctgcagaggctgctgccttggtggtgtttgctgaatcggctgcaaaagctgctgccttgcacgacctgttgctggattggttgtacaaccagctgaattgggggtgtctgctgaatcggctgttgctgtattggatcaacaacaggtggaggtgggagaaacatggcagcaacctgatcttgggtcagccgattggcagccttgccgccatgctatggctgttccctcattaacacaccgaggttcactagcttgcctggcgccatagctgatgtagcagataggggaattgatgcccgcgcccgccgctgagttgttggtgcaacgganggaaatcgcttgatagatggctgaacatcggtgatcaaagactgattattggggaagacactncttgcaaattaccgggcctgcagnctgatgttcagctattgaaccatcagcaatcgacttcatcatgtttgatagggtattgactaacaccccagactgattgatcaaagcatgatgcacagcgtaatcaacccgatcttgaaagttattgaaaaagtcctgtgccacttcactattaaaatttcctccctgcatcccgtgagcaccgtcaccttgaactccatgcaccccgtcaccttgtactccatgtactccttgagaattgtcaccttgatttcctagagagccgtcggtagcacccttgatactcggctgagccgagccgtctagagcttgtttcccatctccatccttagaagaactagtcccaggatcatcagcaacgacttttattttgtacttctgaacaagtgtccccttgcgggtctacatgaatgagttcacgaactgatcccgtgcttgctacaacattgcttcaaactctttcttctgctcaggtgtgaatttttctggatcgaccggcacgacgtttccttcattgacgtcagtcaatcccaacttcagcatcttttctttaacacagcttttgctagatagtggtgggggttgtcccagaatgtagcataagacatcaaatttaccgcggccccaccatcaaccatcatcttagacatcggcttcccattgacatagccgtttatatacaatggtttaagatgccgattatctgtcccctcaggtttctcgaacactgcctgttccggtgaaagaaccaacttagccgattcctcttccatgagcggaggggcggattattttcctgcacacgaaaatatatttccttgtgcgggggacggac

SEQ ID NO: 15589 - DNA, 3037 bp, Oryza sativa
  unsure (1)..(3037): unsure at all n locations
cgccgctagtcaagcgaaggggaaaggggcggccatcgagacatctgtttcggagtattctcttgcggcgccccgtttcgcccctggcgattttgagacccgagcagaccttattccctttgtggagggagtaagtaatcttgtcttacctgccagcaccccgagcttgttcaccgaactgaatgagttcgatgaggtgtgttctgctattaaaagcttggcagttcgagtatgctttttctctattcttggttttcctctgcttttttacatgtcccataattaacatttgctctcttcgccgttcctttcttttttttgcatccagattcttgcagctcactgttcgacagagcgaaccgtgcgggctcgtcttgatggatttaagaaccgtcttcgggtcaaggatgacgaaataggccgtaagaacttggagatggaggccctcgccaacaccctgaaagaggcgaaagccgaaaacaagcggctccaatccgagttggagaaaggaagtgaggctacggccgaggtcgatcgcctcaaggccgaactggagaaagggagagaagccatagctgaggttgatcgcctccagaccgaattaaagaaagaaaaggcccattccgccgtgctgacggattattataaccttactgagccgaagatggaggctcttcgcctggaggtcagcaaggccgaagcgagcgctatggaggagtcgcggcggttttcgcgggagatggcgaaaactaccgaatccgcaagaacggcgtgccaaacgctttgccttgcccttactgacatgggtgcaaaagtgccgaggggtccctgccgaagatgcctcggccttcaacttcttcgagtggacccaacaggttagtggttcggtttcggactgcgccactacgtacggcgattgctgtgcgcgtgtatcagcggcctttactatgggtctcctgcaacagttcagctacgagcacgtcgccgagttccctaactatgcgaagggggattgggagattggcgcacaggacatttcgcccgcacttcgtgcatggcggaagcagttctggcagaaggacggtcgttctaccgccaaggcgcgccttttggagcaactagcgaaggcagaggcggcagacctttgcgaagaagaggacgcggtggctgaagggggtggaggcgatgcccaggatcacctagaggtgtgatgccctccgccctttccttagatttttgtagtttttctttttcgttttgtgttcgccagatgtggcgaacgaagtgtatttggcgggctgccgccaatcctccttattgtagctgaaaaaggggcccttggtcattttaaatatatatgactcactcttagccactttttgatggtcaaaatctttggcgtatttatgattacgcccatttctcattatgcattacttttttctttctttgcctattcttactatgcaattcgtcttttgccctttttgcactgtctaccagggtgttcgccaaaagttgtgcattcggcccccttctgggagttggcgaaaccaaaacgagaaatttgtggcattaaaggatttgccaaaggtgcgatgcccatttcggcctgtttatcgtgaaatggtgataaacggacgcagctataaggtttttaaggttgccgggtggcttcgggcgcaccctgggcgaaccttggaagactacgattttgttcattcaagacgtttggaagacatggctcgcttttggcgaaaccatcagaagactgatcggcaggaggcgatctcccagcgtcgttacagtctagtctctatttcgctcccttctcctcttagggttgtgtatgatattagtagtgatgacgaacctagttcgcccgatcgctccttagagagagagagagcgctggggcgaagatgtaatttatctgtaagccaggctgtaacgccattgctcctttctcttcatttgcaccattgtgatgatacatttttatttaaaatcaataaaggtgcgttttatttccttttcgctatttttgcattgtcacttcacgtgcttttcgttgggtccgaacatgtcggccccttttcatatcttagcgaaataggttttgactattcagctttcggcttccgttttcgatccgttttgttctatgttgcaggaagcactcgtgctttcctttcgatcgagtgtgacggtgttcggctaattgttttccgaaacaagctgttgcggtttcaatcgttcggcgagcgatgcttcggctgattcgtttcgccccgtggcctttttcgctgatcaggcgtttgtcttggggtttttccgcaaattgtcaatcgcacaaacaaataaaaatgaggcagaggacacaaagattttatactggttcgggcctccgttgtggataatagccctacatccagttttttttgtcttttttcattttcctcttttttttttctttttttttcatgccgaaaggcttacatagtgccgaagggcttacataacgatatatacatttttacaagttggcgatttgggtgccacccgttctaaacatagaaacgcttgagagaggcagcgttccaggaatggtcgaactcttcgccttccagtgtcgccagtcgaaaggatcccgtcctggatttgtgcttgatgaggtacggtccttcccatttcgattcaagtttgccaacggctatcgggttcgcctttttccttaggacaagatgaccaggcaatagctccgttggtcgaacttttttgttgtaagttgccgaagtgcctgtggcatacttttgcatgtgttcgagtgcttcgactcttaccccttccaagagttcgagcgacacctcgcgcccccccttcgtccccggagaacgtcacccttggtgagttagcccctagctctgttgaggtcattgcttcgtcaccataaagtagcatgaacgggctgaacttggttggtcttgtgggggtcgttcgcagggcccagagataacaggngatcaacagggcgcgg

SEQ ID NO: 15590 - DNA, 2725 bp, Oryza sativa
ttttctttagcgcttctaggattttgccgtttgtgcgttcggccgccccgtttggtatgttccagcttcattcggtcatgcatagagatgccttggtgaattcacccctgctgcttacgacgactgttgagtttgttaaacatgaccaagggccaaactggcgtacttgccattttaaccgggaaggctggttccttcttttggatttgctgctggatttcgttgatcatcaccatataaatctagcggttgcctcttttggttagctcactttctggctagatagagagtgtttgtgcgagcaaaatttagggatcttgactctgtgccccgaaagatagtgttgcaggatcctttgggtaatggcggtggaggtgaatcttggactatttcggtttttgtcctggatggagattttgttgatattccacctgaagaggatttacctactgctgggccgcagccagggcctaatgatgatgatgctaatgacccagatgatggaaatatttggcagttaggacaccctggtaatcaggggggtggtgattgggataactttgtgcagcaacagtaggctgcagaagcaaaaatagaggatgcttggggtaaggatcacccaatgggccagattgaggaaaaccctaggcaactgattgtgttgcctaatcaagtgttagaagaacataatctgatggataaggatcaacaggtgcagcttttcctggctaggctcaaaggagatagctgacagggaagggccaaagcatccatccttttatcctatggaaggtctattggaaaagattgatcatttgtgcaaagctagaaatcatgcatacaactttgaattctggcccttcagctctgccctatggaagccctttcatgaacttgatcatgcccctcctgtagttaaaagagcacattccagctgggccctattgccttcctctcctgatgatggacttactcatcaagagatttagatgccatgactttgcaagcccagtcttcaagtccagaagtcacccctgcagtgattctgattcctaaagctcatgtgaagaaaagggatgagaagactactttatacaaccctaccagaaggcacaattccaggattcttaaagccagccaagagcttaagatagatcatcgaatgggaattggcaaaccaagggggatatctgctaaaaagttgaacgagttggtaggtatatcgaaaattcttattcctggcagcaagattaatgaatctgatttctctgctctggatgatgatataaatttagattcatccccttctgattgttctttgtctttattgtaaaagttgggggtggacctatgtggcctacatcctgaggacgtggctgaatcgagtttagcgggagagaaaagaaagacgcttccccgggcagacatggatgattaagaatgaatagtgttaatttgttcagaactatgtcttttgtctttcagtgctgttggactttggacagtgtgagtggactttacaattgttctggatttatgttatgtgggcctcttcaggctaatttatttagctcttcttctttgtgcactcccatatgttttttttatcatgcgtaatgtttttaaatcttggaatgtgctgtgctggaatataagaggcatgaatgctgacacgaagttgttatctttgaggcaaaagatagaggaaagtggttgtcatgttttctatgtccaagagaccaagaaacaaaatttcactattcctgatataaagacttttgctcctaaacgttttgatgcttttgcattctcgccttcaagaggcgcttcaggtggaatcctagtggtatgggtttcaaatgtttttttgggaactccaggggaaataaacagtttttctgtcacagttaactttgtttcaaggcagtcttcagaagcttggaccctaacttgtatttatggcccatgtagtggcccagaacgttcagattttgttgcttggctaaagaatttttcttttgggtcagttgataacatgattctcctaggagactttaatttctacagattagttgaggacagaaacaagccgggagctgatatgaatgatatattcatttttaatgatataattagttctctcggtctgctagaaatccctttaaaagaaagaagatttacttggagtaatatgcagagcagtcccctcttggagcggcttgattgggtttttacaagtccatcttggactttggcttttccaaacaccactgttcatcccctggcccacaatatatcccaaagtctccaatttttagatttgagaattattgggttgaaatggaaggcttcttcgagcttgtcagcagagtttggtcaatggacactagttatgaagatccggcaagatgcatcagtttcaagctaaaatttttgagaaaaagtttgctgcaattgagtaaaaacttgtctcagttaactgctctcttggtcaattgtaatgctgtgattaatttcctagacctaatagaagagcataggcccttgaccatgtttgaatggaatttcagagaaattgtcaagtcgcaaacttttaagctccttgagtttaaaaagctttattgcgaaaaaaggtgcacgaataggtggatgctgctgggtgaagagaacactaattttttcaaagccattgcatccatcacacggcggcgtgccacaaagcgct

SEQ ID NO: 15591 - DNA, 2115 bp, Oryza sativa
ttaataagaaaggtttcttcagctttgcaaaaaagtttgtccaatggccctagttataagatcgcgcaaaaagcaacatttcaagcttaaatttttaaaaaaattttgcgcgaattaataaaaactgtttccagttaacggctctttgggacaattgtaaatgctggaattatttgcctaggcctataagaagagcaaagggcctttaccctgtttaaatgaatttcaaaagaaattgtcaaattcccaaacttttaagctccttaattttaaaagctttattgcaaaaaaaggtgccccaatagttggatgtgttgggtaaaaaaaacactaattttttcaaagcctttcgacttaaaggttcagatcaatttctatcgcacaggtgctggatcaaaatgaataggtagtcactttacacaatcagaaaagctgatatgttattccatagtttcaaaaacagaatggggatttttcttttgcctcaaatggactttaatctaatggatctttttcccaatccggtgaacctgaattgcttggtggatcagttctatactcaagaggtggacaatctaattaaggtaattcaaccagataaggcacctagccctgatgggattaatgggtattttcttaagaaatgttggcccatcatatcacaggaattttactggttagcagcacacttccatgcctgttatactgatctgcagccgataaacaaatccttcataactttagtgccaaaaaagtcctctccagaaacagttaatgattataggccaatctctctgatgggtattagtttaaaggtattaaccaaattgatggtagatagtttgtagagtgtaatgcctaagctggttcatgagaatcaatacggcttcattaagggtaaaacaatttaagactgtttagcatggtcttttgagtatatccatcaatgtcaatagtcaaagagagaaataattttgttaaaacttgactttgagaaggcttttgattctatacagcactctgccttgatatccattatgaaaagtatgggttttcatgataagtggctgcagtgggtacaaatggttttttcttcggcacattcttcagttcttctcaatggggtacctggaaattcttttaaatgcatgagaggggttaggcaaggagatccactttcaccctttctctttgttcttggtgctgaattactatagagaatagttaactaagcttgctcccttggtttgttgtccaagccaattaatgaacttgatgaaaggggtttcccagtaatctagtatgcagatgacactttaattcttctcaaaacatcatagagagaggtgttttgtttcaaggcttcgttgaactcttttgcaccttctactggcctcaaagtaaattaccatatgtcttgtctctacccaatcaatctgtctcatgagaatgctgagctttttgctagtctgcttgggtgcaccataggtacaatgccttttacttacctgcgtttgcctatggggacaactagaccaagggtagtggactttgcaccattggtagacagggttgagagaagattgacagctagctcacaatttttgccacagggagggagactcactttgatcaactctgtgctttcctcaatcccaacatattacatctgttctttgcagttgcctgtttcagtggttaaagctattgatactgcaaggaaaaactgcctctggaggggaaacaacccaaactcaacttgaagatctcttgcttcttaggattagatgtgtagaccaaaggaaaaaggtggcctaggagtcattaacttaagaattcaaaacacatcacttctgcttaaatacctggtcaaattttacgaagggcaggatctgccatgggttcaactgatctggaattcttattatgactccaaggtgccccatttagtttggaataaaggctctttttggtggaaagatatagtggctctatctgatatcttcaggggaatttcaaaatgcttcatcaggacaggatcctcagctcttttctaggatgatttttggaatgacaagattaggtgcagtacattgcaactgatttcaaaacaga

SEQ ID NO: 15592 - DNA, 2636 bp, Oryza sativa
  unsure (1)..(2636): unsure at all n locations
cacggattcgactcgctgctgatgacgtgaccgattttgctcccccccccccccacaatttccggtggagtgatcgattagaaggagtaattccaaatattttttttctacctttatctactattgaaaaaaaattgagaataaatgaaaatacaataatgcaattgttagttaagaacataccgtagactttccccctgtaacgtagcttacttgtaacactttccctctttcggctaaattattggttagtcttttttgcccacaagctatgtgcagcccatttatggcccaactcataatacatacaaatgttgtatatatgcattttcatatagaaacattaaacaaagtatagaaacttcacacaatttatttttaacttttaagaaaaataaaaaaaattgtctattttgggccggatacccatgctgtgttgcagccactcgctgctggcccgttgaattcggcccaaaacatccgttctcacaaggccggaaaaaataggaataagttcagttttgtgaccctcgaaagtgatcgaaatctattctgtgaccataaatcacaaagccggatatctcgaacccctaactcttaaaactggtgtaatttgactccctcggcggttttggagggtagtttcgcagacgtggcatctacgtggcagtattgattcggtcttctttccacgtggcgttgatgtggtgcttaggtggcattaaaaataaaaaaatatgtgtaggtcccacataaatcatgctctcttctcttncttcatcctcccccctctctctccctttctctttccttcggaaggcacttgtgaggagcggaaggcggcaatgaggagctgtgccactcgtcgccagctaccgcatcagtgcctatatcgcatctgattccaccaccatcaaccaccaagatccggcgncggtccccttgtcctccactggcacgaggcgtcggcgcccaacaaggactcgaaggtcgaaggtgggcgagggactcgaaggtccactactacatgaaatatttttccgtgcgggtggaatcgattttcgcgtgcggagctttcacctgtctggaaggcggcgtctgcgaaaatcccgattttttcatgcgggtgacgcacccgcacgcgaaaatcgtgtgcggacgatggatccggcctccccacggtggcaggccgcggatccagcctccccacggtggcaggccgtggatccagccttcccgcggcggtcggcgatggatccggcctccccgcagcagtcggcaatggatccggcctcccagcggtggtaggccatggacccggcctccccacggcggccagcgatggatccgacctccacgtggcggccggagacggatccgctccgccaacaccaccgtagccgatgccgccaccccggccgccgatgccgccgcctccgccaccctaaccgagtgcaccggcgtcgccgaggaggagagggggagagggagatgggaggaggagagggagagggagagggaggatggcaggatggggaggaaatggcagcgcgcgcccatgatgggaggatggggaggaggataaggatggtagcgtgtggggtggattattttcctgcacacgaaaatatatttccttgtgcgggggacggactggtgtccatctctcattttcttgtgtccagaaaaatgtttcatgtagtagtggtcgggagcgtctcgccggcagcatcgtgcacgcaggcggccacgtcgtcgaagtagacggtctccttgctgtccatggcggcctcgatctcctctcgcgcctccgccgtcgagaaggcgcgcatgtgggggcaccccgggaaggggcggccgcccgctaaaaagaaggaagcgccggcgtcgcgtgcgctgggccggtggtggcacgaaggagtagtctccgtgaaatcccatcaacaaccacgggcatcatacgcttggaaggagttgttcgtcgctgggtgggcgaatgctgttcgtcacgcgaggctgctccagatcgtacgaggcgaacaagtatccaggctgccgccgccgaagccgaggagcggcgatgccactgctggccatgcagagacagcggcaagtggctggcggctgccggggacgtggacaagttcttgccggagcaaggcccgttgaaatactcaccgccggcttggtttctccagtaagagatttctgctgatcgatttggatgagatgtgcttacctcacatcgaggtgtccccccagtttttttttttcatgaatgataaacagataccacacatatttttaaaattataatgccacgtaagtgccacgtcaatgccacgtggaataaaaccatgtcaacatcgccacataggcgccacgtcagcgaaaccgctctccaaaaccgtcgtgggagttaaattgtaacggttttaatagttgggggtcgaaatatctggtattgtcgtttagggatatgaattagattcgacaatagttaagggagtcaaagtgaacttattcaaaaaaaatactccctccatgctcgtaaaggaagtcattttggatagcgatacggtctactactcgaagtccaatttatgcgnngntnntatcagnnagtcatcatcagg

SEQ ID NO: 15593 - DNA, 1107 bp, Oryza sativa
ccttgaaagggaatagtcattttggtgcgggcctttaaattaatcccgataaaccctgaggtattcggatccaggcaattcctttagaggcccgtccaccgaaggatttggctcattttttacaaaatgaaacaataaattttttaaaaattgggtggccaattttagagttgaccgggaagtccaaatatattccattaaatattttaccagaattaacctaaattcactataaaaattattattttcatatatttcactaaataattcactaaagtacaataattcactaaataattcatttatttcactaaataattcaccaaactcactaaattcactaaaaaaactattttcatatatttcactaaataattcagtaacgaacaatagttcactaaataatttatttatttcactaaataattcaccaaattaactaaaatcactataaaaattactattttcatatatttcactaaataatttactaatttcatataacagaaaggcttgtttaatgctacaatagaaattcataggaatataagtacttcattcgtacaaaaagtttttttaataatacaaaatatttcatccatcacatgaaattcctaaaagatctatgttcggatattgcttgtggtacaatatgtagtggtttggacaagcgtgaattctactgacctctaaccccaggggacacaaaacctgattagcttcatatgtcatctcggacaatgtgttctcattaggaagcatggccttcaaaattcctataagatctatgaaaatcttgcccgtccatccactacttgccttcaacttcattaggtccaaggtagctgacaatttggtgtgttttgctttgcacccggcatacagagacatctccgagtcactggccaacttgttaaactttatagaatctctctcgttgtaagctaggttctcaacatcacgtaacatgtcttgcagtagattgtgatccacatcaaccatttcaccgcccagtggagaatgtacaaacatgtcatgctcatctccatcttcctaattttgtgcaccacttcctgattcatgctcatgatcttcatgttctagatt

SEQ ID NO: 15594 - DNA, 980 bp, Oryza sativa
  unsure (1)..(980): unsure at all n locations
ttgggntntttgtttgttttccgcttgcaaatgncaattatgggacatgtaaaaaagcagaggaaaaccaagaatagagaaaaagcatactcgaactgccaagcttttaatttcagaacacacctcatcgaactcattcagttcggtgaacaagctcggggtgctggcaggtaagacaagattacttactccctccacaaagggaataaggtctgctcgggtctcaaaatcgccaggggcgaaacggggcgccgcaagagaatactccgaaacagatgtctcgatggccgcccccttccccttcgccttgactagcggcgaaataacccgctgacgcatagggctgccgaagaccctcgccgcagctgtcacgatccgttccgcggaggctgaagccccggcggcggcgctaccgcctgctccatcggcgccaagtgaaagaacgggggcggtcgaaaagtctaggctgcggccagcaggcgaagtcggagtctcgtcagaagactcgtcgtcgctgaagacgcgagcgacatcgacaagtccttttttcttggaaatccttttgaccgaacctcccttcgccgccatgcctgccgaaaacgcaattagcgccttcgccccatccaactcttttcagcgaaggggggagctgttcgactccaccccggtctcattgtgacccgggcttggagtaggagtatagccaggggtgtcgacgcggttttcgaccgcctcatccacggccttttcgacctcaacctcctcctcttcctccccttcctcttcgacgtcgtcctcgtcgtcggcgtcggaatcggacgaaacaggaacccttcgtttcctgggcgcaagctttacttgtccgcgcgttcgctttcacgaaggtcatgcatcgtcgtaggcctgtgggggttcgcccgaggaggcagttcgccgtcgtaaacccggttcgctcggccacccgcttgtcgcgttagcag

SEQ ID NO: 15595 - DNA, 3354 bp, Oryza sativa
tgtatggaaaaatcgattttcccgtacaggcctcttaagaggacagtatgcaaaaatgagatcattttcgcttgcggctcacttaagcgaccgcatggaaaaatcgatttttccatacggaccacttaaggagccgtatgcaaaaataaaatttgaaaaatttaaaactagtttatctcactcatatgaactttaaattagatgattatttttcctaaaagtttctaaaatcatgctctgtcatgttattatgttcatactgccattattttggccttttttcttgtgactttgttttatcaattaaaattttgaatttcaaaattttgaagcagtaatgatttcagctgaaaaagtcatcaacaacaaagttgtataacttatcaagatctataacttattttttggtcatttcttcatcagacaaagtgatagtaacattttcacaaaatttgcatatctcttatatagtttataaaactttataagagagatatgtgcattttgtgaacaatcttacaaatcattttgtcggatgaaaaaataaccaaaataaaagttatagatcttgataagttatgacactttgttattgataactttttaagttgaaatcatttagtatttgaaaatgttgtttgaaattgtcataatttgaaattcaaattcaaactgtcgaaaaaaagtcatatagaaaaatgaccgaaacaaaagttgtagatcttgatgcattttacaactttgttgttgacaattttttcatttgtatcatttactacccgaaaatttatttgaatttcttatattttaaaattaaaagtaaatttcacagaactacagatactatgaccaaattatcacaaaactacatatttaactcggtgtatcacaaaactacacatttaacaccaaatttatcacaaaactacacatttaagatgaagtgtcacaaaactacatatttagtaactaaattatcacaaaactacaggtttagaatcaatttaataaaaagtaaagatgtttatagctccatcataacaatggtgctagggatttaaactccaaaagttttagttttgtgataaattcaatattaaatatgcatttttacgatatttaatctaaaatctgtagttttgtgataaatttggtgctaaatgtgtagttttgtgatacaactccttaaatctgtagttttgtgataatttggtcaaaatacctgtagtttgtgaaattgactgtgaaattaaaattttctatagttcaataaaactcagatagagaaatgaccaaaagaaaaacaggacacctaaatgagttctacaactttgtttttgacagctttttcatacgagttgatttagtgccataaaaatcgattagaaatttcaaatgaaaattttccctcctcaccacttcaaaatatttcatctttcatcctcctctctctctccccccctgatatttttcccttctcctcactctttctcttcctctctctcactctttctctcctctccctctctttctcttcctctctcggtaccgagcacgagtgggcggcgtgcgcgtgctggtggctagcggctgccgcgtcgtccccgtcgctcgggctgcccccttcgcggcggcgccgactgatgtgcttgagggtgtcccgatatttcgatgagagggataagtagattggatggagtgacgttggcgatccgactacaactatccagggatgttgcgccttagcaatcgttacaccaactccagaggcggtgtaagcaatcgagaaccagcaagaacaagatgaacaagcaactaaatttgcgaatcaaagatgtttgattgaatcaatagaagtaacaagtggggttcagtaacaagcaatccggcaatctaatcgaccacgggatcaactcggcaaagtagcgacgctgtactttgatctaaacaaaacccgattattcttggtggcggagaaagctataagaagaggaaggggacaaccacagggatgctggggtcgttctctaaccctaggacgcatccctaatggacccaacttgatacacggcccattgggcccgaagaggtgacgcaacaccgtggacagaaaagaactcggtagaaaaatgaagattgcggctgctccagaactgatatggacaagaggctagatccatttgaaggtagacttgatagtacttgcacgcccaaatcagagttcgcatgaagtcatggcgaccgtcaaaagttgggactgtgctgcagtccgaatccaccccgcgcgaatcctcacccatttgattctctccattgttcctgaataaaacaagagtgcacgtgtctccggggaataaataagaatcatatgaatttaagaatgaatgcacctgatagttgagttgacgtgcacgagcgcgagtaataggacgttgaagttgtacttgtggaggcgtggatatatcgttggtgttgatgttctcatcaccgaccctgacgacgacgaggaggcgccgaccctgacgacaatgagcctgaccccgacggcaacgacgagtgggcggtgacgacaacgagtgggcaacgacgataacgacgcgtgggcggcgacgcggcattgtgtgtttagatgatttattatgagaatgagtagttaatgcttgtgtgtcactctacccttggattatcttaacccctgcttagaatatgattatcacaagtaatatataaattattagtcaagttctctctacattatcttcccacgggataaaataaatacgatacccttggaatattctcgggtgaaatgctacaatggtatatccatgcgcttgtggatgaactctgtaaccataatataccaggagtatttctgggccattgctgggaattatatttctagtaatgtcgttaagaaataccaacacacgggcggggctgttagtgttatggataccacatacctaatagtagttgactaagcacgacaaggcccaccacataccatatcttatacggaatcatacctcgtatatagaaggagattcggataaggaaggacaaatagagttctatatgaaaatgacaaggactacctggattgtatccatattggtctccctagttcttcttggacaaggggacacctatgggtataaatacaagccccccaggaggagaaaaagcaagccacaagaccaacaagacacaacatatacataagccaacacacaccgccagatctcgacatcagagattagcctagacataccgcatccggtgcctacggaggccggctagagggatctagcgctatctctgatctcgacgagttcatgctcgaggaggaag

SEQ ID NO: 15596 - DNA, 784 bp, Oryza sativa
  unsure (1)..(784): unsure at all n locations
gcgtcatgaaatcactgcanatncccccctgttcttgattacaggacctaatctttgatgaacaaaaacccttgtctgccttagccgattacccttattatatgatcggcttgagctctcgacaatatcactgcacccagggcagttttcaatagatggcaacctcatgccttcattccagcagaatctaaaaaattcacaaccccaatgaggatcaaaaccatcatcgtattcttcataatgcttctcttgctgcttgtcatatttcctctgatatttgttgataatcttagccgaattcacttgaaaaccccttgcgcgggtcctatcggctgtctggccagctgtatgcaccatattaacaggaaaaggattaccatcgaccttcatcggttttttggaatcatcaaacttaatcttgcccccctcaatggccacctggatctgatgtctaaaaaccttgcaatcgttagtagaatgagacccaaaattatgccatttgcaatacctctttttgcctaactcctcggccgatgggattgtatttccagcaggaagttgaatttgcttctctcggagtagcagatcaaagatcttgtcagctttagtaatatcaaaatcgtatttctcttcttttccagaacttttcacccattggcatggtatgacctttttactccttacccattcggccgcagctatttcagaatcatcctcattatcatcctacctatacatgtatggacaaacatgattaactctcttagagttcttcctaacttcc

SEQ ID NO: 15597 - DNA, 2380 bp, Oryza sativa
  unsure (1)..(2380): unsure at all n locations
ctgttatganttcgcatacgcttaaccgntttgcaattccgttcttcgagagccgattctaacctcccacggcaaaacagccacatgcccataaacaggtttgtaatgagggatttggatcgatccatgacaagccatcctataagaccacaacgcttcggccaaccgagtatgccattgccgaggataatcagaaattttccgcttaatcaatttgatcaaacttttattagacgcctcggcctgcccattagcttgtgcataataaggtgaagaattcaacaatttgatacccatgctatcagcaaactgaacaaactcatcggacacgaagattgaaccctgatcggtagtaatagtttgaggaataccaaatcggtagattatatgttcttgaacaaattgaatggcatcccgagaatcaactttcttcaaaggaatcacctccacccacttggtgaaataatcagtcgccaccaatataaacttatgtcctttacttgatggtgggtttatcataacaatcatatcgactccccaacctctaaatggccatggcttaataataggattcatagccgacgccggcgctcgctgaattgctccaaacttctgacaatcttgacaccccttataatatttgaaacaatcctccagcattgtcggtcaaaaataccctgcacggcgaagtaaccacttcatcttatgaaccgattgatgagtaccacaaattccttcatgaacttcgccgattgcaactttagcctgatcggcactcaagcacttaagtaatactccatcaatcgtccgataataaaactcatcatccaatagtgtatacattaatgccttataccttaatttcctagaagccgattgggatggattactcaaatatcgatgcacatcatacctccaatcatcggctatcattgctgcaatttcaactttaacatctttgatcattggcttatatcccgatgccccttgggctaaatcattagcatcaatattttgctctcgataaacatgctttaaagtaaccagccgaaactctttcattagttcttggcacttctcattataaaccatcaatgtatcattcttgcattcatactctcctgccaattgactgattactaacagagaatcccccatgatttcaatggtatcggcttcaacttccctgagtagttgcaaccccttgagcactgcctcatactcagcttgattattagtcgcatacggtttaatagtataagcaaactataaacatgcccccctaggggagattattactaagccgataccacagccatgagtacacaccgatccatcaaagaataaagtccacggtactatttcaaccgagccgattgaatcatcacgatgttccacaataaaattggctatagcttgtccctaaattgcctttggagactcataccgaagatcaaattcggttaaggaaaatatccacttcccaactcttcctttcaatattggagccgatagtatgtatctgactacgtcggctttacatataacagtacactcgttagatagtagataatgcctcaaccttgtacacgaaaaatacagacacaagcataacttctcaacaggggagtaccgagttttagcatccaagagccgacgactaagataaaatacgactcgttccttcccttccaactccggaatgaagactgagacgattgacttctcaccggccgataaatataacctaaacggtattcctttctgtggaggaatcaaaccaggagtagagctaagatatccttaatatcatccaaagccttttgctgctctgcccccaaagtaaattgctgatcggctttcaatctcaacaatggtgtaaaaggttctaaccttccaaacaaattagaaataaacctcctaacaaaatttaccttgccgatcatctcctataattctgtcttattctccggaggctgaatcttcttgatcgcattaacactcctttgagttacctcaatccccctttcaagaacaagaaatcccaaaaactggccagccgatacaccaaaagcacatttcgtcagattcatctttaggccatattttctggttctctcaaaaaccttcctcaaatcggctatgtggtcctctatttctttagacttaacaatcacatcatcgatgtagacttcaaccaaccagccgattagatcatgatatatataattcatggctctttgatatgtagctccagcactcttcaagccgaaagtcatgacaacccattcaaataagccaattgcaccagaacacctaaaagctgtcttatgaatgtcttctgcggccatccatcacacggcggccgccatcaaaacgt

SEQ ID NO: 15598 - DNA, 1938 bp, Oryza sativa
  unsure (1)..(1938): unsure at all n locations
actgtcatgttgacnctcgtgcgggcctcncgctgtctggccagctgtatgcaccatattaacaggaaaaggattaccatcgaccttcatcggttttttggtatcatcaaacttaatcttgcccccctcaatggccacctggatctgatgtctaaaaaccttgcaatcgttagtagaatgagacccaaaattatgccatttgcaatacctctttttgcctaactcctcggccgatgggattgtatttccagcaggaagttgaatttgcttctctcggagtagcagatcaaagatcttgtcagctttagtaatatcaaaatcgtatttctcttcttttccagaacttttcacccattggcatggtatgacctttttactccttacccattcggccgcagctatttcagaatcatcctcattatcatcctacctatacatgtatggacaaacatgattaactctcttagagttcttcctaacttccgcagacctatgctcatgcagggttactttctgtatcagatgtgacaagctatcaaagtcttcagatgagaacttctccctaatcagagcaatcataccctgaaaggccagatcggctaactgggcatcagttaaactcaagctgaagcatttgttcctcatctccctgaatctctgaatatactcgtgcacaggttcatcatgcgctgcttaatcgccgtcaagtcagatcatttcatctcatgaaccccactatagaaatagctgtggaattgcttctccaaatcggcccaactattgatcgaaccatatggcaaagaggaaaaccaagtaaaagccgatccagacagagataaccagaataacctaactttcagagcgtctatagccgatgcttcaccacactgagccaggaatcggctaatgtgctcataagtcgacacatcatcttgtcttgaaaatttggagaagtccggaactttgaactgattgggaagaggaactgtctcaaaccactcagggtaaggctgccgatacaagcttccagtctcttttggtttaagcccaaactgttccctcatcacatcagcaatcacatcagcccacggtcgttgctgagctgctccttgtggctgttgctgcatgggctcgaactaaccatattgagatgcaaaccgaggttcagccaatccccctggctgatactgggcttgcggggaaggaggctgatattgataactcaagttacccccttggtaattatgaaggttcggctggatattgcgcaccaagtgctcaggaacaacctgaggcattactgtgccgtcccgctgtacgtggtgaaacaaatgttctgggacaacttggtttacaaattgttgtacaggctgaccaccaggcgttgcaaacccggccgatgcacttattgacccctggtgcttaatcggcttgacgatttgctgtcttaacggagtcttgtggatccgctgcagaagcttgctgcttggtggtgttgctgaatccgcttgaaaagctgcttgcttgcacgacctgttgctggattggtggacaaccagctgaantgtgggtgtctgctgaatcgcttgttgctgnatggatcaaacacanngtgggtgtnagaaacatgcaagcacctgatcttggtcaaccgattgcaanctgcccgcatgctattgctgttcctcaataacaaccgagggtactatcttnccttgcgcctatctgatgtacaaatatggaattgttcccgnccccccgctgaatttgggcaacggagggaatcccctaaaaaaggtgaaatctggaccaaaccttgtaattgggagaacattcttgtaatacacgcgccccggcccgtgttcatttttgacactaattttggttctaagtttgagggtttgccaaacccccacttttttaaaacttggtcccccg

SEQ ID NO: 15599 - DNA, 1216 bp, Oryza sativa
  unsure (1)..(1216): unsure at all n locations
caaaaagaggattggttggttcaacaattcgcccctatgaaatgccagaacagaaaaagggtccaaagtttcttgaaggggtcaatgatatctcatcggatgtcctagctgggaaggcaaaaaaaagcaaaatggtgaaagccacaatacaagccccacaccacaagccaaaggttcttaccaaggaggaagattgagaatctaggagagcttttcaacaagtttgcccgctttgaagccattattgatgtagtgtgtaaagtgagatgattattaggaaaagaacttctcggatttttgcttcatggcgcgtggtgaatctgacacagagtatgaagataatgaggtgagtgatcttgaggaagctattaatattttgagtgcaaaaaataagaagtgtgagaagatatatagaaaacaggaatttatcattgaatctcttaaatctgaaattgataaattaaaatctcttattcctaatgataatgattgtgaaaattgtgaggttttaatgaatgagatttcaaaaattagagatgttaatgctgcacatgatttgaaaaatagatcttctcttgcttgtagttttgctttgcacacacgcacattggatgagttgtttttaactaaaaagttgttgcaaaaatatcaaattgcttttcatgctagtttgatgtttaacatgatttctgctaaaaagttaaaacaacctcatgatgttttggattgctcaacatgtaatttgaataagatgaaactaaaagatgctttaggtcgtgttgagtacatggaagatgttgtgaaaaacaatgaactgctttcttgccccaaatgtcgtaaaagcaaaggtgtcatggtagattgtgaaaattgtgctaatttggaaaaagaggtttctcatttgaaaaattctttgctaagattttctgatggtaaaaagaacctcaacatgattttagatcaatcaaaggttagcacacataaccgtggtttaggttttaatcctttctcgttatagaagagtgtttaaagctgattttgaaaatcctgtttcacctgtgataacatgtttggttgctaagtttgataaagatgtgatgttttggcatcgtagacttgcacatgttggttttgatcatctcactaggttaagtggtttggatcttgttcgtggtttgcctgnnctttgcaagnggnagtcaatatcagggcggtg

SEQ ID NO: 15600 - DNA, 1037 bp, Oryza sativa
  unsure (1)..(1037): unsure at all n locations
ggttgctctgcttggaatacctctagaatctcagcacaagatcttccctaacttaccgcgttccctttcggagggaaggtaatctttcccaagcttgcctggcacatcgacaatatgcaacggattctcgcgggtcatacgtatccgtctagtagataataagcccggagatggcaggtaagacctgggtggataatagccgatcgaattgttaagtcgaaggaagactttctgggatagcaggagcaactagtcacagccgatgtgatgccttcccacagccgatggagtctagtcacttgatgattgccgtacagtggaacaagcaggcgaaggctataaaatagacaagtgttatatagacgccggttgagtttgattaagtaaaagaattaaagacatcttactggtggagccgacttgggaatcattgctgctggctttttcttcacaacagttttctttttctacaaccacaaagtctatgggtaattagccgaagagggaagtaattttggtagaagtcaaaaagagatgcttactcttgtaaaatgaactagggcggaaggagttggaggcgtttgcctgggtgaaaccgatggtgttcgttctgtatcgcttacttcggctgcagcctcatcaacgtcatcttcaattatttcttcatccagagcttgttcactggatggatctagagcaggtagatcatcagctggtgtagtcttctttgtcttagctgtcttagccggggctgaaatatttacagtcgatgatttgttgtttcttttcttggcagcatcggctggttctctgataagcccttggagaagagctgaagtcttgggggcattatagccgatgatggggggagatggcccacctccgttggggatcagtcctggggcatactcgatatccctgacgttgttgctttggtgagggaacgaagattctgttgtctgcaaatcaggagaaaggttagctaaggactaatcgaccaagtagtgttcnnatngngcnttgaaggggattcaaaa

SEQ ID NO: 15601 - DNA, 2083 bp, Oryza sativa
  unsure (1)..(2083): unsure at all n locations
ccccccccccccaccatatattacctccctcaataccccttccacctattgtcaatactcctagtgttgtaaaaagcccatttgtctttattttaacacacgcaccgttttgaattgccaaaccacaaacctttcacccttttttttcaaagccttttcattactgtttttaacaaaggcgccatccgcccccatggttttattggcctcattttctttcaatcgaaccccggcaaaaatttttgtatattttggggccaacctatccctccatttctaggctttttggctggtccccatggtttttttttagttagctctaaaataccctatgcgagtctaacttcctggagagcgcatgcccccacctccttattgcccttcaattcccatttaaattcaaggtttattttttccacccacctcattcttctcgaatccaaagccctagatttccaccttgaattgattgtttacaaggcacaaaaagtgattgattcccataccgcccatccagtttaccaatttaaggaagaaattgtacctttcagtctccagttccgcagaagccagtgatcagtttaaaccaggctgcgggtgaagaacaagaggtagtagtggagaaaaccactaagaagttgaaggatattcccatagtcagagaggtatccaaaggtttttcccggatgatctgacaacaatgccaccaaaaagggatatcgagttccggattgacttggtacctgaaactgcaccgatccacaagaggccttacagaatggaagccaacgagttggcggaagtcaagaagcaagttgatgaacagttacagaagggatacatccgcccgagcacgtcgccttggggtgctccagttatttttgtggaaaagaaagataaaaccaaaaggatgtgcgtcgactaccgcgcactcaatgaggtcactattaagaacaagtatccgttgccaaggattgatgatctgtttgatcagttgaaaggagctacagtgttctctaagatcgacctgcgatcaggctatcaccagtttaggatccgcgaagaggatattccaaagacagcattcatcactcggtacgggttgttcgaatgcacagttatgtctttcggactcactaatgcacctgccttcttcatgaatttgatgaacaaggtgtttatggaatttctggacaagtttgtcgtggttttcatcgatgacatacttatctactctaagtccgaggaagaacatgagcagcatctccggctggtacttgaaaagttaaaagagcaccagctatatgccaagttcagcaagtgcgacttctggcttaaggaagttcagtttctcggtcacatcgtgaatgctcaaggagtagcggtggatccagcaaatgtggagtcggttaccaagtggaccccaccaaggacagtcactctggttcggagtttcttaggacttgcgggctattaccgtcggttcattgagaacttctctaaaattgccaagccaatgacacaactattgaagaaggaagaaaagtttatctggtctgctgaatgcaataggagttttgaagaactcaaacgacggttggtgtctgcaccagttttaattctgcctgatcagacgaaagatttccagtttattgtgatgcatctcgccaggggctangatgtgtgttgatgcaagatggcaaaatgttttctaatgcttcacggcagttgcgtcctcatgaaggcactacccacccacgatttggaatggccgaagtgttcatgctttaaagacttgcggcactattcatcggtaaccgtgggaagtttttacagacaccaaatctaaagtcatcttaccccaactgacctgaattntgccaaccaagaggttggagctaatcaaaattttgattggaaacacatttattccgcaagcttaaggggttcacacccctgaaccggaaagaacttgaccttccagggtaaagaactttcttggggttcaacggattggaactatgaccttgtttattaaccacgatttgggttgttttaggcacccccacacggtgacaggttt

SEQ ID NO: 15602 - DNA, 2155 bp, Oryza sativa
ggtttcccccactctttggggcgccaccccctctataaaaccccctgtggttttaaaagagcccccttcttacaagagaaaagaggggggattttcctaataacgggtgtttttaaaaagggcccggaaatttcttggggaaacccgtgtgattttaatattcccggggggtcccgcctttaatatagacgctctttttttactccctccggggggggacacaatttggaaaccgccaaaaacggccctttttgggttccctccccttgggaagcctttcggcacagttctcttatcggcctggcacactaggtggtgggaaaacagaattctcgcctttaaatgagttattcccgcccccttccccgtacctctcgagaacggggaatatattccctgagacagtggaaaggccccaaatcctcacaccactgtccacggtcggttgccgatatcattaagcacagtggccggcaatggtttcctgctctaagagcgcacagtgaacgcacgcgcactgaatttaagttaggtctctcgatcagcagcccaagcgtagtcttgtaagcatccgcgtcgtatgttgtgcgcaattgtacacggacaactctttctctcatgaaactccttttgaccgtacctcccttagcctctatgcgtgccgaaatagcaattagagctttcgccccatccttgtcttttaaccggagtccgcagctgttcgactccactccggtgtcattgtgacccgtgcttgaagtaggagcatacccaggggtgtatacgcggttttcgaccgcctcatcccgtgcctttgggacgtcaacctcatcttcttcctccccttcctctttgacgtagtcctcgtcgtcggcgtcgaaatcggacgaaacaggaaccattagtttcctgggcgcaagcttcactagtatgcgcgttaggtttcacccaggtcctgcatggtcgtgggctttgtaggggttcgcccgagtaggcagttcgccgtagtaaacccggttggcacggccatccgcttgttctgttagcagctgtctatactcgacgaccgacacgtcgccgatcatcatacaggcttcggcgtcagcctggtcaagggttaacactataaaaataaagggagtagccacattaagcgtcgaacaaagcaaaataacaaagcacagaagtgcattgcgaaagggcagtcttaccgttcgtcccttcagggagaaccaactttggcaacccatcaacctctttgccttgctcaactgcgatttgctacgactgggagaggggaaagatgcgaagcatgcagaattcctccaccaagtcgcggcagataaggcgggagcagaccttacgcagtaaagtgaaccgcgcctccatagcgcccgtcacggcgaatctttggctttttgggttaggggaaatcgccctacggcccactttcaaagggctttatgcgggtcagaactaatcctcgacggtgatgtctgttataaactcttccacaatcgctcagctttcccccctcctacataaagtgttctaccgacttctctatctaccatccgtcccaatccctctcaagcacaccttacatatccactcgtctatacccttaccctctttctctcttaaccctctcaagtaatcctcggcccttccctcctactcttctacactatgttctaccttactctatcattctccaacccttctctattcccatttctcttctcctctagccttccctatcgctctcccctccacctattttatcgtcttcacactgtatccctcacgttaccctctccttccattaccctctcctccaactcgacttcgcaagctcattctctcctaccctcctccatccttctatctctgctatatttcacttctactgtcgttctcatctccctcttacgtctgactctcttcttatcttccgacatccctcgtgctctctcttctcctgcccatcatactgtatgtcaccatactatcgctctactctattatcgcctatactcgacatcgctcaaattctctactcgtaatcacctacactcttcttctctcgattactcaacattacttatatcatcataaacctaacgttactcctcttaactcgtttatctactct

SEQ ID NO: 15603 - DNA, 1513 bp, Oryza sativa
  unsure (1)..(1513): unsure at all n locations
caccgcgcttctctccttctactaatattccgtctcgccctgtatcttctnctaccccactgttactttctctcncctccttttcccctcnntngcgttngatatacttnnntcnnncnnnaagatgtccgatggtggacgatcgctccttaccacccatnctncctctttcatttaatcctaatctttcattcatttcccaatcccaaggcgagtgccatttcttattattcaaacacaccctaacagtctaccgggcactcaatgaggtcactattaagaacaagtatccgctgccaaggattgatgatctgtctgatcagttgaaaggagctacagtgttctttaagatcgacctgcgatcaggctatcaccaggtgaggatccctgatcccatcggtcgcccactcacaagccagggtccttgtgacttggttcattgctcctgacgttacaaagcgcatagctagtgattattacaacttgggaagcaactatcaaacatgtttcaccaaaggtattcacaatgtttcactatgtatatatataatgttgtagtatattgaaatattcttttaactaaggagacggtgaccgtgaacgagaaggagccgaatgtcgctggcaagcacatctctcttggaccaccacctttgccggaccttactccggccgccgctgaggtaacttcgtcggaaccacttgatcagccaccactactgtcaatggtggtgggtgcagaagttgcagcaccggcgctgcttgcgctggccaacgaggcagcggcattgccgccacaggatgatcaggcagaggaagaggcggctgcagaagccgctgcaccggccgaggcagcggcattgcgaccggttgaggcaggggcagaggcggccgatgttggagcagcaccagaagagccgctgctggcgcctattgccggcatgggaaccgtgcgtattttcggttttttggttgagaagccggcacctggagacggcagtggaggagagggttcagcgcctgcatagatcgtcctagttatgatatttgattttgtgattttctttagctatcttcagagccattaggatacttgatttagaggctttctttattatgttcaccgcatagtagttaagataatttttgcttttcgatagcagaagtgttttcttcgttgtactagctagttggccgggttttcgaggttaaagactataagaaacttacagttatatatggtgtgcaatgtggtctcaggtgttcggttgacgactggcaactggcaaggctgttttgtttggggtaatcctgatcctgaaggaaaacatgaaaagaccatgggaagtgaggggtactactatgtcccggacatctgacacgaggcatatcatcagacaaactgtggatcatccactgcatttgggcttttcatttgctctctctttgttacttacgaatatatacctctcacattttcttttagctggagcaacaagcatcaaaancccgt

SEQ ID NO: 15604 - DNA, 2367 bp, Oryza sativa
  unsure (1)..(2367): unsure at all n locations
aaactaaacccatcgtcgaaagaacagctttcttccccaaaattgatattgcttagtgtgctttcacccaaggccccaaagtcttgtttggttggaagcttcggcccccatgcccacctttattgccaggagtttcgtgaagttgacaatgggcttgnctggcaacaaactnaccatttaaatgggtgtgtcgnccaaagctttgtccgtggggtncgnctgccatccaagtgagctccctagtgattgcaagaaagagatcaatggtcgagcaagaatagtctcttgggcaccgcaagaaaagggtactaggtcaccttcgtgtcggcgcattcatgacgcataatgnatgganctcgacgatagagagtatatctgaaggcgtgcgaatgatatgtagnccatgttttggagatcagatggaaaatgcgaggtatgtttgtgctgtttgaaggttgggtgtgaaaatgaaggtagggaagtgttctgcagagggcaaaagttcaaactgctgttgagaaattagtgaatggggagaaggtcaaaatgtgaaacagagaatgagaaatctgagaatagaagctgaaaaatgtgttagtaaagaaggatcatcagacaccggtctacgtaacttagtagattcgatattatcttttggaaaatgttgattatctgcacagatataacgtagtcatgtcttcgactaatacttgtagcctctttaaatgcggatggtattgagaagatcattaaatgttgtaatatctagttttcatctactactaataaccaggttcaaaaattgccgaatagaatttccaaaatttcagaccgcatcaaaataggaagctgtttcgcctgtttttctttcgaatttcgcaaaattagttcaaatatgacctaattttgtgcaaattctaaattattttggaccgttatattccaaaatatccaagattatttcggtcacatcggttgcccccggtggaaatagccaaactgatatattacattctgctataccagaaaaaaatgaaaatatatttgttgtgaatttgcataaatatacaaaatttgaaaaaaaatatatacagaaattacctgatttgcctggcagcaggatgtacaaaaataatctttaatatgtgaaaattactaaataatctttaatatgttttttcaacaatcaagtaaggaataaacatgatattagcatcaaatgaaactgtttgtcaaaacatttttgttgaaagatgaatttaatagactctttagaagattgcagattaaatattatattgttgaccaagatttgcttcgcaagaagtgaaagatgggaaacaaatgaaaagtagggtttttcatgaaacaaactaaacaatattccactaacacggaatatatggatagatatatgctaagtattataaaaataatagatagatatgtttaaataatgtgagaggagatgattggatatgtttacatgttgatttgtataattcaataaattatagataatatttaattcttgcataagtaattatttctacttgcatgttgagctttagattgagtatgttgtatttttataatttatttaggtatattcataaaacattgcgtgaaaaatagtatattttagtgtgcgctagaaatgttactatctaaacaatattgtgttggtctaaaatgtccaattaataggcctagcagctcgggcagacatgattgggccagagagagcccagtctgctgtaaagaagcgaccaggcccagctgcagggagcaagtgcttcggaaggaaaaactccatcttgactccctcaagtatcttaatagtaaaaatcgagtacattgactcactcaactattaattaatactaagcattttaccgagctcattggtttgcgaggtggttttggctgacctggcagcctaagcatttaaaaattaaaaaatagatgtggggcgcacatgtaagtgacagaaaaaagaaaatctatagccacaagtccgacatgaagaacttgagatagaagcttgcccaagcgggggttgccggcaagccctcttgactccgaatccaacaccatgccattgatgatggacaacggcggtggggtgccgcatcaggatggggagttcttcgagctagtcgagtcgatgattccgctcgaagggaacagtgcaaagcgccgttgttgctttggcagaggcaacagttcatcaacgggttgatcgatattcacgatcctggcagtcgacgtacgacagaacatattttggaaaccctctattaatgaaattagtttcatttttagttccaccaaatatgattcacctagtgtactcacaatgttata

SEQ ID NO: 15605 - DNA, 1191 bp, Oryza sativa
  unsure (1)..(1191): unsure at all n locations
cgtaccaagggcacactttcctgggttttggtgtttacccaagggggaatctgggggaaagaataattaggtaagccgggccagttccaagacataaccgttaggcccttccgatgagcagagccaattttctaaagagcaanatncncaggttaccttggttcgcaacaaggttcttggctctgccagcngaccaaaagttgtgnccacgtaaaggaagtttgaaccatatctaaatgaaacaagtggtaaggtgttaccnctcttctagtttacggnnaaaggttgtccgttgnaagagaatgagaagtgaatgcggggcatgagagcccggaaaaggcaaaggggagggtagggaggatgttaccgcccctttataggtcagagaaggaaggggaacttctagggggagctcggctggtcatcaatggtggcagtttggccagagttaaaagattaggcagattgagacaattaatgcaccaattgaaggggaattcggtgggcattgatgcccatcaaagatgaaacctatttttgcagttcataagaagacgaaacgcatgtggagacatatctagagggtcggcaatgtttgggtttgtgggtcaaggagaggagcggtcggctgaaggtggaataaaaaaaaaagtacttcctcagtttcatattataagactttctagcattgcccacattcatatagatgttaatgaatctaaacacacacgtgaatgtgggcaatgctagaaagtcttataatatgaaacggagggagtagtaagaattttagttacttcaaaattgtgtttatttttctttttctattttcaaaatttattttatttttattttgagttctaattaatctcgtattatgttatacatggactattttttcaatattacttatctttattctgaattttaaccttcaagtctagctatttgatgtatggggcatcgacttcatgggacctttcccaaagtcctatgactgcgagtatatcctagtggccgttgatgatgtgtccaagtgggtagaggcaatgccatgcaggaccgcagacgctaagcacgctcgccggatgtaaaacgagactattttccctcgttttggaactccgtatatggtgataagtgacggagggtctcatttcncgnntngcnnantggannatgaaatcaaaa

SEQ ID NO: 15606 - DNA, 723 bp, Oryza sativa
ccgcgatgcgaactgcgtacgagcccgaatccgaatccaaatgtgtagatctttatctcttgtcttctatggaccaaaagtgacgtggtgagatgaaagaaaacttggagaaggtcttggtttggtccccaatcaacttcttcaatcatctatgctttccttacgctcggtctcttttctttcgcccaagcaagcacctctgcgaacaaaaacacatgaaactcattgtgtagcaacgtttattcaaatatataacaagtaaatctaatatagaatatatgtacctttatttgattaatacataaggtagtcatggttatatccgagctagttatgtcctcatcatcctccccttcttgattggaatccgtcctcagtttcaccttgtcatggagcgtattgcacttatctttgtctatcacagcatcctgtgcggaacatttcttgatggccatatgattggatcctaaaatctttgtagtcaaaaaaccacaacactccccttcttgcaaaccaacctgtaactcatttatacaactagaggaactagatagaaaataacttatatgcatgcggtcctctagacaacacatttcatcatgaaaaggaggtatagtcaaattcgaacaaatatatactcgatgcacattatattctcctttactatcataattgcccattatatgaaaaatcacatcagaagggcatggcaattcaaatcta

SEQ ID NO: 15607 - DNA, 1197 bp, Oryza sativa
  unsure (1)..(1197): unsure at all n locations
ccatgaggtgcccgcaatatatcctttaggttggttttcagtgactgccgagtgcccccattggcccattcccaaacttcctgtgtattaaccagcaatcccaggtgttttccgggcagtttccagtcccagattaaaaccacgaggggtttccagtttttttcctaaagctttgaaggaacggaacaggcgccaagctttgggtatgaacccaatgattggtgccccacacgctgggcgttgaagcgcgtaggcttcaatgtcatcggtcgggtcatacgtttctttgtcgcggggtgaccatgcagccgcaccggcctggacaatgttgttaccagcgctgcggcccatatcgacttcaacaggctcgaacgcttccccggtcatggtgtatttaccgctgagcaccgccgaaacagcctgtttctcttcgacctgagcaatcgccagctcttcatccttcatgttctgaaggataatgcggcgacggcgatagaccgggtcagcgagattctgcggatcctcatccggcaggcggcggagagtcatcagtgggttaacttcgtgtttcggcttcacataacccggcgtgaattcagacgtgctgccgccacgggagcggatcactttgccggagacaatcggcgagacgtaaagcgccatattgaccaggccaggaatttgcgacaggtaaaccttctctgtactgaagggataggtttcgcggaaaaagatacgcaggaaaagcggatcgaatttgaatttcttctcattgaccgccagcagttgggcagtggtgtaaacggacatagatttttcccgtaaaaaaagccgcgcaagcggcttttatgaatgatgatggttgtagaaatgcggattaaacgatgctgattgcagtaccggcgaacgcgttacgtttaatgttgtcgtcggtgacggcagatggccagaggacatcttcaatacggaaagnnnnnnnnnnnnnnnnnnnnagttccgcgctgttctggtctgcggttacagccaggatgcccattgccgcgccagcatgagcaccatcccagacggtcagcttgccagaagtggcatccagcatgagcggcgtcatggctggagtggaagccgtcagttcgccaggaccatacgcagtgtgcgccgggtcgctgttaccgagaggatgtgtctacctnaaaggcc

SEQ ID NO: 15608 - DNA, 1205 bp, Oryza sativa
  unsure (1)..(1205): unsure at all n locations
tcgtgccnttgagatcgctaacccagatgaggcgtatgaaccggataatataggaattggaatcattgcaggtctagcatatgcatctattgaattaaatcaaaaagcaaaatgcattcgtccaataatttttttaagggataatatatttaggtcgctatcaaaggaagatcctgattactcgagaaatatagagggtcaagtcataaggttgcattgggactgggcacaactcctaatgctgtcagctaaaagaatgaaagtagcatttaagctagatattgagaaagatcaacgagtttgggatagatgcacagcggatgatcttaaagggaggaatggttttaagcgatgtttgcaatttaccctttaccggcccagggatttactatcattgttgaatgaagcttttttttccgcattcagagagaatagagaaactatcataaacactgacctagaatatgcagccaagtcaatttccatggccagacttgaagatctctggaaagagtatcagaagatctttccttcaatacaggttataactagtgcatttcgtagcattgaacctgaattaacagtttatacgtgcttaaaaaaaatagaagcatctttcgaattaatcgaagaaaatggagatcctaaaataacgtctgaaatacagttgttaaaggcaagtggaattctccaaagtttgtatagtgtaggatttgttggtattcgtgataaaaacacctcatcctattcattttgccatgacgggcgaactccagataaaggttttgaaagtaatgaaaaattattaattcatccatgttactggctgggtttgaatctaaatcgtaatgcacttgctccagaggaagcagaggagataaatgacgaatatgatattaatattatttcagataattcagccattagaaataaaacaataggtcaaataactactcatctagatcagataccgataggaaatgaaggtgccactgatttgacaatggtgtttaaaacacttagaatagtattgcttccaactaacagcatgaagttccatcaatggnaacccagttaaagaacagatatattgcgacaatggttggcaactggattttggaacagtattgaaggctttaaacaagcaagttgtttgaggtaaaaatttgagaaataggccttggtattacactccatcatattag

SEQ ID NO: 15609 - DNA, 3170 bp, Oryza sativa
  unsure (1)..(3170): unsure at all n locations
atttggnnnnnnnnnnnnnnnnnnnnnnnnnnnnnnnnnnnnnnnnnnnnnnnnnnatgtttttaacgacttaaaaggtaattctaaaaatttcaatgaaaaagcttcaaaattaagttttaaaaattaaactttggcagtagtagttgattctatatagggcaaacgatgaggcccacaaaatttgtttgagatatgtgcgcttctaaataggcataagttcacttttcagtttgctaaactttgtcagacgcagccgaagaacatctgtatgaggaactccatgtgtcaagcagaatgtggcaaataaaatgtcagacccggatgcattgcagacttccatcttgttgcatcgaactaaaacagttcaattcctgtgaaaaattttcagacgaacatatatatactacttgcataagcccgttgcaacatttcagttcatactacttgcccggagtatgaagtatgaaatgaactgttgcacaataattgcataagcctgcacgtgcaagattaacgaccaaagtatttgccaataaaaactctaagtggttgtttggatcttaaaagatacgaaccagttttcagaaaacatgttttactagcaaattcgctcattccaattacacagtccaaacagataaatatcacaattcacaaccgtagtaagaaatattttttaagcaaaaccggtttaatcaaaaacagatgatccacacagcctcttaatgcataacaaaaatataaatattctctcacaacactcacactggattctgcatctgccctacagcaaaacagcagatcagcattattcttcatatcacttgttcctgcaaaacttcatgggtctatccatggactatggacttgcaaactcatcggtgcaactctcccactggccatacccggagctgaacgttcctccaccgttggtgaccgttcgcacggagatgccccactgccgggccatgtccctgatcgacattggcaccgggagtttacgcagggcacgctggaacaccttgtcaaccatgcctgaaatcacgctgtacattccctggtgctgttcatcaccatcttcgtacaccggggagcttcgaggataatcagctgggacaaatagcttcgccggcttgagaggagacgttccgtatgctgcaaatggtagctccatgtcttgtgcaagagacactgcattgtagctgaatttgatcactgtcccaccatgtttgtgaccggtgatactgatcacggtatcgaaaagctcttcgttgatgaggttgatctcatacaacagagtgatgtgaacactctgttctttctgcctctttgtctcatcatcttcatgattaaccaagttgtcaatatggcttagctcataagctgatgttctatcagtaatgtttttccatggatggaaaatggtcatttctgcaggttgctcttgccgattattctgaatccgtatgccaccagtggatgggtttggctcaccagtaggcttgaggattcggggtgactcacgacttgcatttgtctctttaattttaccattcatctctctaatgttcctcctcgaatcaactcctccaatacctccatcttctgaaacatttcgatcggccaatcgttcgggaatccccgatgaccaacctgcacccctgcaacgttgatgtccatgtacatttggttcaacagttggctgtccttgggttcttactgaattcaccaaatgctgaagaagctgattgcaacaccaatgaaatgctagtggagggattgctccaggctgagtgttaagaatctggtggatcataaccttgatcaggacttgcagctcgacaggtagccttgtgggaacagctatatttgacgcagttatatcaatgctgctggtatctttcaatactctgtccacaaattccttccaataggcacgctctgccacacgaagtccagccaatgccgcatctctggttgaacacaaacgaaaaaaatggtgggtttagaaattcagatcgaagtaaaagctaaataccttaaaaaaaatgttaaagcttcacaatgacatcaaggtgtcatcttatatatttccagaatctatccacttatcccctaaatgagagattaattaaaagctaaatcacaatgacatccaggtgccatcttatatattttcagaatctatcctcttatcccctaaatgagagattaattgaatcctcagaaagctaaatcacaatggcatatacaccaccctcatgaacaagtaattaattgaatcctcatgattttgtgacacacaacgcaaactgctcatgatcaatgcaattttccaatttagaatacggacaggagaaattcagagaataacaagaaaggaacaaaaggactaagatcacacatcaaagcagagaaaaagcatagtacgtactttcagttcttttaaccagacaaaaagcatgttgacgcaactggttgttgaaattttgacttgcgtagatttgatttgaatcgcataataccgttctttaaaatgaggaaatagttaaaaagaaactattcggttctttccaaaaacaaaagaacaaaaccgatcccgttcgaataaatttgatccaacccgaatctcattattcagtactacttaatttcataactgaatccaaccaatattacagcactcatgccgtcttccgagctcgacaaggcaccgcccgcatggcggaccgtaccaattaccaaagattttttttggcccgtgaagagaaggttggagaagagggggaagacgagagggaagaagaagacgtcctgtagccaggccgcctcctcgccgcgttcccggatgacgagggaagaagaagaagaagaagaatccggacaccgccgcagagatggcggcggcggcggttgcaactagggcatctgggcatcacaacgtgggcagatgggcttaatgggcctcacgatgacctgggccaaaatgagcaaccttagtcattgttggagtggggcccacatgtcaacggccgctcgcatcgaatcaaatccatcagccgttgtccacgttaatcatattcatagtatagcagcattcacatagaccctctatcatcaagaanaaaggggagcatgtaattattncccaagatcgtagtcgacct

SEQ ID NO: 15610 - DNA, 820 bp, Oryza sativa
ggaattaaatataaattcttcttgagtaatttagatttatcttgtgagaattacctcttggttaattcctaattagcatacgggattattgttccctataaacagctaaaatatagtgattgctatggtgagttataaacactaaagtagatattaattgcttagacgtggtgtttgggtaattattatgcagtaatttctgcgtatcccacagtacgttgaggtgggtgtagaggtggtgatagccctcgagatcactaaagtcatccctgtccgggtacgcagtagagcgacatctgggaacagcgggttgccagtgcctgaagtattgcgttaggattaaaattaagctttccctagacactgtttctcactagtaaatcctctctatcctggcctattatttgcttggtgtccttggatgaaccagaggaagctctgatcacacacgttcccttggattcgatacccttggaatactccgtagaggaaagtgctacatcggtatatccgtgcgcttgcggattttatctgtaaccgtatcatataccaacacacgtacatgagtcggaggaggagcaagagagataccgaggcgaagattgcagatcttgagtacaaggtatcgagctacgagctcagcatgcaagaggaggtggcaaggaaggtggatgaacgcatggccgtacatcggtcccaggatccccagacgtacattccttctgtaatggtcaggccctcaggcaatcgtagcagctgcaccttaacggggcaggtagaattacagagcatggacgccatgcaaacttaagacgaaacc

SEQ ID NO: 15611 - DNA, 4440 bp, Oryza sativa
  unsure (1)..(4440): unsure at all n locations
atgaagttgcnnnnnnnnnnnnnnnnnnnnnnnnnnnnnnnnnnnaatcatagcttgcaactgcatatgtagggcttgggatccgttccatcaattggtccgcgggacatggaaagaaaaacttggatggaggtttcattttccagtgagtacatgcatgatccaaaattatattgaattgaatctctaattacagttaaaccggcacttcaaccatttttcccggtccaattacacacgtggggtgtgtttgcaaaccctttttcccaacccatctccctcatttttcgcgcgcacccttttcaaacggctaaacggtgcgttttttttaaaaagttttatacgaaagttgcttaaaaaaatcaaattaatccattttttaaaaaaaaatagcaaatacttaattaatcacgtgttaatggatcgctccgttttccgtgttaactgtgcacgttgggaaactggagtagcgaacacaacccatggtgggtcttttaactgaatcggatcggccgagtttccagttcagatgggaccgccggtctggtctgatcctcgataaccagtgacgatcctatatatactttcctcgggtactcggacctcggataaattaaccaattctaactaaattatatcatgttaattagtatatagataaaaaaattagataattaatatgtattggattcccgataataaaaccagtgttgtggtagacaagttcattaatacatcaacgtcaaacaacaatactgcagtgttcagcgacacagtaccagcagatttcatatctacatataagcacggctcatcactttgccatccaacaatgtgggcaatatagtatatatcgaggtgccacaaataaatggaaggtatccatgcagggacggtgacgatggcctgcagctggcttgttctcacggccgccatggctgggctagcctcttggttgatccgtttggtttcactaaaatggaacagcagccacccatgcaaagctgatgaaggcagcaggctgccgccagggtcgaggggccttcctcttctcggcgagtcgctcgagttcttcacttcgagcacctctcttgagctgcccgtcttctttaagcgccgtcttaataggtaaataatatgtgttctctccattaatctaaaatataagcatttctgactatatatacatgatggatggagtttcaacgtcgtctagacaggtaaatatacatcttcttcctccattcctaaaccaatatcttcttcctccattccaaaacctcagcgaaaaatgtttaattatattttaaaacagagaaagtttaataatgcacgtaagcatacatcacgacatcacgtacagctccgccagtttgtttccttggttgaatgcaaaactgtgctaacatgatcagaacgtcaatatcttgagcgcccatcgacgcgagaaagttgcatcacaatatcaacatcaacatgagaagatgaaattattacgtagctaaaaattcgtccacttttaaatgatatatccttaacatggcattcaaagagagcatgtactgctaccgaattgatttttctggacgacactttttaggacgcaagtggaccaaaactgttcctctcagtaaaaaaaaaaaggccacatgcgaaaatgtatttttacatgcggctgattaagtggtccatctacgaaaattgacttattttcccaggcgagcctcctaagcgaccacatacaaaaatgcattcttgtagacgggtctcttaaaagcctgtctaaaagtctaacatcccccctctcttctctcttagcatcttcaaaattttctaagtctctcaccttatctcctcatctctcattttttccttagcatctcctctctctccccactcattttatcccccctctctctccaaaacatctcctggccactaacctctcctctctctccccaacctctcgggcggcagtaggagtgacgtcggcgaggacgagtggcagcggtgacatcgacgagggctcggcctccaaccgtcgtctaccccgccacctctcctctctctctctgtgtgtttcttctctcccaccagaggtcgcagggtgctggccaacggatccattggctgcaaattcgaccggcacgaatctagcggtggttgcgatggcacgcacgagggctacggcaagctcgggcggtggcatgctcggcctcgtacggtggagagcgcagcggtgtcggatcgggtgatggggaggactgctacagcagttaggaggtgtggtgacaacagatccgatggtgttgagggcggcaacggttcggacgcgcagcgacggtgacgatgacaacgagtagtggtggattgcagtgatgacgatgaggagttgtcgggcctcggcgacgatgagtggtggcagatgtggttttcgggatttttatttttttcgtgatttttattttcacatgcggatgacataagcatctatacacaaaaatcgaaattccgcgtgcgactacaccaaccgcatgaaaaaataatgatttttacagacacttcagaaaagatgatcggtccaactatataaaaaaataggttttaatcgcatgaaaaaaatagatttttaagtagtgtacataagtggacatgagcatttcgtgaaggacaagacggcgaccaccagcgcgtgagcaggtagatgtaggccgaccccacacgtaccatgcacatgtcgttagcttggccgagaatgtccattccctgtacgtcgtgtacaagggacatgtatggcacggtcgctctcgtcacgggattatttgcgcccgctgcgcaagaagacggagagatggagaggcaggaggagggggagaagagaaccgacatacgggcattaatttttatcgcaagccaacgaaggatggggtaaattagtattaggcagatgaattttgttcggacatgttttttcccaataaatataatagttgagtggtttatattatatactatatgagacccgtgctttgctgtaggagtttaataatatacttcttccgtttcacagtgtaagtcattatagcatttcccacattcatatcgatgttaatgtgagaaatgctaaaatgacttacattgtgaaatgagggaataatagtaatagtagaaatagcgtgtaacatagctagacaacgtaaggttatagaatttttgatcgatcatttcaaaaggctataaaccacttaaattgatgtgatttatgataatttaaatagtatacagtaaaagtaaaataaggtgatgtatttttataagagaaaaaaaggaataatttggactatagattaatcaactaagggctagaaacaattaaagtgacgtggtttaatgagagcgtatagaaaacattaattaagtggggataaagtatatatgatattctagaaaatgatagagagatatatgttaaaatattactccctacatccaaaaatataacaaattttagccatcaagatttgtccgaaaaaataacaacttctccaccaacattctcttcccaacctgtcggtgatatgggcccggggatatcatgtttagagggaggaggccgccccaaacccacgtggcgtccctagaggagggtggcgctcgggaggagcggcggccgccccctcagcttagggtatcgaatttggagcaaggaggctgccccctaacccacgtggcactcccctgagggggtggcgcccggggtggagtggcacctgcccccttcttgcttgggagtcgggcccgtcccgatcaagactagagggaggaggctgccccaggcggcacgtggccctccaccgaggggggatcgggcccgaggtagggcggcggccgccctctcctgtgactaggggtcgagctcccccgaccccctctctaggtcaccacgtgcgatgggttatgtggctgcctccaggcggacctgtcccaatcaagactagaaggaggaggctgccccaggcgccacgtggccctcccctgaggggggatcgggcccgaggtagggcggcagccgccccgtcctgtgactaggggtcgggctccctcgaccacctctataggtcgccacgtgcgatgggttagatggccgcctccaggcgctcacctacccgcttttatggcgatctgagcggttgcgccacgccgcatttaatgtggcgtgcagtgcactcaaccgatctgtgataggtccgtgaccggtcgaacgaccgatgggacggcggctgtgtaccctcgcccagtcaatttgaacccagcgtgcggcgtgctccgtaaaatacaatcataacaatgagggacttaacagcttctcccnccggtcagagctggggggcnnnttcaacannnnngnnggntnnaacgtcatgcgggatcgtatgagcg

SEQ ID NO: 15612 - DNA, 1950 bp, Oryza sativa
  unsure (1)..(1950): unsure at all n locations
aaaaatttggggggtggggggggttaatttcttcccccttttaaagaaggttaaataaaaaaagnaggncccatacctagcggaaagggggatcgaactctggatcccgaagccaagctttctctaaccctaggttgtacatcggagattcaaaggctttccaagcatagaagaatcatcatacacacaggagtagggtattcggcttcatagcagcccgaacctgtataaatcccttgtgtcttttgtctcaaaaacctcggatctcacccgctgcccttggcggaactcaaaaaaggggggcctcacggttccctggtggagaagatcaccctccgacttttggcgcgttaggtagggggcgcgttcgtgatttttgaggttctttcgagcgctggcatgataagcatcgcgccgccaatgcaggggaaagcgcagcctcttcaagagtgccgtgccaccccaggcagggggctaggccccccgcctcttccccgggtaaggctggcggccaggtatttatggcgagtcttcggaatgtccaatgacccccaaaagtttcggcccagcttcacagaaaggtaccacggtagcgtcaacacctccgagtccctctagaaccacacgacgatcatataggcggcgtggggtgatgaccgggtcaaggcaaattttttccccatggccctctagggccaagcgcggggatcactcatgaacctgccacccgccttggtctactcctgggagggctcttgcagttgagctccgggtgccgtcgaagcccgggaccccctgtgctggctctttcgtaacggctagctttggtcccgccggctgcatacagtgcccggcccggctcaactgatcgtcctttcaagcttcaagcttcccaaaatggttaggaacacatggtgggaggccctttttgagctaaaggtttgaaaggtcgcgacatgcaagcaaggtttgtgtttgcttcattcatacaagcgattctttgctataagtgtgggggctatgattcctagttctatcctagccctgcgtcgagctctgggcgccgttgacgcccggggccccctgtgctggctcttccgtagcggctggctttggccccgccggctggctacagcgcccagcttggcttgatcgtgggtaaagattgttggctatggaaaatttagtcctcgcactcgcgcgaagataatcatttgcatagaattattgttgcttatatttatttctctcccatctcttcctcgcggtcccgcagtacccatgtgtcgcgcgctcgtttgccccccttggtaacaaaaagtttgtattcgcttcatccattcaaacgattctttgctaaaagcgtgggggctacgattcctagctctatcctagccctgcattgagctctagacgccgtcgacgcccggggccccctatgctggctcttccgtagcagctggctctggccccgccggctagctatagcgcccagcttggctttatcgcgggtgaagattgctggctatggaaagttcagtcctcacactcacgcgaaaataatcgtttgaatagatgaaatagaacacgaacagaggttaacaaaaggcaggggcaagtgaggtacgcggcgtaaggtcacgggcccgagagaatctaacaacatttgctgtgtatataaaggaaataagttcacggcctaaggtacgggctaaattcctgagcccacggcacctcggaacagcggaaggaagtgggaagtaaggctggcgtgtgaacgtggctaaactcccaccggccaacttccaggatgatagaacagaagaccggaccacatatcattagactaggagagtggcgtcaccctggccacctagggaagggtttggtcagggctaacgccgggggctactgttcgtgatatgggcccagggtatcattgttagagga

SEQ ID NO: 15613 - DNA, 3069 bp, Oryza sativa
  unsure (1)..(3069): unsure at all n locations
cggtccagttttcaggacgaacatggtcgggcaagacctgatcgtgtgtctcgatccgaaggtgaacagcttcgtgttccagcaagaggaaaggctcttccagtgctggtaccctgattcgttcatgcggatcatcggcgccgacaacatcatcacgacgctcgggtcgtcgcacaagtacatcaggaatctgatccttcggttgttcggccctgaaaacctcaggcgtgcgatgctccaggacgtgcacagaacggctcaggccagcctgctctcctggctcgatcgaccgagcatcgaactcaaggatgcagtctcaagcgtatgtctgatggaatggctattacggattcaccccctttaattttttgcgattgcgaatatttcagttgaagtttttctcttctttttcagctatgtgtgaattaactctgactagagaaaatttgagtatgttccagatgatattcagcgtcacagccaagaagttaattagctatgactccttggcctcagatggaaagatgtggaaacaatttgatgctttcattcgaggtctactggcatttccaattggcattcctggcaccgcattctacaaatgtatgcaggtaaatatctactagtatatggtgatagatggttcagctacatgcatgttaacaaaaaggatacaaaacatagctggtaattggcagaaataaatcaacttgcagaggagaaataaatagaggaatttagccgctaagttatagcataattatatatccacttattattggtaaaaaaatatatccacttatcgatacagaggccggaatccattaccttaaaaaaaagttatcgcacagttttctactctcttcaaagttgacaatagtgtcctatatatatatatatcaatttgtaatcttaaaaggagatcccacatggagatggattcaattcttgcaggggcgaaagaatatcatgaagatgctgaaagaattgattgatgagaggaaggaggcatcagggcgacggggaagcattgacttcattgatgtgctgctcgaggagctgaacgaggagaagcctttaatcagtgagaacgttgcgctggatttgatcttcttgctgctatttgccagcttcgagaccacggcatccgctataaccgcagtggtcagatttctaacggataatcccgaggcattgcaagaattagcagtaagtacaagtcataaacttcttttacagtagatatatttccatcattttcaaacagtagtgatgtttagggttcattattaattaaattactagtttaggccagcatattgttacatgcaaataattcaggatacattttgttgaacaaaatgagattgatttgttgtttacaggaggagcatgataacattcagaaaagaagggtcgacctgaactctgaaatcacatgggaggaatacaaatctatgaaatttacatctcatgtatatgacttaaaattcctgaagcattatttatataaaagatcagccatcctcgcgcacaccctcatctccttaattattcgtaggttatacatgaagctttaaggcttgctaacattgctccagtgatgtttagaaaagccacagaggatgttcatataaaaggtaaaaaaaccattattattattaacaagaacttgtacaagagatacataacagaagtatgcatagagtaccaatttgcaaaaaaaaaaccattttataatatcttcttctgaaatatgtttgtctaatatgtgcaggtttttttatcccaaaaggatctaaaattatgatttgtccttccacggttcacctaaaccctatgatttataaggatccaaatatattcaatccttggagatggaaggtttgtaaaattcataacgtatgttctatcatgtttcataactaaccatgcatctatatatacactaaaatttatatgtaattttttctgtagcttgtactgtccgtttaaaaatatagggcgtatgtatttttaccacaaatttcttacactatttttcttacatttacaatgtcagtcataagaaagtacgtttgaacatcaatccataaatatcatttttatggcaatacctagatattattgaattagttggtcaatactcaaaattgaacagtcaagtgagtagtgtatatatgtatgtattttttttctatgtcatatagtaaaaaaaacaatattgagaaatctggagtgacttgtatagcattatgccatctataagttctcatttgtaatatgcatactgctctgtacaggatactgctgaaccaaccggtggtgcctccaaggatttcatggcctttggagggggactgcgcttgtgtgttggtgcagatttcgctaagctgcagacggcgatcttcctccactgcttagtcaccaagtataggtaaacctacttgtactcatctacggtacctcagtattgagatatacttttgtaaagatttacttagttcaaaatccatcagagaacttcgatcgagatcatttaaatttcatcggtattaaaagatgtactgttttgaaaaaacaaattctgttatacaagtaatgaatacattaaagattgacatctatagttgtttttctactatgtttaactctgttaaaaaatgatctttggtttatgctttgcagatggaaagcgatcaagggaggaacaatggtgcttggtccaggactacgattccctgaaggttttcacatccaacttttcccaaaaccttgaagtaccggggccagatacttctagcccctacacaatatatgtagctcagaagcaacgtttgagatctatattgttgatgattggtacttcgatgtaatttccattaattttctgctgttcccattagttcactgctgaatgagctatgcttattcttcactttgccataaatgttgtgtgatgtccaaatatcacaaataaatgtagatatgtttgagtnnnnnnnnnnnnnnnnnnnnnnnnnnnnnnnnnnnnnnnnnnnnnnnnnnnnnagctaagtgtctatatcc

SEQ ID NO: 15614 - DNA, 1301 bp, Oryza sativa
  unsure (1)..(1301): unsure at all n locations
cgcgtgcnttttgaatcnnnnnnnnnnnnnnnnnnnnnnnnnnnnnnnnnnnnnnnnnnnnaatcctacctggattttttttttttgggatggagggagtattgatttacctgttagtatgttggtagcttggaaacctaagttctataattatgctcaaatgtgtgtaatgcctaatcagcttaagatggtcatgtattcatcttgaacttctatcggcagtgaggcagtctgagtgatgggaaggaatcaactagtaaatctttttcttatagtgcaccattctaaacttgaaatggttttgtgttaccatacttagcacttatccactgttgattaagataaagttttctggcatcaccaattgctaatttgagtcaggtttaacatatcctcactcacctatgcatgtgtagggacataataaatacatggtttgtcacagagacaggacctaagttaaacaacacctgaatgctcagggtccataatggcataatgtagcttacattttatttacatagtaaatggattactaaatttcacttttcgggtcaatgcaacaggtcttgaggaagttggtggacgatgcatctaagtttttgaatgacaaaattaccaaagcagtggttactgttcctgcatacttcaatgactcacagaggacagcaacaaaagatgctggacgtattgcaggattggaagttctccgcattataaatgagccgactgctgcatcccttgcttatggttttgagaagaaaaacaacgaaacgattcttgtgtttgacttgggaggcggtacctttgatgtctctggtatgttatgtgctagaacaccaaactgtttacttttcttgcactattactgtagcatagggatctcgtggacctgaatcttatcatacttctatgacagaccttttttcctagatggatcgtactggaaaatagatgatgaattgatttgatcaaatggaatgtgaaatgctgttgctgtttcatatctgtgaaatcttttaccaaggttcacaactgtttagccagaaacatgagttctttatatggttcctccagaacttaatatattgtcttttatgaaggttcagaactatttagccacaagcatgagttctactttatatggtccctcctgaattaaacatatcgttactaaatatttgagttgagtagctccttgttctatcatcatacatatagaggctgccctcgagttttttaaatagatcaatatttagttaaaaagggacttntgaagagagatactcaaagcagatttt

SEQ ID NO: 15615 - DNA, 2490 bp, Oryza sativa
  unsure (1)..(2490): unsure at all n locations
gcgggattgatatacnnnnnnnnnnnnnnnnnnnnnnnnnnnnnnnnnnnnnnnnnnnnnnnnnnnnnnnnnnnnnctactaaagaaacattatcctgcagtattggaggttggagatggtgtgtttgaggtgctttccacatctggtgacacacaccttggtggcgatgacttcgataaggtatgtaattccatttttatttttaagagattaactactgccgaatctccattttggaatttcgtgaaaatacatcgcaactgttcgaactgttttctatggaatgttgcactatgcatttttgacaaatattatatgatgtggtgcctcttatgtgtattacattattctttctttggtaaactcacaatatcagtcaaccaaaatttctcaataggttgctcgttctatataattatgttattgcagttttatttctgttgggtattttactttggagccatgactcatgaaactcctgtaagtatgagctctgtgtgttttgtgctggaatctgacctcttcaagccttccatatattctttatgtaatgcccatgacctaaaaatatgtaatttgaacttttgaaagtcaacttaggcttcgttcgttcccgggtgatctgggagattgagagagaaaacatctcgttttccgcgcgcacgcttcccaaactattaaatggtgcgttttttgcaaaaaaaattccataagaaagttgctttaaaaaatcatattaatccatttttaaaatttaaaatagttaatactcaactaatcatacgctaatggctcacctcgttttgtgtatctttccaatcttcccaatctcctcaatccccttctcctcaaacacacccttagcatatcaaaggtctattggcattgtagtgtagctccatggacaacatacctatcagttgaactgattcttttactgacagtatgctatatttattgtttttttttaatttgaatgttatccttgaattatgtagaaagttgtggattggcttgctagcaactttaagaaagatgaaggcattgatcttctgaaagacaaacaagccctgcagcgactcactgaggcagcagagaaagcgaagatggaactgtctacgctgtctcagacaaacattaggtgagcttctttccaattgttctcacagagtattctattgctcatttggtgatttttcttcttaaataattgaatgtcttgaattgcagcttgcctttcataactgctactgctgatgggcctaaacacatcgagacaactctctccagagccaaatttgaggagctatgttcggacctcattgataggtaaaatatggacattctgctgatatataagcctattgcttaggaaaatgatttgcattttctcaaatttttttaaggcttgactaatatgtttcttattgataggcttaaaactcctgtcactaatgccttgagagatgccaaactgtctgttgataacttgacgaaagtgattcttgttggtggatccactcgtatcctttccgtccaagagcttgtgaagaagatcactggcaaggatcccaatgtcacagtcaaccctgatgaggttgtttctcttggggcagctgtacaggtcactttcttgtcctcacaagtgctttaatttgttgttctttgcagaaaatcatccataaaccttctaattacttcactgatcttaagtgcatgtttcctgcattatagtggatcacaaatcaatttatatgtatttaaaactaactgcccaaagcgtgttttaacactgccaagactgcatttatcttgttccgaatctgaaatctcaaatcaatatattttgtgtttcccttgtaacaccagggtggagttttggccggagatgtgaaagatgtcgttcttcttgatgttactccattgtctcttggtctggagacgttgggtggagtgatgaccaagattattcccagaaacacaacactgcccacctcaaaatcagaggtattctccacagctgcagatggacagacaagtgttgagataaatgttcttcagggagagagagagtttgtccgggacaacaagtctcttggaagcttccgcttggatggaatccctcctgcaccacgtggtgttccacaaattgaagtcaagtttgatattgatgccaatggtattctctctgttgctgctattgataagggtactgggaagaaacaggatatcaccatcaccggcgctagtacactgccaaaggatgaggtatgttcccaccttatttgcttaagcattgtgtgattacattcatcaaaagttggttgccagcttgctatattgcaactaggtacaaagttggcaagtttcttcttaacgtatgatagttttctgcatggttatctagttgtagattttcttttccaccatatgttgtgcagcttctttctttgattcccaatcccgttatttgctactggtgtgaaatt

SEQ ID NO: 15616 - DNA, 2516 bp, Oryza sativa
  unsure (1)..(2516): unsure at all n locations
cggttannaacgttgagcgctccnnnnnnnnnnnnnnnnnnnnnnnnnnnnnnnnnnnnnnntgtggtctaccagactgagaagcaactgaaggagctaggtgacaaggtacctgcacctgtgaaagagaaggtggatgcaaagctcaacgagctcaaagaggccattgcgggtggatcaacacagagcatgaaggatgccatggctgctttaaacgaggaagttatgcagatcggccaggccatgtacaaccagcagcctaatgctggtgctgctggacctactcctggtgccgatgctggaccgacaagctcaggcggtaagggaccgaatgatggagatgttattgatgcggatttcactgacagcaattgatagttctagcgattgaagattattgatggaaggatgatctgtggtggatggctgtgagggtctgatgggtgatggtataggaagaagggagtgaacaaattgttctttttgtttactatggatcccatgttcaataggctctttagtttgcaatttgatagcgtagggttttgccaacattttcctgtgatgttgaatgaaggattataaaaagtagccttcaaaaaaagaggaggcaaaggttttgatcgaagaagtagctgattgatatgaccttgttccttgaaaataaaaatatcattagttccctgtgcattttacctgctagaaactaaaattagcgcgtggaacatattgtccttttttattttgtgtgacttcctgcatttcaaatagaatgagaaaggttggaaatgatatcattttttattatttttacgctgttgggaatttaactatgcagtgacgaccgactgatagaaattgaaaaaaaaaactaaattttatactccctttatttacaagtgatcatcatatatatttttttggggattcctttttcagaaatgattagcatatttggtacctctcccaacatctttttgttctttgatgcactgatcaaatggactgcagatcatttttttcctttttggtgttggtgtaaacatctaatataactgatcaattctaaattgagggagtatgtgactagaaacaaaaaacaaaaatggttggaaatattatttttatgaaaacgatattggtatggtacagaaattttcgcagcgttttcatcgcaactttcaaaaggataactcaagttaatgtcacataagcacatttcgtccagttcgtctgtagaggtgtttttgggtttgatttttcagtagttttgacaagaaaaacaactatgcctgaagatcccggtttaatgaagaatttaattaatgattgcacgattgcgtttatgcagaaataacaaacatggtcacggataccaaacagttaaaaacattggaatgaacgtgaatgatgagaaaacagatacaggaaacgtacaactaatgatctaacaatatattatgctatctaaacttcgtcagttccacagctctgcatcgagtatcagcctttggatccctggtgctgccgaaggaacatagaagacgatactttctccgtttcacaatgtaagtcattttagcatttcccacattcattttaatattaatgaacacagaagacgatactttctccgttaaacaatgtaagtcattctagcatttcccacattcactttgatgttaatgaacacagaagatgatacttcctccgtttcacaatgttaataaatctagatagatatatatgtctacattcattaacatcaaagtgaatgtggaaaatgctagaataacttacattgtgaaacagaggaagtaatttgctaaagcattttgccagaaaacaaaaattaggaagcatctcttaaatattctaatgttccaggtcactacattattacagtgcacagcttagcatatttcaacagtaaatcatgtagtgaaaaacagatgatggaacctccagagagtatccagatcagttctttgcagtgagggcattctgctccttgatccgagctcggttcaccagcttgacgaaccgtttcaggtcttcataggggagcgtcttggcatctttcctccgcagctcactcagcatagggcgcttgtcgagcaggtgccacagccactcagggtattcagaatctggctggagtttcggatcagacccctccttgaggatatttgccccaaacactgttgtactcttaagttctttgctgagcacaggggttttagcagcatcggccgcaccctttccgcccttctttgccttgcttgcaattgcaaatcctcttatgccaactacttgagctgcatctcttgggattacaccatgtttcagtactcttctcaatgccattgccattcctggatggaagcttttaactgcatatatcggtaaatatcagtgctgttgaaaaagtttctgcaagcaaataatatnnnnnnnnnnnnnnnnnnnnnnnnnnnnnnnnnnnnnnnnnnagcacgatgctctcatcccgcgcg

SEQ ID NO: 15617 - DNA, 7208 bp, Oryza sativa
  unsure (1)..(7208): unsure at all n locations
gattactcgctgacggaggcgacgccggcggggaggacgttcaacttcctgagcgcgctgggggacgtggcgttcgcgtacgcggggcacaacgtggtgctggagatccaggcgacgatcccgtcgacggcggagcggccgtccaaggggccgatgtggcgcggcgtcgtgctggcgtacggcgtggtggccgtatgctacctccccgtggcgttcgcgggttactacgtgttcggcaacgccgtcgacgacaacgtgctcatcacgctggagcggcccgcgtggctcatcgccgccgccaacatgttcgtcgtcgtgcacgtcgtcggcagctaccagatctacgccatgccggtgttcgacatgctcgagaccttcctcgtcaagaagctccgcttcaaacccggcatgcctctccgcctcatcgcccgatcactctacgtctgtaagtgtgctagcatgcactaacacacacacacacacacacttgattagtgatccaattaattaattaattaccccctccaaaacgggagaatttaccttttgccatcctctcaaaataccagttctcaaatgccactctcctaaaatttcatttccaaataccacctgggtccacatgtcagcctcttttcccattcaaataaaagtgacgtgggactggatggtgtgtgaggctgatatgtgggcccgggtggcatttggaaatgaaattttgagagagtggcatttgaggactgacattttgagaggatggtaaaaagtaaattatcccctccaaaagtattttctattataatacatagaaatattaataaatatatgattttattgaagtacttttttaaaactaatttacacatacggttttcatatttttaagataaatattttagaaattattaactaatttaattaataattactctctctgtcctcaattataaggcctatattttttttacacggtttttaataacatactttaactagtatcttttccatttcatgatccaaacaaatataaaattagcatcacataaaagtactttaaaatataaatctattttgaaatataaatctattttgaatttactgatataacatgcataaaatttactgatataacatgcataatatttagtatagatatagttagtataattattaataaaactactaagtttgatttttcttaaaaatagagtgtcctataatttaggaccgagcgagtagttgtcaattagtctatcatatgttgttaattaggatctaataaatcttaatttgtactaattttggagtattgaatttcgcagtgttcaccatgttcgttgccatcgcggtccctttctttggtggactgctaggcttctttggtggctttgcgtttgctccaacgacctacttcgtaataatctctaccattaatttctttattattagaaccttcattaaaaatgtatataatttaaaatctctcgtgcgtattaatctccgttttttctaactgaaatatgaacaattgttttttcagttgccatgcattatgtggctgtcgatcatgaagccaaagaggtttggcttgtcctggtgcatcaactgggtaagtagtattatccattaattatttagcatgtgcatggtcaattaactaacttgataattatcctcatctgattgttaattatatatcttgttaattttaattctttatatatttttggtgcctcagttctgcatcatcatcggcgttcttctgtcggtgttcgcaccaatcggaggtctccgctcgatcatcgtgaatgcccagagttacaagttcttctcttgagtgattaattgagagaaaaggtgttttaccgttcaattaagtgtgttcttaattaattaggggattgttttagataatgcacagagttctatttaattaattagatgaaagagaaattcgtgtgtccctatgagacatctgtgtggattgatatagtagtcgatcaaatgaaggcatattatttatttggcctttgtttgtcgatctagtactctagcgttaatttaattcgtgtcgagtttatcccaatttttgatgatgtttgtgctctattatcacgtggtgtggcattcgttttaagggtttatgattggttcaaacttcgtcctagtttttacacgatttgaacttgaaatcaattactttcaattcgactcttgcgcgagtctcactaaaaaaagttatcgagtaagaatatcgagtaagaaaaaaaaggatgttgctgtaccacgggaaagcatggcagatggcgagaaccaggtacatgaacaattaaccaaaacatcataaacatcatatgtacaaatcagcacaaagaaacttcagccacgctacaagcagttcgctgggaggaggtaaagtctcttgtacactcaagtaatatattgcagtaggagcctctccaactgtttttccgtcaaaaaaaaaacctgaggagagccgacgctgaaacaaaatttgacccaacctcacacctctgggaggagagtgccgatgctgaaacagaatttgacaaggtttaagagatcacacgatttcaaactgaggttgacgataattgcgccccattcctttggtagggtactttgccatatcagatatccattgcctcggaggccgatgaagcattcttcttcttgttctttcttttcttgtccttagggtccttcccctgcttggcggaattgctctcctttctcgcagagggtggctgtgttgacaacaggtgctgatggatcgccgcaaacgggtcgagctggaactgcggattggtcagcacagcattcagttgggcagcctcccgttgcctgaaaggagagacaaagccagtcaaaaaccataagtggaaagaaagcanagaacgcaagtggaggggcagatgaggcaattacactaaagcctgcttcgatttgcagtccagttttgcttcggtgtgcagatttgaggcatctgtttcaggaaggaactcagagagcattgagagatcatatgctttcagtttcttctggcggctcctctgtttagatttctgcacaaagaaatttaaataatcacaacccataacactgatagtgcaaagtaaagcaagtgtaacttccagaaaactacaaatggagtagcccagctgcaataaaaagaatcagttgtaaggaaggacagtgtggagagattaaaggccaagaacagaacggagagactaaaggtctcatttcagcatctacaagtatatttactctaaaatatagatgcattaacatatgaaatgaacagaattaatgttcgcagtttgtgtctagaatatatgaaaccacaagattgtaactatatgttgggaaattcatgagtcaagagccaactggtcttggcatttgtttttccatatggagttaggcacgtatgggtttcctaggatcctagtcatcccatcacagtaggagggaatacaggagacagtggatcatcagtgcaagtacaaaaagcatattagggttccaagcaggtcccaagtacaaaatccattctcatatctgtttatggatatggtgtggttattttgctagtcttcacatgtagacaagcatttggatgacaatataatactttcttacgcagataatttttagcataccacaaatacacaggacaagagactaaacatagctagcgattgagaaaatcagacttacaaatatatacttgaccaatacatacaatttggaatttatccttgaaatatctaagcattggttgcgttatacgcccacgccactcatggagcaaaacaataacagtaaaaacaagctgcaacaacagaagctacagaaaatattcaattgcaaccaaaggtgaaaagccatacacccatagaatctgctgaagtctgattcaagctagaggcatgtagatattttttgccagggcatggcttgtttctgtttatactttacagctgtcatgtgaacaagaaacagctggtctagttcacgtatggtggacaccaacacccctagtttggatttgttcagcaggtttattagatgaacgctccataatattttttggttcaattagtgaacaaataaggccataaggaggacaatatgcttaatattattgcatagtgtaattgattccccttagctaggtgttggctgtgttgagaaggattcaaaggttatggtcatcaaggccatgttaaaaacagagaatagctcctgatttctttgctaaactttttgtggcttgtgctagtgatgcattacattataccagggttacaaacatgacaaaaaccagtgagtagtaaccagtgcttggttttcttgcaatagccatacccgctatagtgaactggaacctagacaagcaatttttcgtctcgtgctattagaggaactttttgttcaaataagttttgccagaaagtgcctggttctgctcagtactggatgggttggatgtgcagagcacattccttaagaggtaaattccacctagcaagagactagctgaagagtgcacccacactatttaaaaacccagtcttgcagaaattatttactattagtatccgggaggtcctatttctttcttagctacaacctacaaatgccacacagaggttaattggggaactgtgcacagtaatcagtcatgaagcatagatatttcagttctgagtgtaacctaaaaaatatgggattacgaattgagatctagcatgcaaaactggtgtattaagtcaatagaaacagaaacgacaggacatgatactaggtagttcgaattgtcaaaaatccattttttgggcaagatagtattcaatgtttgtgtacgaggaacacacaaatttgcaatgctgaagagaattaaagaacactataataataaacgagagggtctataagcaccttgcagatagtctttgtagcatttagggaggttactgcatctttcacttctgagaaacaaaaacaaaaataaatcaattatactataaaccacagtaaacaaaaaaacatgctattccgcaaaatatagtcaacgactcaaggtagacaagaaaaaggtaggaaaatgaaacagagtccagctagcagtaagcccaatcataaatcgtaatctatcaatgtttcgactttcgagtgcagtaccacaaactaagctactatctactttacaatatacatgttctgtaaacacaagtaatctacaaaataaaaggtatactaaaaaggctacaactatttatagaaaacaaaagaggttttattatcacaaaacactaaaaacaacaagcatggaacatgaacgaagaagtatttttattcatggataagatatttccaagctttcactattcaagaaaaaaaaaagcattgccccttttacagacatattaattttcttggaataaactaataattagttgtccttctttacaaaaatgaataacaagcatttcagaatagcagtgaagtaaaacataacaagccaataccaccatcctctggtcttttgaatcaatctctatacattaatcaacatttgccttatacactccctccatccaaaatataaggcctatcagtttttttacatgttctccaacattgtattttggaaattaaattatcttacaacatattatcagcaattacaaaggtaccgttgtatacgaaataccacatgcatgacattaaacatatacattgttagttcaattactagccaaagattgcaaatgttgatttttcctggaataagggagtacagccaaaaaataatggaaaggcacacctacttgtgtagaagctgagcttcttctcaagcttctgtttggacttcagttcatgcttcttaggtgacccagtcctgaaagcaggggcggatccaacttgggacatggtggttcagttgaacccccaaactattcggtgaacaaacaaacaaacaaacaaaatgttactagctagttgtattaagagaggtttaaggctctcaaattaataaggaggaggagaagagcttcttccagatctagaagagaagctagtagggttaacgaacgcaagcaaattccaggtcccggtgagagatgaatcggaaagagggctcaccaggatcccctcccctcccctccccttctctgctcgccagatggagatcggcgcgccctgccctgtgtgttggcggcggcgcaaaggagcggaggaggagacaacgagagagagagacggcagatttctcttttcttttacgcgatacgagacgccagggcccaggcacgacccgaggtcagtcgggccggctgtgccgtgcccacgggctgcatccacggcccagtctaggcacaataagactcgggctatgccagccgatccaaaggcacgatagtccatcgtgcttttctacaaaataagtctttttccgtctcttatctctttgggttgtgtcatatatgatggaataagtctatttatgtccttctctttggacagtgccttataaggcagaattaaccccaactatttttctttgaccatgccgtgctgggcagccccaccatgccaaggcattggcccaagcacggcccaattattgggccaagctggcacgagcccgacaataattgtgtcgttccatgcttggaccaggccaaatggtcgggctgtcgggcctcggccttatggccatctatagtctactccaactttatcttaatatttttactattttaaaactagttaatagtatttctttatgatgactggtgacccacatatcatcaaaaattaacaaacacagttagcgattgtgtcgacaacaaatttctcagaccactagcaaccactaactgatactccatgcaccgtcatcaccgctctttctcctgagccaccatcgttcctcctctttgcctttaccgtcatcaccgacatttctttttctcctccactatcgttatgcacactattgttatggttgcattgaggtcggggatgtcgggcgtgaagggactgggaggcaggagttgacctaacaaaaagcgaagacgctatatccgtgctccttcttgctatacctagcagttatcaaacggagggaaaaagaaaatggagagagagagatagtgtgcggagtgattgct

SEQ ID NO: 15618 - DNA, 9507 bp, Oryza sativa
  unsure (1)..(9507): unsure at all n locations
cttctatctttatgatactctaatcttgtttatgtaattcgtcgatttatcatatatctcacataatctctggcaatatcgctatctaatctataattggctaacatctgtcggtagaggtcagccgattagattagatatcgacgttgacttacattatataaggtatccaccactctatgaaacttccaacggcttgattgtctagatattgtccttcttttcatacttatagctgcatcagttgagtttgatcttatgagtcgtgattagaatctcaatctctagcctgcttattggtcgccgattagggtagaatcggggtttcagccgatcttatctgatttaactatatttgtatctcatatgcttgattgacatgctagatctgccctttatgctaagatcttatagcattaaagtatattaggcattttgttcgatatattctgcttgttttaatatcttaatatagagtggtatcggagtattagccgatacatgctagatctatctgatcggctatgctataaatgtctatataatcagtactttaatgtatatttcgacttaagtgatttatactgtctcggcatggcgaccgatctatcctaatcacttagtttaaatatacatcgaatgatcgattatatgtcgttaatatctatagccaattgagtagatttagttttactttatttatacacaactgccgatcgattccaatatgacatcggcatcggctcgaagataaatgatatgccatcggcaactagccgatcggctatcgtatatggatttaaccgtggttttcttgtctttctttcttgttgattacaggatcaaatcaactagcacgctcacgaacctaaaagcaagattttggacctgcactgaagttaagtagatcttctaggccagtgtgtgtttttcacatcaacagttgtgaagtcatcccttctttcttccagctgcgcgcttttcaaactgttaaacggtatggtttttacaaaaaaatatatatatatatacaaaagttgctttagaaaatatattaatctatttttttaaaaaaagataatattaaattaatcatgtgctaatgagttgtttcattttgcgtgctagggagattagctcccaaccccatggaaggaacataggcggttcattttacttttagaactgtagatctaatttaattatcatgaagttacgttggatgataaaatctatattattattattattattattattattattattattattattattattattattattattattattattattattattattattattattattattattattattattattttcatattcttctaatggtttgaaatgcatgcaaaagtcagaaaatatagcccaaactaacgtatttcttttcaacttttaattatagtgaaatttggtcttcaaccgtgaatttggtcataaacaatctaaagacatccatggattaaaaaaacaattatatgatttagatgtcgtagttacttgattttttaacaaataaagtatgaaaataggataaagaattaatggaaaatagaacagggaatcgaaggaagggagggagtaagtacataatgctcggtggggccgggtttaggagatgatttttaaaaaaaaaaattataatagttgtaaataatgggtccaccgaattgaatgaaaatcgacggttattttttaaagtgcaatgtgacggcttagaagcgtttataggatgccacgtgatgacttacgagcgtttgtagaaagtttaatggacttttagtatagatatatgatttttcaataaactacctcttattctaaactgctcatttcaattttattttattttcttattacacaacaaatgcacacgcaaactacatcactacacatagtcacatacttaggcaaatgtgcccctaacacatgcttaaaaagacataaacagaaatcagcagcatatctctgatcttattaaaaagacattagatttgaactctgatgggtaaaatcatgctgaccccccgagaaatccgaagtctgaaaaacagaaattccccaaaagatgaaacggaaagaaggcacgtgaatccatgttgaaaattttacttgcgtatgaaatactgaatggggaaatgcatgaatgggtgacagcaattcgatttctgtgtccacattagacacccagaggaaagcattatttttgtttaatttaaagtacttgacaacgaaattgttaagaaatatatatatatgatctcatccatccgatggaataggcattgcggttgccatgcctcccgttaccacaaccggcagagaagggaataaggctaccatgccccttctctccttcggcacttcttgacaactggcgcgatggttcgcgctcctgtggttctgaccgtatccccttgtataaattgaacgctacaattaatgagaatcaaacctcactcgcactttgtaccgcatgaaatcactccacttcaacagttcagtcaagagcagttcaatttccccgcaaaaaaagagcagttcaattctgcatgaatgtttgatctgttagagttcactttaggatcatctagctttagatctactcgggtagtcctcttgggtgtttgaacaaatatagagatggaaagagagggtttagagaccgaccagtaaaggtggaggaggaggaagtgccggccatcgtcgttgtcgtcgcgtgcttgtcgtggacggtggcgacggtgggcttgacggtgatggcggtcgtggcagcggcggtcgtaggcggcgatgacgaggcatggtgcagcggtgatgcttcccgtcactggctacgccccctcgatcggttagggttttgtgggtggagttggcggcggaaccgaacctcatatcatgtgccgccccggcctccaccctctatttatatggcgcaaggtgacgggggcccaccagtcaatgggctgggcgcccccgatcagggcgcgggtcaaggtccccttgtgtcgttgggctcaaggggagggagatctatctaatattctcccccttgatctcactatttcttttagcttttttctattccatcatagatttgcacatagagcatgtttcatcgtcacggttaatcactgttggatttgacagctactatacacatctctattcagaaacatatactttaacttttgggccctgtagtccaggattcataaggcttctcttaaacccatgccggctacatgttccttgaacacgttgggtggtaggcctttcgtgagcggatccgcgagcatcctttctattctaatgagctcgagactgattgtttgatcccggactttgtccttcacaacatagtactttatgtcaatgtgtttggcagcaccacttgactgattgttgtgagcgtacattactgcgggttcgttatcgcagtataactttagtggtttctcaatactgtcaaccacctttaaaccgggtatgaacttctttagccagttcacctgccccgtggcctcatagcatgctataaactcgacatacatagtagaccctccagtgatagtctgttttgagcttttccatgaaatagctcctcctgcaagggtgaacacgtatcccgatgttgactttgcattatcttttgcaaaatcagaatctgaataccccactatctggagcgattctgatcttctgtaggacaacatgaggccttttgtaccttgcaaataacgcaagactttctttactaatttccagtgctctgggcctggattactttgaaatctgccaagtaacccagtgacaaatgccaagtcagggcgtgtgcacacttgcgcatactgtaggcttcccacagctgacgcatatggctttattttcatttagttgaactcatactaattactgggacattgccatgccccatacttttcgcctttgactataggagtaggtgtagcactgcatctgtacatgttgaatttcttcaacaccttttctatatatgccttttgagaaagtcccaatgcatactttgttctatctcggtgaatctctatgcccaaaacatatgaagcctcaccgaggtctttcatgtcaaagtttgaggacaagaatttctttgtttcctgcagtagactgacatcactactagctagtagaatgatatcactactagccagtagaatgtcatctacatacagaattaggaaaatgaatttcccattcttaaactttgtataaatacaattgtcctcaatattctcttgaaacccaaatttctttattgtcccatcaaacttcaagtaccactgtctcgaagcttactttaatccataaatgcatctctttagacgacaccccatattatcgtttcctttcacgacaaaacctttcagttgtgccatgtatactttttcctccaaatctccatttagaaataccgtttttacatccatctaatgtaattccaaatcataatgtgccaccagtgccattattatcctgaaggaatctttacaagagactggagaaaatgtctcattgtaatcaatcccttctctttgcgtgaagccttttgccacaagtcgcgctttaaacttttcaatattccctctggagtcatatttggttttgtagacccatttacagcctaatgttttggctcctttaggaatctcttctaaatcccagacatcgtttagtttcattgatttcatttcatctttcatgtcttctaaccattcagatgagcgtgcgcttctcatggcctcttcatatgaggtgggatcatcctcaatatgtgactcttctatattataaacttcatagttatcacggatagccaatcttctgactctttcagaccttctaggggcctcctcatttggcacattctgtacctgagactcttgttgagcctcccgttctggcacattatctatttgaggctattgcagctcctcctctggtgtggcaataatttctgttgagtcctgtagaacaggttcctcattttcattcattgttgccacaggaggggtaacaacaggtgctggtaccgcaacgtcatgcattgcaggcacaacatcagcaggtagagagaagaaaggctcctaagtcgacgaagcgggtacagacacccgcctcttctcaagatcaatttctcgaactactgagctccccctaatcattttgtcttccaagaagacggcgtgtatcgtttagacagtagaaacgataaccctttgatctagaataaccaacataatgagattcatttacaaatgtaataatgttctcacctttctttgccatgatcattttcaggaagtcaggataatctttatagtagttccttttcttgcagtggagacactgatccttttcaactgtgaactgttgttgctgaggcagatgctgaggctgttttgcttttgaggagggtgtcttgtagttcttttccttgttatctttaacaaagttaatagagccaccattggactcttttgattcttttctcctcttgcacacaattagcgatgagcttttcaaaattccatttctttggacttattttgtagttgacaacaaagttgtcaaagtgctttggcaatgaggccataaccagatggatcagaaagtaatctaagatgcccaaatccattggcttcaacttggaagccatgttgctcatcctaagaatgtggtctcttacaccacctccatggtacctctctgtcacaagctgctttatcagctgtgtagcataaatctttgaagaaccagtaaactggctctttattattttgaggtactcaaagacggtgtcacactttgggattaagcccaatatagttggctcaattgtgttctttaccgcagccaaacatttcttgttggctaaggaccatttcgcatgctcaatgtcatacgacattatgaggggagcattgtccctctctctcttttgccagtcagcatctgactctttttcacctctgacaagtgcagcaggttctatcggatatggggtggtcaacacccagtccacctttcctaagataaaagcaaggtcgagtttttttttccattctgcgtagttatctcccttcaaggtcggaatatctttaatgcaacccataggagtagccacctgaaataatcatgtacagtgagaacaaaattaacattaaaatgttatgcattaaatctacatcaccgttaggcaaaaatagagataacacataaggccataactataacattgcaattaacaacgttggtcagaaaattacaacatcatagtacagaattaatgttcctaaaattaaattctcccgttggttcgaaatttaaatttagaaacactaatttttatcaatttcatctatttgcagcggaagatctatataaaattcatatgaacagtagcaaattatgttatttacactatgtaaaaattacacctttggttcaaaatttaaacagaggtaaggcatgcaaaatcgattaaaaaatctattgaaatttgcatgaaaatagacaaaataaaaagaaagtcgctaccgttccttttcttcattttggcccatcaaagaagtcggcccatcgccgggcgtgtgcgggcgcccccctccccccaggccgcaacctgggcctgggcctgaaagccgccgncgcgcgcctcccatcttgggctcaatttggcctggctgacgccggccatccaatcgctagggtttcgatcggatggccaggcggagagatcgggcggtaaaataaacccgacccccagccgccggccaaaaaccctagcctctcttttctctctcgcgcacgaccgcgcgacgcgaaggtcgccgccgccggcgaccttcgcgtcgccgcgccttgcaccgccggcgtccgggcagcgcctcgccccgccgccatcttttctctttcccctcaccatctctagccctccacccctctaccgagtgaagtgagagagagagacggccgaacgagatggcagcgccaccgggggccccctcgccggcacgtgcgtgcacccgctggtgcgcgcacggccgtcgaggggctccttgacgacgccctgtgccctcccccattccccctttgccggcgttgacgatggccagcgacgaagtaaggatttagggttaggttttttggtttcttttatttctttttctttggatttctttccccgaaccgatctaatcgctagggtttggctctgataccatcgttagagttcactttaggatcatcgagcttttgatctagtcgggtagtcctcttgggtgtttgaacaaatatagagatggaaagagagggtttaaagactgatgggtagagatggaggaggaggaagtgccggccatcgtcgttgtcatcgctcgcttgtcgtggacggcggcaacagtgggcttgacagcgatggtggtcgtggcagcggcggtcgtaggtgcgacgacgaggcgtggcgcggcggtaatgcttcccgtcactggctgcgccccctcgatcggttagggttttgtgggtggagttggcggcggcagcgaacctcgtatcatgtgccgtcccggcctccaccctctatttatatggcgcagggtgacgggggcccaccagccaatgggctgggcgcccccgatcaggacgcgggtcaaggtccccttgtgccgttgggctcaagaggagggagatctatctaacatgatctggctttctccaagacccaagccaaaaaccgattcaggctctttttccaagtcaaaccacataatctagttctgcttttatattcttttagcgtgcgttctacacatagcatcacaaattttatctaacatacatagtagtatagtactacttaaatagtcggagactcgcattagtaataataaatctctgaacttgctaaacttttatgaaaagcccaactactgatcacatgccagtaatattcataggcataacagtttttttttaattatgcataggaaggagaggaagaagaaaatagctagtactaattaagacgatgcagccgatagagaatcattgtgtataaaactagaaaaccgtagtgtttggtaacctactacgcgttcttctcatcccaccgatcgatcgcgcgagcttgctatgccgcaacatgcaccgtccgatcgaagtgtttcctgcatgcttcactgcgatccggccgtccacgagcacaatcaagcttgattaatttctgctggtttgtttgcggcaatgaggctgacgacgcgttaatcattttgggtgacgttaccagctgacgtatgtgatcttcatcttgtgttccaagtttcaaaagcttcgctcgatcttgagcttttgatatatcgtggctctcaattagctcttgctgactggcagctctaaatcaacgagcacaagcttgttggctatagctcttatcctcttggcctcttggcgagcaaaatatatctaatcttagccgtttagtgataaaatcctttcaaaagtagtagatgtaaatcctcaatcaagaaaaagtaacgaaaattaacccaaaatcaaggcaaatcgatcgatttgtaggcaacgcaaaaacagatactccgctctaagtagtaggagaatcttctagtatagggcgtggagctagcatggaacaattcgaagaaattaatcaagaaaccggaaactaaccaattatgtaattaacaacaaaatccatcacaagaagagcaaaaaaaaaagctgcagaagcagcaaaagtaattcatataattggttgaggaattattagagaatactactcacatattgttgagtacccagctgcgcacggcgtgcctcgcctgatatgatccagcaaacgatccgccgccgccgccatcggaagcgagaacgacgacagagcaagaggtcgagctagcgtgcaaatggccgcagtgttgctggcacgcggcaatagtcgaggcggcggagtcaacctactaggtaggtagtgtggtctcaactctctctagggcagacgatagctgtggttgcagagctggtggtcgtggtgggcgagatagatgactaatttgcagctagccgcgcgtgtgggccgccgcgcgaccaccccgcgttttccatttcggcccaggtgacgccggaccgtgcgcctccactttccgtcttgggttttcttatttcagcccagctcgcgcgatcagttcagcccatctgtctaaattttgtatacatatggatataaactttgaatntataagtatacaaactttgcatatgtctttacattttttatacatcaaaagtatgcgtatacataaaatacactcacacacacatatacacgtatgatatgtgcatctgcttcctccgcacgccaccaccttaaattgctccctgtacagtgtcaccaccgctacttcctttgcacaagcaccg

SEQ ID NO: 15619 - DNA, 818 bp, Oryza sativa
  unsure (1)..(818): unsure at all n locations
cgctgtccnnattgttgacactctgnnnnnnnnnnnnnnnnnnnnnnnnnnnnnnnnnnnnnnntggaacaaataatttatatacttgttttaataatctctactcgctccatccgcaaatataagagattttaagtggatgtgacactcatagtacaatgaatctggacatattttatgtccatattcattgtacaggaatagaaaatctgtctagattcattgtattatgatatgtaacatacatctaaaatcctttataatatgaaacggacgagttaataacctgaaaaaaattaagcctaaagctagctttgtcgcattggttcaataatcgtatctccacggtcactctctccgatgttttgggcagttcagaacatataatcaaattagttgagatggttttgtgtttgtgcttattaaagggcaaaaagtgaataaacttgttttgcagggataaacgagaaatttctccaggtcctgatatagatgtaacctcgcccgacatggcctggcccaggcacgggctaggcacagcccgaggcgattgggccagcacagcacggccggcacttcaggccgtgccgtgacagcccacgggctgcacctcaggcccaagcacggcccaccagtagttgggccgtgctgtgccgacccgaaggaacgggcggcccatcgtgccttatttaaaataaatttatttccccttcctcatctatgggctgtgacacatatatatagnnnnnnnnnnnnnnnnnnnnnnnnnnnnnnnnnnnnnnnnnnnnnnnnnnnnnnnnnnnnagtgtcatcatacc

SEQ ID NO: 15620 - DNA, 1095 bp, Oryza sativa
  unsure (1)..(1095): unsure at all n locations
ccgctcccatttgatgacttgcctgcctcnnnnnnnnnnnnnnnnnnnnnnnnnnnnnnnnnnctagaagatatgcttcgcgcatgtgtcctagattttgggaagacatgggataagagtctcccctatgccgagttctcctacaataactgctaccaagccagcatacagatggcaccgtacgaagcgttgtatggccgcaaatgccggacaccactattgtgggaccaagttagggaaagccaagtgttcgggaccgatatcttgagagaagctgaagcgaaggtcagaatcattcgggagaatctaaaggtggcctagtctcggtagaagagttatgcagacaaccgacgccgtgacctggaattcgcagtggatgattttgtgtaccttcgggtcacgccattgcgaggtgtacacaggtttcagacgaaagggaagctcgcacctcggtttgtgggtcctttccgtatcattgctcgacgcggggaagtcgcttaccagttggagctgcccgcctccttgggcaacgtgcatgatgtgttccatgtgtcgcaactcaagaaatgccttcgagtgccgtccgagcaggccgacttagagcaaattgaagctcgcgaagacttgacctacgtggagaggccagtgaaaattctggacaccatggagcgcaggaccaggaactgggtaatccgtttttgcaaggtccaatggagcaaccacgccgaggaagaagctacttgggagcgtgaagacgagctgaaggcagtccatcccgatctcttcgccagttcttcggaatctcggggtcgagattccgtttaaggggggtaggtttgtcgcgtcccaaaacgactctaaaatatatccattaaatgatgcctagaataatagaaatccgtgtgaaagcctccaacaattaaaatgtgcaaagttaaaagtcaaacaaggcttagaggatttttatatatttcctaaaagcctaaaatgcgtaaataaattttagtggaattttcagagcacaaataatannnnnnnnnnnnnnnnnnnnnnnnnnnnnnnnnnnnnnnnnaagcaggtgtcatcatgggggtg

SEQ ID NO: 15621 - DNA, 740 bp, Oryza sativa
  unsure (1)..(740): unsure at all n locations
gcgtcccntttgattgttatgcnnnnnnnnnnnnnnnnnnnnnnnnnnnnnnnnnnnnnnnnnnnnncacgtagcggacaccatgtgagctgcatattcccttcaagaacttatcaatcaaggtattctcgtagttttatgttttttgacttgtacatattccgcaagttgctgcttaggtttcactaatagataacctctcatcatgtgaaggtggcgttgggaatgaccatcccaacggacccttcagggacttaccattgcaggccgattccagcaggatactcgagggtcaaagttgagctggtggaagccgcgtacgaggtcctcgagttggactaccctggaggagacggtgagacgcatctacgagacacaagccacgccattatactatggcgcaagcggtacatcttcctccctgggcgacaatcggtgtctcgtgcaccatctcttccggctccgccatctcctctgcaccacctcctgcaccatctcctccagttcctccaccacctcctcctgcaccatctcctccggctcctccgccttctccacctccaccgtgtctgcctgcacctcccaagacaaggtctcgccaagctccaccgcttgcccgcacaagggcaacgaagaaggcgaaagttgacgccaccaaaaacaaggagccgccgtacgattgcagtcaagaggagcttgacgcttaagtggcaggagaagtgaagagctactcaagcctg

SEQ ID NO: 15622 - DNA, 1280 bp, Oryza sativa
  unsure (1)..(1280): unsure at all n locations
tgtcaagttcttcttcaactcgaactggaacacgacagacaacctcaattataagatacaaacgggcttggtctaccatgtcaatattggtgggcatcatcatcaccggcttatcttcgccgctgccgactggtgtctccgcctacacggctggcctattatgccaccattgttgggcgtctacgacttcaccgttgtctcgctttcgctgccgccgactggtgtctccgcctacacggctggcctattatgccactgttgttgggcgtctacgacttcacctccggcctgcctctgtcgccgccgactggtgtcctcgcctatacagttagtgggtcacaccaccgttcatgggcgtccacgtcttcaccaaccggctagacatcgccgccgccgactggtgtttccgcctgcacggccggccaattatgccgccattgtcgggtgtctacaccttcaccgccggccgccatcatcaccgtcgattggtttcttcgtcttcacggccagtgtactccaccgccgttgcttatggcaaccatgtcttcactactggctgcagtcatcgccgccgaccggtgtttttattgccattgatggacgattttgttcccacatcagccacctctgccatcaccaagggaaagattacaaagctaagtcatcattaattttctttatatgatattttccttttcctctgcctcactacatcaactggttcgccgttgactagtgagtcgggggctacagatgttatatcatattttttaataattttcataatattcatcttgattgcttgcgacatgatctgagtacaaaagcgcctatcgagttatggagttccatcttcctatgctttccgtttggtttgccaatggatagttgcctttgggccgattcctagcacccgggggctcgttggatggactgaataacgcaaggtgctaagtattaatcagaagaaatcaaaagcatagagataatataatttttttctgctcttaacaattgcaaaagtacccgagtagtaaactctgatccgtgaaactttgttccattaatgacgaactcatatcactcatatgcatgtttgggaagtgcttaggccgactcccggtgcttggtggctatgactagtcgggcagagtgtttaaacgtaatgagtcatctgctcggagaaatcaaaattgacaagagaagannnnnnnnnnnnnnnnnnnnnnnnnnnnnnnnnnnnnnnnnnnnnnnnnnatcaacntntcaaannntcgcac

SEQ ID NO: 15623 - DNA, 5350 bp, Oryza sativa
  unsure (1)..(5350): unsure at all n locations
ccatgtcttcaccgaccggccgcctagtccgccgccgactggtgttttcgcctgcacggttggcctattatgccgccattgttgggcgtctacatcttcaccgaccggccgcctcgtccgccgacgactagtgtttccgcctgcacggctagcttattatgccaccgttgttgggcgtctacgtcttcaccgaccggccgcctcatccgccgccgactggtgtttccgcctgcacggctggcctatcatgtcaccgttgttgggcgtctacgccttcgccgaccggccgcctcgtccgccgccgactggtgtttccacctgcacggctggcctattatgccgccgttgttgggtgtctacgtcttcatcgaccggccgccttatccgccaccgactggtgtcacagcttgcacggctggcctattatgccgccgttgtttggcgtctacgtcttcaccgccggctcaccttcgccaccgtcgactggtgtctccgcctgcacggctggtttattatgtcgcggttgtagggcgtctacatcttctccgaccggccacctcgtatgacgccaactggtgctatcgtcttcacggctggccacgtcgccgccaccgcaattaggcgtcatcaccttcaacgcaagctgtctacatctgctgccgactggtttcttcacttccatggctgcatgattctgctagtgttgattggccttatcgtcttcaccgccggtcgtctcgtctactactgactagtgccgtcgcctctacggctggtttatactgctaccactactgatggacgtcattgttttcattgctggccgccttgtctgacgccgactggcttggtcacctccatggctgcacgttttcgtcatcattctacttcttccatcgccgactggttatgccgccgttgactggtgttttatcttcacaactattcatcttcgcaacgggtttgcttctgttgccgccgactcgtgttcacttcatcacggctatgcaactttgtcaccatggtggagcaacctcatttttattatcttcggcattggcaaactctattgcctctacttcgcaagctttgctacttcgccaaccacgacatctacaggagcctcgacatcttggcatgcgtcaacaagtataatgccatgttattttactacaacaagtggtgttccaatattcaagatttctactcggacatcttctatgcgtatattcactcaagcaatgactactcgacgacaagaagctacagttctcgactctatgttcagttgtttcccaactaaccaaagagtcggggactacacaaatacaaggctcaaaatttgacaattcgacaagctttatgtcaagatgaagcaattaattaatcagccaacgattcaactttgggagtcattagcttcgtcttcgcttcagagcaggtgttctacttcagcaactccgattatttcaccgacaattttggcttctccacgttgctacaatctactccaaatttctcaagtatcaagtttgagatttaatctacatattcgggagtttagagctatcaaccaagcaactcagtttcgatgagttggacaacagcattactttcctccaagtgaagcatctgcaacagctataacaccaagttctattgtcatctttataaatcaaggagcgttgcatcaatcttcgtcatacacatgctcacatcaagggaactactcgagttttgatgtcttctcaacaatttgatggattattgtcactgacatcatcaccagcacctcttcttcatcggccctgacgtcttcgccgttgctaatggatggctacgttttcacctccggcagcttctatcattgacgactagttatttcgccttcatggttgacctactacgcaaatgctgatgagtgtcttcgtcattattattggctgctacaccgctattgactgggtcaccgacatcgtcatcatcatcaacatcctgtcaagcttatttaacatagccaaccctactgctattgaaggacaagctatatgctcaggggcttactagctcaaacacaagtatcataccttcaatttggacttgttccggatacatgcaacatgaattcatgatcatgggtctattttctatgctcaaagactagactatttattattccccataagggttatcaaccgaatacttgcgccagtcgggattcaattattatatatatattggagtatctcataagggataatcactcagatcagaagctattcatatgagttacatttggtctatataacccggaagatttattactcgagagcatgttacatgcgtcatcctttaaagggtgtcgaaggcatattttttggcctaggcctaatatgtctgcagcccatattttcaagtgtggcctgtcacgttcttttagggacttaggcactttttgcttaggccaaagtgtgcgtgatctagtgcccaataccttaaaatccttttataccgcagttactcaactttttaggagttggtacaatgcatcttaaaaggtgtcaaacagtaaagctttatatagctgccccgctgacttttttatatagtcatggcgctgtttgggtttataaagcaattgattggatacaacatcaatgctttttgccacgtaagtgtgcatttttattgaccaatattatggcttaggctgattatatattttggtcattttccagacgattgataaatccttatgagtttatttactcggattttataccacatatgccatatatttccaggtgtggtgaaaccatgtgtcttttagggactcaagcacatctgttaaagcagtgtgcgcatggtgtatgcccaatactttggaaatttatttattcacaacatacaagcttctttatagctgttttgctatgtgtattcaatgatgtagtcagctttaggttgcacgcatcatattttacaaagcagtcggtatatcactcggatcatgttattcagggattcacgccacatatgctatatattaatattaagtcacttggttgactacaattatcaaaaccactcagttggtgcatctattaggtacatctattcgatgcacctgactttatttttcagccctccacaatcttcatatttggtaaaagtattcgggagatcatggcgaagatgattgaagcactcagctttggagtaatctagttcgagagaagattatctttccgactgtgaaggtctcaggggctactgtggagattatgggtaccccatacccacacggcatggttatccgactagttataggggatagcttatatctatggaatatgtaaccgatcatgacttgggtattacgtttccttttatattatggagcggcctaaagtcctgatttgataatattgtaaaatagatttaggaaaccgataccgtattagttaaggtttctatcttgtaatcctgccccccatcctatataaggtggcaggaggccctctagggagcatgagacaaactgattgtcagatcaatatacacccggcggattcaaatccctaaacaggagtagggtattacctctcattgagagggcctgaacctgtctaaatcctttgtctccgcatccatccacttttaggtctcgtgcgctacccccttttcatattgccgaaaatttgtttcgacacaatgtctcagcaaggcgaaccaatgtcgacgacaactagtgggtcctcaagggcacgtactcctaggacagggaacaaaattcctaaggaacggttccgcataacagcggtggacgccgtagggttgctgacatctccaaggaaaatattgagccgatttaggtctatctgcggggtcatagggaggcagaaattcagtattctgcaagacgacttcaagctcgtgccggccgcagagaagaacattgcttggctaacgttcaaggagagctttgattatcctacggagcataaggaccgtctcaggcgggctgctttcaaggttatgggcactgcttggaagaacttcaagactaagctagtcgacgagttcgtctacaacccggcaaatccaaatccaagagagaaatttccttggatcacggaacaggtctgggaggaattccatgcaaagaagtcgacccccgagtccagagctagaagcgaggcatatcgcttgctccagaccaggaaccagcatccgcaccggcttggtaccgccggatatgccggtaaggaagaggaatggtagcgtgaggatgaagaagcggaggaattgtgcacaccgctcgtgtttggcgatatcccacaccctcgggctaggaactgggccagggctaggtaccagaaaaatgatgatggcacaatcttcatgccaaatgcagaagatcaacgagtatacgaagctatagtaagtgtctagtcaaactagatgttcgcattgtttcccatcgtgcagtttatttgaccccactaaattgtaatgcagaaggagttggttgccgagcaacaagcctcacaagaggcctgctctcaaagacgcaaagacgacctcctcacgaaagcgttgggcaacaaggaacaccgtggacggacacggggcgttgggtcttctgttccctggaagtatggatttccagactacgtgtggcagtacaagaagcggacttccaacaaggcggagaaagatgcacgccttgaagccaagatccgggagtcgatacgagctgagctgacatctgaattcgatgaaaagctcgagtcgatgagggccaagattaggcaagagatccgagaagagcaacagatcccccaggccgccgctgctgctgcgcacaaagacttaggaagtcccaccgaaaaacgtagcagttgcgcatcaactgagttggcggaaaatccaacatcggtcgacagcgccgtggaccacataacggtaaccgtgaacttactcaatacatgaaagacgtaacgaatccatatgatatataatattctaaaaaaattgattaatctatcgcaggaaccaacgagctgcaccctcacagttagggtgatgccgaccttcactgttccagcagccgagggacttgcgtaaaagccgacccagagacaagagtgcatggagcgcaactcagggccgactgtgcaaaagttcaagtcgactcagtgaagcccgaatacgagctgttccttctgaagtatccaccgaacgacgaggtcctctcactaggaaatgcccgtggtaccttcatccaatggcccaaannnnnnnnnnnnnnnnnnnnnnnnnnnnnnnnnnnnnnnnnnnnctcctg

SEQ ID NO: 15624 - DNA, 771 bp, Oryza sativa
  unsure (1)..(771): unsure at all n locations
acatgttccggtgctcaataaccgcgagcacggctattcgaatagatttggtttactcacactgcagtggatgtacactttacccgcactccgcgactgcccaacacatgagcctcgtcccaacacatgagacgcgtcacggcaaagcttttcgataacctcgcattggcagtacccgctccatgaacttaaatcctcatgcactctaggcgtccatgtttctagcagtgagaggagttctagcgctcccgggaaagagaagtctcacacacatattaaattatggttcaagttaagttctctctctcacacactcatggcagtcctaccaatggcgacaccgatgtagggcacgcctctcggccctacctcaacggctgtcccaccgtagcgcacctgcctcactcaggggtgaaccatctatgcagggatactgcctccgttcggctatctaatccgctaggtctatacccatacgagaagtgcggttgtacgggggtcgtttcatgtttaacttcatggctcggtccttaattgaccggggacggtactagcctttcccagataccacccaaatcctccgtccgccccagtcgaaaacaattgtttaattttatttctcctttcacaaatcatgtcatcaacatcatgacaatgtggcgctcatgtctccacatgccgcatttgataaatatgagtannnnnnnnnnnnnnnnnnnnnnnnnnnnnnnnnnnnnnnnnnnnnggatatcagnttcaaggnttaactct

SEQ ID NO: 15625 - DNA, 724 bp, Oryza sativa
  unsure (1)..(724): unsure at all n locations
agggatgtagncctgattngcccactgananccagctnnnnnnnnnnnnnnnnnnnnnnnnnnnnnnnnnnnnnnnnnnagtggtcacgaacacaaactcagtcgatgcaccggaatatatttggtgtccatgccatgattgcaagaaagacagacaacttccagctaagcgggtccatttacatctccttacaaggggttttatggacaacttccttggcgaggaggagcaaggtgagggaagtgccggcaactgtcacgggcatgatgcagatgtcggctacgaggaggaggaggaccaaacatgtgtcgatcacggtgaacctaatctagatcagatgctgcgacacggggagagatttgacactgatgataaggaatatcacaagttcacaaccatggtgaaggactccaaaactccaatttacaatggatgtaagacggagcacagcaagctccaagtggtcctatcgctgcttcacctgaaggcgagcaatggatggtccgataagagcttcactgagttgctagagctcttgaaagaaattcttgctatggacaatgtcttgccagaatcgacctaccaagccaaaaaagttatatgtctccttgggcttgacatacagaaaattgacgctggactaaatgactgcattctgtgtcgtggagaatatgcatatttggagcaatgctcggtatgcagggcttccgctataaagtggga

SEQ ID NO: 15626 - DNA, 4113 bp, Oryza sativa
  unsure (1)..(4113): unsure at all n locations
agggaagtngnattganagccnnattgtannncattgtataccgcgctnnnnnnnnnnnnnnnnnnnnnnnnnnnnnnnnnnnnnnnnnnatggaaatttggataaatttgagacacgctctaccgatggaatgtttcttggttaccccgcacattcacgtggctatcgtgtacttgttttagagactaacaaaattgttgagacttgcgaaattacatttgatgagcctagtccaggtactagaccagaaattgcagttacattatcacaggtttagggggaggatggtcgtatttttgaagacgagagcgacgacgacgacgaagaccgggcgccaggctggttagaccgctggcacgcctccagtcagaccagcataggatgtgcggtcagaacggccaaggttgtcgggttctaattctgttgatgctgatcgggatggacctccagaggctacaacttcgaccagtgaaggtacagaatgtgaaacaacttcagaagacgctgcccctatgcatattcaatgatgacatccgctgaaacaaattattggtaatctaggtgagcggactacgaggtctaaggtaatgactcatgatgtttgtgcaaattctgtatttgtttattcttttgaacccaaagatgttactcatgccttaactgatgattcgtggattaatgtcatgcatgaagaacttgaaaattttgaaagaaacaaagtttggactttaattgaaccaagtgagtttttaaaaataaacaaaatgagtatggtttaattgtgagaaataaagctagacatgttgctcaaggttttactcaggtgaagggttggatttttatgaaacttttgctcgtattgctagaattttggcaattagacttttgttagctgttgctgcttcaaaaggttttaaattgtatcaaatggatgtgaaaagtgcttttttaaatggtttatacaagagaaagtttatgtcaaacaaccaccaggttttgaaaattctgattttcccagccatgtttttaaattgtctaaagctttgtatggcttgaaacaagcacctagagcatggtatgataggcttaaaaactttttgcttgcgaaaggttttcgaatgggaaagattgacaaattactttttgttcttaaagatggtgataatcaactgttcgtttagatttatgtggatgatatttactttggttgttcaactcacgcttgggttgcagagtttactgagactatgcacagggaatttgagatgagcatgatgggtgagttatcgtaccttttggattgcaaattaagcaaacacctcaagttatatttgtgcatcaaacgaagtatacaaaggatcttttgagatggttcaagatggagaattgcaagccaatttcaacactaattggttctataactgtgttggattctgatgaagatggtcaagctgttgatcagaaggagtatagaagcatgattggatctttattgtatctaactgcttctaggccaaacatacaatttgttgtgcgtttgtgtgcacgtttttaagcttctcctcgtgcttcacatcgtcaagcggtcaagcgaataacgaggtatttgaatcatacacttgagtttagaatttggtattctacttcatcttctatatgtttgagtggatgaaatgcgataagctaataaaactattaggtttatttggaaaaataaaatattctaaatataccttctcacccccgaaggggtacctccgatatagcgtcacgtcggtcactatcgcaggataggatccctttggaatccatccagtgggctcttcccgctagcgacaggaaaagtggtccacaaccagtgccttcttgtcttttgttgctcaagtctttaaccttttcttgccagggaatgtccctaacatcgagttcgaagtcagagttttccgttatccccaggggctgattttctagataggttcctatggcacttcttttgactgctacattaagggcaaagcaactacctctcgtaatttcaattactaaggcagtagagatctgtttaagcgagttctatgatggttgtccaactctagaccttacgacaaagaaagagctagaaaccatgttttctattccgatgctgattttgctggttgtagaattgataggaaaagtactagtggaacatatcaattttttgatacatcattgattgcatggtcttgtaggaaacaatctagtatagctcaatcaactactgaatcagaatatgttgctgctgctagttcttgttctcagattcgttgtctaatatcaatttcgaaagattatggtcttacttttgagaatgtacctcttttttatgataatactagtgctattaacattgctaagaatcctgtacaacactcacgtacaaagcacattgatattcgctttgactttttgagggatcatgttgagaaggaagatgttgaattgacatttttggatacaaagttacaacttgctgatattttcaccaaaccattggattcttcttgctttgcctttcttcgtgtttattattcaatctatgtgcttgtaaagatgttgcattataaatcatatgaaatctgaattttgattgttgatttgaacttaattgtaacatctatggttcatgattatactttagtgcatgcttgctatgttatggatgggttcatcttcttcttattgcaacacataacttgatgtgctatatgtatgctaagctcttgaatattaatgaacataattcctatgcttgctgaaatcattatcaaaagggggagaagagatacaagtgcatgtttttcaggtcaagggggaatttctttctttttaaagggagagaagttttttttttgaatttttgagcactccttgctttttaccacttttgtttttatttttccaaacaccaaaacattttatttatgggtttgccaacgtgttcatcaagggggagattgtaaaatcaaagtgtgtttgattcttattctgtgatgaacaattggcatatgagattattggtttgatatttggagtttattggtgaagtggtttttggagatgaataggtactgctggagatttggtcctgtcagaccgggcagtgggtgccggtcagaccggtgtgctcaggttatttcgttggatatccctggataatttgtgtttatgactttaagatggatactatgcgtatgtaatactattgtttgctaatatggtttcttgtttgattcatgtgaaggtaatcttgacacctcgggagagtgttgctggtgatggatcgggagtcaactttgagatatggtaacgtccggatggtcagatatcatgcgggacactcacactaaagatgaatgcatgtggttggtgaagattccatatgacatacggtggagatattgtgtgagtatgagatgcggtgtagaatttggaaggagtccaaatttggtacaattgaaatttgtaaagttggtttcttgtacgggaaggtttcctagtgggattaggacttcttatacgaattttgtccgaggctttaagctgcctacctcatgtatcaatagagagggagggtgtgcatcccggtatcgctttagagagcattgagttgagataatagttagggttttgagtttagtcaagattttcgtgaggagtgttgttgatgcactttgtaaacacatagagaagtaataaagttgtaatttagtttgagagttcgtcgatttgtatttgctcgggttcggcggtccaaccggcggaacaccagcagtcagactggtggcaacgcaccggtcagtccagtggatacacggcggtcagaccagcgatgatgacaggaggcagaggcgacttcacggcggttaaaccgggcgatctacaccggttagagcggcggcgcatggtcagaccagcggatctacttcggtcagaccaatccacatcggatccaagggtaacttttaattccgataaaagttttggttttggggtactacaaccattcacccccttctagttgnnnnnnnnnnnnnnnnnnnnnnnnnnnnnnnnnnnnnnnccgatatcac

SEQ ID NO: 15627 - DNA, 3071 bp, Oryza sativa
aattaatccatcaattttaatcaccactaaccagcacacccatgctgtcaaggcccaaccatcctgaacacccataccgggctgtacagatctatctccaaaccaggaatataccattccaaaccaggagctaaacaaattatttccatttatagcatcttttattacggtgagaagtgtgaaactaatcacgaaagacattgttagacccacccataaccgcggacacggctattcgaatagttttactctggccagaggtgtaccactgtatccacaagacacagccccacaacatgtcaccatgtgcctcaataccaccacggtacctcggaaaggagatgtgacagtacccctcgcacaacacaatccaccacagtgcaccgttcctggatcataatcacccccttataaacaaggcatggactccccagcgacccccgtgggcttatctccgccacttctcagtctggtgctccgcaatgaaccatactatacaaaaggtaaagccgttgcccacgctggcttgtggttggcacggttaatgtttcacaaccgaaactcgtgaaccggtccttaattgtcatgagcacgactctcaaaaccatgtgctcacaacccaccattatcaagttttagttggcaagtaattaattaaccaatcatgattggccatcgtgagctatcattaagccatcattaaataatagtgagtcataagttatcccaatagtgtgctaatgtttctaagcatggctaagcaatcatatctaatatctagctgaaccaatatatatagcccgactagtccagttataataacccaaggtatcaaggaataaagtaatcaagaacaaaagggctataacaaacaataggttaattccacccaatgacattcgaaaataaatgcaatagttgaatggaaacaatagctttaaatgggatcaacatgctcaaagggttatttgggatctgtgtaacttgccttgctggccttggaactcttcaaattcttctcctgcgaaaacgaactctccgaaaacgtcggaatctaaacagaaaggagcaaaacaccaaaacagcacataaacaagcatgaacagtacatgtggatatttttaacatgtatatctcaattttagaaaaattttgagacttgaaccaactaaatccgagctgtgatgaattagttatgaatttttaaagattaaatcagattaaaacacttatatgggtattaattgaattatgacgcaataatgaattatttttgaaaaggaaaagggaattattgcgtcagcggctagggttcgcggtgaaccgggtgcacggcggcggctcacggaaacgaacggccgagatcgatcctatccaaaatggacggccaagatcgatcggatccaccgtggctcacggatggacgacgacgatgacgtcagcggtgacgtcaccaccggcggcggctcgagcgtgcagctcgccggcgaacgacggcgcgacggcacgaacggagggcaccagcacgtagagggcgacgcggcgaactcaccggtgaccaaaacaacggcggaagatccacggacggcgacgacgtcgaggaagagcggcggcgacgatcggcttgacgacgacggcggtgtttcggcggtcgacagcgacggcgaaggggcggacgatgacggcgacgcgacggcgaccacgatggcgacctccccgagcaacggcgacgactggagcgacggcggcacacggctggagcggcggcgacgacggcggtgagaggtctcacggggctagggcgctacggacgacgagaaacgaaggcaagggtggcgacgggttgcggcgggcttgggggtccttatataggggttggaaggtggcggcgaaggtaagtctagggttcggaggagagagatcgatccgaatcgaactcgaatccacggatttccaaacgaaattagccgacgattccataagagaaaagatagaggggatcccggggatcatttcccctctattaatttcatcggaaacggaaaggggcggcgcggctcggctagggttcggccgggcgacgacgcgaggaagacgacggccctgacaggtgggccccacctgtcagcggcgaacgcacgcgcgggcggactgggccgactgggccgaggaagagagagagagggttttgggccgacttttggcccaaagccaaaagagaacttttaaaaccttttccaatttaaattattcatgaaatgcaattccatttattaaaaatacttccttagctcaaataaatcccagaaaaatctaggaattatagaattaagcaaagtttttaatgaaattttatctggccccattttatattggaattttttaattaaaattagatattctcttcttggcttttaaaataaattctaataattctaattaaacaacaatttatatatttaggatttttagggtgtgacaaacctacccccttaaacagaatctcgtcctcgagattcggaagaactggcgaacagatgcggatagctgacttcaattccccttctcgttcccaagttgattcttcttccgagagattactccattggactttgcaaaaatggataactcgattcctgggtcttctctcatctatttccaagatacggattgggttctcaacataggttaaatcctcttggacttctatctattcaagaatagcttcttcggtaggtacccttaaacactttttcaattgcgacacatggaacacattatggactcctgccaaagattgaggtaactccaactgataagcaacctctcctcttctactgacaatcttataaggtcccacaaaacgcggtgccaattttcctttggtgtgaaaacgatgaactcctcgaagaggcgtgacacgaaggtacacatgatctccttcttcaaaacttagatctctacgacgattgtcggcataactcttatgacgagactgggccacacgcaatctttcttgaatgattttcaccttttcttctgcttccctcaggatatccatcccgaaaacc

SEQ ID NO: 15628 - DNA, 1239 bp, Oryza sativa
ctgtctgcagatgataagcagtactaaagttcagcttagaacccatctctacttgaagtttcttccaaaactttaagtaaactgactgcctcgatcagacactattttcttagggacgccatgcaaacacacaatccttgccatatacaattccgccaaccgtcttccggaatatgttgtctttactggaatgaaatgagccactttggtaagtctgtcgactattacccaaatagggtcatggcctgatgacgttctgggtagaccagtgatgaaatccataccgatttcctcccacttccattcaggaatcttcaaaggctgcagcaaacctgcgggtttctgatgttctgccttgactcgctgacaaacatcacatactgctacgtattctgcgatttcacgcttcatacttgcccaccaaaatctttccttgagatcctggtacatcttggtactaccagggtgaatggagtataaagtatcatgagcttctctcagaattgcatcttttaaatctttgttgtcggggacgcagattctctcgcccaaccatacagttccttgctcatcttccaagaaaccgatagcttttcctcttctcatattcttcttgatttcttgaatatcaggatcattaatttgggcttctctaacctgatcgattagagtgggctttgcttctaaggctgcaacgaaacctctactgacaattcccaaatttaatctttcaaattccttgcataactccaatggcagtcgtccttccgtagcattgcaatagcctttcctgctaagagcatctgctacaacattagcctttcccgggtgataatgaattcccatatcataatccttaattaattccaaccatctccgttgtctcatgttcagatctggctgagtaaagatatactttaaactcttgtgatcggtgtacacctctgtacgagtaccgaaaagatagtgacgccaaattttcaacgcatgaaccactgcagttaactcaagatcatgagtagggtagttcttctcatgcggacgtaactgacgagatgcataggcaaccaccttcccatcttgcatcagaacacaacctaacccaattttggatgcatcgcaatacacttggaaactcttctttggatcaggtaaaatcaaaataggagctaatattaagcgattcttcaactcttgaaaactctgctcatattcttctgaccacttgtactttacgtc

SEQ ID NO: 15629 - DNA, 724 bp, Oryza sativa
  unsure (1)..(724): unsure at all n locations
agggaagtnagttttgangccnnattgannnncactgatatcnnnnnnnnnnnnnnnnnnnnnnnnnnnnnnnnnnnnnnnnnnnnnnnagattgaatgtatggccaacaaacaaaaagtctcactgacatagaaatcgaagttgagagctaaaaaaaataaagaagcagaagaaatcacctgcgcggaaatctcctcggcggcgaactgcttgccgatggcggggcagtcgagcttgacgttgccgttgtcgtcgcggacgacgtggtaggagacctgcttggcctcgtcgtcgacctcggccatcttgcggccgatgaagcgcttgacggagaagaaggtgttctccgggttgacgacggcctgccgcttggcgatctgcccgaccagccgctccccgcccttggtgtacgccaccacggagggcgtcgtccgctggccctcggcgttggtgatgaccgtcggcttcccgccctccatcgccgccaccgcggagttggtcgtcccgaggtcgatccccaccaccttctcgcacgccacccgcatngncaccccccgcgcccggcccgcccgcggnacccgcatctgcaccgacgccgccgcgggcttccgccccacgaacagctgcccgctcctccgggccgcgaggggcgaggtggagggggcggcgccccacgccatggcgccgagctgggaggtgaaggaggccatggcgaggccagga

SEQ ID NO: 15630 - DNA, 2428 bp, Oryza sativa
tcgggaaggaacgtgtaacgccggttggggggtgggttttcgtgaccgtctgactatgactggattgtgtgagtctatttgttgccttgtttttaattttgcacgaaatttgggggtgacaaaggtgctttttgaatggatttcgtgtgaatttggtggaatgggggtgatcggtttggtttgtgggaggttaattggttcgtgcaagtcaaataaaaaaaagaataaataaaaggaatatccctacactttacaggttatatatgatgatctgatatgtcttctattggaagaagtcgatgccgcgttcaagcgtctaggtgcttcttaattctcatttgttcaatttatatgtgacgtgtgagttcaatataaattcctggcaccaagatagctctagaggtgggtctaggaaataaaaacagtgtacatcacctggtagcagttttatatttaatactagcaacttgcagtagttaccatgcttaccaaaaataaagatttttgttttctcacttgtagtaattgtagcaaaagtggaggaatgcaagtagataatttcactacccacatgaaaatcccctttaattcatttctcacatggtggtgttgttgatgggctataccgcagacgagatttttacactatatataaggatcgttggaaccaggtatacgcaagatcgggtcaagtagacaaggatgaagatttatactggttcgagctctcaagtagagtaataaccctactatagtttatatggatttatagatggatttatagatgggatgacacaaagattacaatggagaatgggataattagactaatccgccgaccaaaagttgtcgagaatgatacaacgagatctattcagcaaatatggctctggcttcctctagaattcttctcaatgtgtctttggctatttataacttgatgcccctttctaaacacgggagccttgtatatatagcgtagatcatctttctctccaagtagaactcaaagtgataaaatagtgataaaataggatacgagcccaaggagatcttaccttctccgattaaaactcgaacaccttctattctgagaagataatttcattccttatccatcgtatttccttaatcaattggcactttctggtatacaatcgggtatacggtattgtcatatttcataaatccgtgtataagaggtatgtcttatcctcaacgctaacaagtataaattttaaaaggaaaaaaatgaaggaaaattttacacataaattttataaatacaatatttaatttatatatacaaactttgcttcaaaaatcatattaatcttttttcttcaaatttataatagctaatatttaattaatcacatcctaattcattgtcaagttttacgtatggaccaaaagctcacgtgaacttagataccgaaaagaaaaattgatacaaaaagaaaaaagaaacaacatacaccccaaaatatagtggaccaaaaataacaattctatcaaaattcacacacacaaacttgaccaaaaaaaagatgtactagcgtgatcgcgggcacggctaatcgctgattagtgttttctttacatggatgcccggattcccccaaacctctctattgagtagaccaaggatatcatgacctgacaaatgaccgtaggtatgttatagcgatggaacgagggaggccaactgttgacgcgaaaaatcaacacgcagcggcctgggaaatctgcttagctctagtgcagttccaaaagaattgccttcgggttctaattgccttcgggttctgagcgtgcctgatggtttgatcctgcaaccaacaagatagaaaacaacaaatagttaaacccatcgacgatagccaatcggcaagattgccgatgacatatcgtccgaggccatgccaatgtaacttgagttagatcggcaagggcagataaaaacttggagattgttcggtgtacccgatcggctgtagatgttagcgatacataatccgtccgataggacatgcttggatcgagtgattaggatagatcggtggccacaccgagacagtataaatcactctgtatccaaatgtgcccaaaagtagggattatgcatgctaacagcatagccgatagagcaaacctaacatgtatcggctagtactccgataccaccctataccaagataccaacgtggatgaaatatatgaagctaaggccaaactagaaagcatgatggactagcttaatatacttcaaaaggatgggatcttgatataaggggcggatttagacaatctagagccaaatgaggaagtaaaacaactaaatcaggtaagatcggctgaaactccgatactatctctattagcagtcaaagaaaagattagataaaacatttcaggacagtgctta

SEQ ID NO: 15631 - DNA, 3177 bp, Oryza sativa
  unsure (1)..(3177): unsure at all n locations
agatcgaccttacccgatgtagcattaagcgtgaagagaaatgaagtttctaataaanccgatgagagcttgttcgagatggtagatataccacataatctagcttaatatcaaagcctaagcctatcggccgctttcgatgatagaggttagctgatgaagctcagatgatgagatcgatctatatcatgcgatatatatgataactcagcgacttgcgtcgacaagattagagtgttatgaagatgtaagcactaatcccgagaacgcaagccgccatgacaagatttacctcttcgtcgaagatcgaacctgatgcagcccaactcgaaagcaaaaaagtcatcaaaaataagggtaaaaagggtggcgatgcgccgaagtgtattgaactgtcgtcccttgattacatggggtcgggccatatttatacccgaagtacatgacaggtccttgctggacacgactcttatctctaacataattcaaaatacaaatgagtccttcaggtggaccattaccaaactatctttaaggaaaactagaaaatgtcctaattaatagatacaattgcccttttcaggactcctatccttgtgtggcaataacgatggaggtcttcatccaacccgacgacggttatggggccacctttcttgagattggtggcgccggctttgactttgtttgatccggtgtttagccgatatgtggtagccgataccactgtagccaatttgtgtggtagccgatgctgttcatagccgacgtgtactcagatttcccgaacgggctttttccgaatcggcttggtctccaattttgaatccaacccatggtactaccaaatttggtcgtcaacaccaacgcctcaatcgcctcgacggtcgaggcatgttggcaattagacgaacaaaaagaaagaagtgcgctggggaagagcacaccgatggggaagaaggattagaatatagcaggaagatttagattaatttctcttgttgatccgaaccatcctgattacagcttttataagacttagactaacaaactcatttaacaactttgtctctaaaaatatgaatagaaaacgaaaccctaatcagctacgactttgcgcacctgaacttcctcccatgcgaccattcttcggtgtccaattccttcacagcgtttgtgaaacaaaattccccacatgacacaggaggaggaggcacacatgcgctcgaggctcctgatcctgccgacgtcgtgtcacgcccagaaatttagccctaaatttccagactattttgtgtattaaatctctgtccaggaccagctagggtacacaaaatgacaagtaatatacagttcaaaacgtaaataaagcataaaatacttacagaaaaggcacttagtcctcacatcgaaaagaaagcagcagcagcggaaaaaggcgatcttagcggggctttagctccactccacaggcaaaacttaactggggtctgagccttggtcctataacttcgtcttcagctcagaagctctacacttctgaaaagggggaacaatagcaaggctgagtataaccaccatactcagcaaactacacaaacgatgcagacgtgcaaggggatacaaggatgtcttgtggctatttgcataaaggcggttgtaaaacattttattgagcaaaacagtaaaaactattgagtgattaatgtaacattaaatctccactgatcaacactacaccacgttgaacaggcccaaccaacccacctgaactacaatgcattgggtcaatttattaagggtgagactaatcatggtgaatctggtcgatcgcccataaccgcggacacggctattcgaatagttttactttggccagaggtgcacaactgtacccacaagacacaatccaccggcatgttaccgcgtcatcatgcgcccatgatgaacacgtcactatatcgagtgattgtaacaagacccttcatataaccccctctgaccaatcacaccacacctcaggtttcacccccactcctcgcaaggcagtgggcagtcccctctcgtgccatggtgaatccggaagccgatcaaccgaacacctcggctgactcaactccatcacgcccacccttgcctaggaacgtcagccagaggaaagctatacttcaagtcaggtagttacccattcccgcttgtggcaagcattatatgtcttccagtacattccgcgaaccggtccttaattgccatgggtgtgatcagcaaaaccatgcacccacagcccaccaataagtcacattttagttggttaattatggctaatgaatatggccgaatgtctcgagcacgcagctcgttctgatactaacaaggtctaatactacaattatcccatcaactgagctagtggtaattaagcatggctaagcatatagttctagctaggtcacataagtaacatgagctagtcgatttattacccaatgttgacaaatgacatatatcaagtaaacatagcacaagcgagcagataggtaaaccctattcccatgtaattagcaaaacatgcatatttatttgcaaacgataaaacatttataaattaggatcaacatgctcaaggggaatgtgtgacttgccttgcttcttcacttggatcttctgaactcttatcctcgtgaccgcgaacttccgaaacgacggattctacacgctgacacgcaaaacgaggaaaaactctaataaaaccaagcaaacaatacataaaaagtaaacaaacatgtagagctcaattttagatgaattttgcaagttgaatggctcaattcggagttcatatgaattagatatgaattgtagaagttttgagccattttaatgaatttctagaattattatttatttatttcacaattattatttaattgctcaaagggaaagggccgctgctgacgtcatcaaagggcggtgccgacgggcgggccccacgagttagtggcgcaagaggagcggcccacagtggactcggtccaccgcggcatatgcgcgggcgcaccacgtggacggccatgtggcagccaaggcggcaaggcaaggcgaggtggcgccgacatggcggagccacgggcagtcacggcgaacgccacgtagacggcccggatcaccccaaagggg

SEQ ID NO: 15632 - DNA, 2908 bp, Oryza sativa
  unsure (1)..(2908): unsure at all n locations
cgcgtcccnntttgaagtacatgcnnnnnnnnnnnnnnnnnnnnnnnnnnnnnnnnnnnnnnnnnnnnncctgaggaagagattggatgggttagggaggaaaacaggcgaccgaagcggcgggaaaacaatgccggcgatggaactcggggcggaagcggaactcaccagaatgcgaggtggttgggattccggcgggtcttcggcgaagaggagtggacgccgaggagcggtggagcgcggtggtgctgagggtggcggcagcacgaccgggcgaggcctgtctcgccggcggggagtggccggaggcggtggaaagggcaacggctcggcttgcatggtgggatggtagttgtggtggcgatttgagggagaggagcagctgccggggtggagctaggcacggagatgccgacgacggcagtggcgcggtttggcagcgacgggagcggcggcaagaggcggaaaaagcggcggcggctcgggctgcgtgtggacacggcgtcacggtggtggttcggggaaataaagtggatgccggggtgctatgtggtgcggcgaagctaacggcggtggcggattggcgcggtggagactagcggcggtggcgaccggctggagctcgatggcaagcggcggcgcacggctcgacgtggggagagcgggagggggggcgaggagctcgggaaggagggggaaacggaagaggaggactcgagagcatttttatagcgcgagggagcaacggggaggccggggagtggcgaatttggggcggcagcagccggcgacgtggagctcaacgtgggtgaagtggggacttgatttggcgccaaaaattggggaaaagtaggggatttggtggaggagatggaggggaaccgatttcgctcggtttgggcgtgagggcgcgagtgggagggcgcttgattcggcggcgacgtgggcagcaaaagggcggcatggcggtggtttcggctcagggagccagaggtaggaggaggccctgacaggtggggcctcgggtccacctgtcggcgaggggaggagagaggaggctgggcaggggggcttaagcggacttagtgggagaagggagccgaactgggctggtccaagagaaggaagggggcgggaaggagaaggggaaggcttgggccgagcccaagagggaggagagagatttttaattggttttctttttatttaattgattaattgaactttgtgactttaaaattacttcttgagctccgaaaattcgcgaaaaaatccggaatccggagagtattttagggcacaaagaatattacaaaatattcttggccaatgatttttaaaggaaacttttaattctcccattatttcacttgattaaattgatttaacttttatttaatttctagaaaatgtattattaaatgatttttaatcctgaacgaaaatcggggtgttacacgtcgtaccttctcctctccttgcccatgagcaggtcaatgatgcagttcatgtcgagcgcccgcacgtcccgcgctgcgttgcagcacgggtcgtacacatcgttgtgcggcggtaggacgcggtgcccgtggtccagcttcacccaccgccagcacgcacgcaggatgttcaccttctgggcgtgggtgcttttcctgatccttggactaggaggggatcttttggtgtcggctgcaccccagcttcagtgctcgcctgttgcgtgcgcaacaggttaggaggaagaggaggagaactgcgcaacaggttagggggaagaggggagaactcctgctgctgatgctgctgtgactctcccggatgccattgttgtagcagaatagtagcgcggtagcactacaaggagagatcaggtctgcgggactccaggatttgttacccttttaaagcgagatcagagattagcaccctacatgtgatggctagtctaattaaatgttggatatggatgcacaaaatctttccattcattaattaagtctagtaagagatagatatatacattttaagttaattaattaattaattaaagttcaggttaaccagcaagctagatgttgttggtatttctaaacgacatcactagaaatataattcctagtaatggcgcataaatactactggtatattatggttacaaagttcatccgcaagcgcataaatataccattgtagcatttcacccgagagtattctaagggtatcgtatttgtttaatcccgtgggaagattataatagagagaaccgtactaataatttatatattacttgtaataaccagagtctacccaggggttaatataattcagtgggtagagtgacactaagcagaagcatttatactctcattcataattatctaagctaagcagaaagaatatagaaagatctattcctatatctctagtatatatacatattatacatacaccctagttatatcataacttaaccaataccctctttctgatgctctcctggtacttcgagaagccacccctgattgccgagttccttacgacaatccgtcatgaccattcaaccggggctaaatacggaggagtaccctccccaagaaattaacttaggactatatacacgcgcggaggaatacctgtactgagctgtcaccatcagtgtgttgatgaaaaacatgaggcctgggagatctgcttaactctagtgcaggtccaaaactcgccttcggatatgttagcgtgccagttgatttgatcatgcaatcaacaagaaataaagacaaagaaaccgtggttaaatctataaacgatagccgatcggctaggtgccgatgacatatcatttatctttgcgccgatgtcatatatgtatcgatcgacagtcataaataaataagaaggaactaaa

SEQ ID NO: 15633 - DNA, 6867 bp, Oryza sativa
  unsure (1)..(6867): unsure at all n locations
tttttttttgagaattacacagtacaacgcagacactcacaacgcacacgcactcatccctatgaacacacgtatgcaaaccctacccttatgagcatctttgaagactgggccggcaaattctggagagattgacgaagtcaccacaggcgccttggtgtcgacgggtacgtcgcctaccactgaaagcacaacgcccgtaaatcctgaaaaattcgctcccatgggaaatcgaactcaggacctcaggtgctactgaggctcttgttaccactaggctacaggccctttcacctatcaatcacttcttgagaactagataatataaataacactcacactaatataggtatgtatcctatgcacactattagcttaattaataaatactaacaatttttttaaaaaatatatatttactttcaataatattacagcaacgtagtctcattttcgaaataactcatacatgcctctactcgttgcactgaaaattactgtttttatggaaatttacgtgactatacttgataacgagtacgaaactgctaaatgactgtcgacagttttcttgagtgaaaactgtcaaatttttaggccgtcgattccgttttaagatttgtactgagatattttgctaccggatctaaaccctcttttcacaagctagccacatcatcacatgtttatggtaaatttgttcatgttatatctaaattgcattccagttatatgctagttatattatagttacactataattacattgtaattatattgtaactgtagtgtaactacactataactacattgttatctctatataaattaaatataaagttacatatattattttaataaatatatgtaccagttattattattatagtatagttctagtgaaattatatactatagttagatttgaaagtttttctctcaaaaaacactcgacagttttttagctagtccaacgagtaagtgaaaaatcaggcgacgagtgaaaacacaaaattattatatttttctgtgtgtatgtgcaagaagagcagatcgttagccctagagggcgctgggccctagctaggcccaccatattcgttggagatgttgcctgttcctgctggtgtgaccaacgattaatttaatttctgtcggttctatatatagttatcgacaaacatatctagggacctgaatgggttggtgtgttgagacctagctatgaccccgactcacggccaacctgagttgatcctgagagctagctgtgacggcgactcgaggccaactatatgagtggtaatgtactaatgtttggactggctggctctagtatgtaaagggacatacgagccggcggcctgtcattctcgtagcaagttttttattttttgaaaattacacagtataacacaatatagacactcagaacacacgtatactcatctttatgaacgtacgcacgcaaatcctatcctatgagtattttcgaagactaggccaataaatccctagagattcgtagcaagattctaatcaaagcatcagcatcagcattgtcctgtagccataatagtatgatacccccacccaaaaaaaatgttttagcttttaaaatttatccaaaaaacttgttccttactttagagtttttttttatcatatcaattagttgccttcaatttaaaattatctttatcgtacactcattggcaatcccactatctactacagatcatttaataaatgacactatagttttttttaaaccttaacttttgttaaataatttaggtcgaaaactattttaattttaagatggtgattaaattttggatactcgcagcacgcttttaaaactgctaaacggtgtgtctcgtgcgaaaactttatatatgaaagttgctctaaaatattagactaatccatttttcaagtttataataattaaaactcaattaatcacacgttattaatacctcgttttacgtgaaacacttaatctttatctttatctttattttcaggagattcaatcaccagttgaggagtattggattgagtcattgagagtacgtacctgactcccatcgttttgtccaataacttcaatcccatgcggcttaatgtcgtcaatacttggtgagcgggagccgatcgatccgtgcatgcctctactccttgcaaacggagtttgcaatatatagtacgattgaactctttgattgatcattttctcttataaagtgatgtgtgttttgacagttacggatgtgcgatgccttcaaactgggcgttaggtggtgttttgacagtctctgattgatcagtccatatttaatatttttaattagtgtccaaatatccgatgggagataggaatcaaaatttagtcactggatccaaatagaccctaaacgtggggttgacatgtggctgagagtgggagtatagataggggccagaatagcgataaatttaaataaaggtcaaatagtcctatagaattacacttattttgagataattgtagttattttgggatgaatttaggctgtgttcagtttcacgttaaaattggaagtttgaagaaattggaacgatgtgacggaaaagttggaagtttgtatgtagaaaagttcgatgtgacgaaaacgttaaaagtttaaagaaaaaagttgaaatctaaacaaggccttagtagatattaagaatggtactattggctcccctaacatataaaaatattactacaccaatgattccatcgtcccaggtgatacaactagatatgtatacatttgttcacactttctccacttcaataaataaataaataaataaataaataaataaataaataaataaatatatatatatatatatatatattttttttctacgttctttagcatatattgaggttgaaaagaagagatttgatacactcatttaaaaaaaattaaaaatgattgtcatccgactctgtatcggttcgcagtgcacacatggtagttgtccgactcagtccgcgagaagacgatgggctcgtgattgattcagaacgttgtaggtgtaatgcgagattggcagctccctattttgtgatgtctcgatgaatacaaagccatcttctcatcctacataacacagttctcagcctattttgggctggcctcctacgttcagatttgtttgagtttgattcaagaattttccacacatccaaatgcaaaacgcatcgaattttaaacacgcggatctcatgtatatgcaccactggtggagaaaccgtttgtagtcccggttcgtaaccccctttagtcccggttgtccaaccgggactacgaatccgggactaaagatagcggtctttagtcccgggtgaaataactgggactaaagatcagtcagccacgtggccggctgatccatctttagtcctggttggtaccattttttttatttgcatggccctgtttgctgcatggttgattatatacatatatacatatatatatatatatatacatatatatatatatatatatgtgtatgtattctatatatatgcataatatatatattacaatgcatatatatatatatatatatattacaattttaatataagattagtagcgatttaatatgagattagtagagatttaatataagattagtagcgatttaatataagattgttatacttagcatacatatatgattattacaattttaatatgagattagtagcgatttaatataagattgttagacttagcatatatgattattacaattttaatataagattattagagattaaatataagattgttagagatttaatataagattgttacacttagcatatatggctaggatgagttggaaactatgtcatgtcttccgtccgtatgccgtggtggtatgtggcacgtggttacacgtgaggaagacatgtcttgtgggtaaagatgtacacctctgatcagagtataatctattcgaatagccgcgccctcggttatgggcaagccaagcaatgtacccaagttagtgttttaattcttaaaacctgcttaacaactaaaatgtggaatggatggcctgggttggcttgggacgagctgggacccagggtcgggttgccagtttggtctgaatcatcgtaggccttgggttaaggcaggctcgtgtgggttcacggccttgattaataatattatatagctctagaatcgtgtttacaaaatagctttgagcaactaagtgtctttaatgctgtttactgcaaaccctaaccctttatattataacccccttgtactcccttgcatttattctgcacttgtgggtgtgtcttgttgagtatggtggttgtactcagtcttgctcaatttttcccaaactcagaagaggagttcctggaagatgaaggctttggtgtctagctcgtgcctgccgtcaagcgcctgtggtcgtcgccctagtcttccgctgtttcccgtttgtctttgtgtgtgctgggccttcgccgcccatgtaataaattaactatttacgcttccgcttgataaactctgaaatgtatcaacttttggtgtaccttgcctcctgggacaaggaataatacacgcacgtaaggaacgccggttgggttaatttcggtcgtgacaagttggtatcagagcccccttaaccctaggacgagccgtagatcccaagccttagcaatattttcaaaataaaaatcctttcttatttgtgaaaaccctctagtccctctctgtcctgctgcttcatttatcgtcaaaattcgacctttaaaatgttgcttttctcttttgttttagtttgtagatggccggcagcatcaaccgtcgtggtctggacctgactggcttcgttttggagctgcggggcatgtgcgttgtcctggggtatccgcatggagtggactaccagggcaagcagctcccggagtaggagggtgacgatgcagagccccacgctgcttgggaggtcactgcagtgatcctcactggctcacccgagaggacttcattggcagtcaccgcgggtggagattctttctccgccgcttgccagaacgccgctctcctcgccatctgcactcttcaccagcgctacccggacgagttgcagcactcgccctaccgctaccaccctcgccgcggaggagcccgtgactacgccaccttccgggatgctagctcggagtatgacgctaccatcatgcacctggcgcgcatggtggaggcgtacgacgcggctcgtatcgacttccatcagatggtgcgtcgcgggttggtcgagaacaacatgaagatcttggagctgcgtcaggagaatctgcagctgaagaaggacctggacacagtggaggcgcagctgtgtcagctcaagatcgcccagggagaggtctgtcgccgcaagcgccgccgcgtctgccgcagcctgaagatcaccgcccgcaagagtacctctaggcccgagcttgttcgtcagtccctggcgtggacctgcttcgtcgagaccccttgtgccgagcccgcgcccgtggttcctcaggaggagggagcctccggtgttggcagcacggaggatgcgctgctgttcaccttccgccctggcccgtcgcagcagtagacgagcagttagtaggcttgcgcgtgtgttcttctcgtttgtttttctactagagtcgtgtggggcatggttatgccggtgtgtggtataactgtgtcggagcctgtctttattttatttgcttaagcaacttgaaccttaatgaaccaatttaatagcagtaataaattcaagaattatggtagtcgtgggtggttagttttaatagtcagctctctctatttgccggtcctgtgtgggattttcagatggtgacaaccaggagaagtgctgctaccggtgaaggcagtcaccccgaaggcagcaatcacaacaaccatggcaggccacctccacctcctcccctgcctccaccaccaccaccagacaccaactccatcctcacccaaatcctcgcccagcaggccaacatgatggccgctttccttcatcacatccaaaatccgccacaacataatgctccacctccaccaccacccccacaacactctaaactcgccgagttcctccgcatccgtccgcctaccttctctagctccaataaccccgtggatgcgttggattggttgcatgccgtggggaaaaagttagacaccgtgcggtgcaacaatgaggagaaagtcatcttcgccgcccaccaactgcaggggcccgcgtctctatggtgggaccattttcaggctacgcagccagaaggacagcctattacttgggcccgcttcaccgccgctttccggaggacccatgtgcctgccggagtcatggcccttaagagaagggaattccgagagttgaagcaaggcaaccgctctgtgatggagtatttgcatgagtttaataacctggcccgatacgccccggaggatgttcgtgaagatgaggaaaagcaggagaagttcttggcaggaatggaccctgagctgtccgtgcgtctggtctccggggactatccggatttccaacgtctggtggacaagagcatccgcttggaagccaagcacaaggaactagagtcgcacaagcgtcgcttggcgaatttccgcaatcaacagggggctaaccaaagggtccgctacaccaatccctatccagnnnnnnnnnnnnnnnnnnnnnnnnnnnnnnnnnnnnnnnnnnnnnnnnnnnnnnnnnaagaggttntacaagnnntcaaanggnnntcaatgcccg

SEQ ID NO: 15634 - DNA, 1167 bp, Oryza sativa
  unsure (1)..(1167): unsure at all n locations
tcgggggtcgggtaaaccacgtaactgcgaaggatgtgctgacgactcaagacgtcatcgttggtacgttcctcattcattctatccctgctaccattttgttcgactctggagcttcccactcctttatatctgtgccattcgtggggagatatcagttgggggtagaaaggcttaggaaccctctgctcatcaccacccctggaggggttatgacagcaaagtattatagccctgccgttcttatagaaatctagggaattccttttctctcggatctgattcttctggacaccaagaacttggatgtgatccttgggatgaattggttggctcaattccaaggagtagtggattgcgcaaggcgcactatcactctgtattgggggccggaacaaccggttgttttctttgcacccccaacctctgtcggcagttcagaacttcatcagataggactgtcagaaatctccatcgtcagagagttcggagatgtgtttccggaagaactacccggtatgccgcccaagcgagagattgagttccggatagatcttgctccaggaaccacttctctgtacaagcgaccctactgtatggcagcaaatgaactggccgaagtcaagaaacagttagaagagttaaaagaaaaggggtacatacggccgagcacttccccctggggtactcctgtgatttttgtggagaagaaagacaagacaaagaggatgtacgttgactatagagccctcaatgaagttaccctcaaaaacaagtaccctcttccccggatcgatgatctgttcgatcagcttaaaggtgccactgtatcctccaagattgatcttcgttccggatatcaccaattacgtattcgtgaagaagatatccctaagaccgcattcaccacgtgatacggactgtatgaattcacggtgatgtcgttcggtttaaccaatgctcctgccttcttcatgaacttaatgaacaaagtgttcatggaatacttggataagtttgttgtggttttcattgatgacattctgatgtactcacaatcaggggaagaccatcagcannnnnnnnnnnnnnnnnnnnnnnnnnnnnnnnnnnnnnnnnnnnnnnnnnnnnngctataggttctcaaaagggtatcaaaaggcctct

SEQ ID NO: 15635 - DNA, 727 bp, Oryza sativa
aaaccaagaggtcgagccgttggtgaccagcgaagaatttggcataacggaattcatttcggaccccggtctaactgtggatcagttgattggaggcgcaccaatcccgatggcggaagtggcatacaagtttgaactccgtaaaccgcttgtcacgcctgagcagctgcagtccctaccgacatagatgtacaaattccatgaatggttcatggaaatgagcgccaagggtaaagagatgttcagagcgaggatcagaaaccccgacttcttgcaaggagaagaagttctgtgcatccatttcaagaatgtcttcgaactatatcatctagacgccctcgacgtctctcttctgagcgcatggattttgtaagtatctttgagttcgatttgtttcgttcaataattagttccttgcatagatgtaaacaataataaattcctttcatcattgtagaatggagattcaaagggcccgacggtaggggctttacgatactgggttcatcgaccctcagaaaatcaacaccgaaatgatcgacaagtacgagaaagacatagaggacaatctcgtccatctcctgacgcagcagcatttcaagacgttcatactactgtcgaacaacacatagtgagtttttattgtcgttcgaacaaatttcattcccatacatataacatgtacattttcatatatatctcatctcacgcatattccagattccac

SEQ ID NO: 15636 - DNA, 897 bp, Oryza sativa
  unsure (1)..(897): unsure at all n locations
aatcaagccattccatagtgtccaggtgatgagaatatccaaaagtctagagttgtaaaaccacctaatgttgcctaattaaccagcgaagcatctacctaaaatcatactagtggtaccatgagtagagtgtccactagttggggttttgtttattctagggtgaacaaggaaataataccaataccaataataaggtcataacaaaggtaaataggcatggctaaataaaacagtgataacgcgggaatttaaataaagcgataatgcaataatttaaatcaaaataattttataaactgggattcaatatgttcaaggatgatgtgacttgccttgctcgctttcccaaacgtcggcttcaacctccacgaagagcggatcttccgaagctgcagcgtctacacgaccaacggaaaagaaaaggcttttactctaataaactccatataacagcaagaacaatgcacaaaaatgggttcttgacttcttaaggaaaaattagagacttgaacggtccaattccgagttcaaatggccaagttatggccatttgaagtttatatgctctttaaatgaatatttgcgaatttcttcatttaaattttaatttaaaaagggtttattgcgtcagccgaggggaggggcgcgcggcccgggtccacgggagtggggcccacgcgccagcctcacggtccacagtggaccgggcgcaccggggctcgcaccggccggtgccgtgggccccacgcgtcagccgcacccgagggcgcgggcggctgacggccgggccccacgcggcagccactcggcgcgcccgaggannnnnnnnnnnnnnnnnnnnnnnnnnnnnnnnnnnnnnnnnnnnnnnnnnnnnnagctaagtagtctcatccg

SEQ ID NO: 15637 - DNA, 1282 bp, Oryza sativa
  unsure (1)..(1282): unsure at all n locations
ccgcgcccatttataaatttgannnnnnnnnnnnnnnnnnnnnnnnnnnnnnnnnnnnnnnnnnnnnnnnnnnctaaagacgtgccgtagggggagccatctcctatgacccatgtaaaccatttttcttgatttcttcagccacctactgcgtgtatgttccatacagtcagagcatgccttctttcctttcacggtttgtccagaaagattacccagcgcgggataatcattaatggtgcagaataatagaactcgtagtgtgaaattctcctgaccatatgcatcccaagtttccacactctctttccacagaatctcaaggtcatcgataacaggctccaagaacacatcgatgtcattgccgggttgtctcggaccttggattaacaagcacaacataatatattttcttttaaagcataaccatggcgggaggttatagttcgcaatgagaactggccaagtgctgtgagtactactcatgtctccgaaaggattcatgccatccgtacaaaaacatatcctcatgtttctggggtcggcagcaaagtctttgtgttttcgatcgatattcctccattcaatcgaatccgctgggtgtctaagcataccatcattccttctctccgtggcgtgccaacgtactaactttgcttcattggggttggcaaatattctcttgaaacgatcaatgattggtagataccacacaaccttcgccggaccaccccgctttaacttctttccctcgcctgcgctcttctttcgcttgtatcgagaagccttgcagacaggacaagcatctaagtccgcgtattgcttgtggtacaatatgcaatatgtcgtctcgggcaatgtgttctcctaagtaaggaagcatgtccttcagtattcccaaaagttctgtaaaactcgtctgaccatccactactagccttcaacttcattaggtctaatgttgctgataatttggtgtgctttggcttgcatcctgcgtatagaggagtctccgagtcactgaccaacctgctgaacttcatggaatctctctcattcatagctgggtcatcaacgtcacgtaacatgtcttgcagcatatcacgggccacaataaccatttcaccgcccaatggagatgggacaacattgtatggctctttttatatccctttttaagactggttggacacattccgcttgagttgcaccattagtccccagaacttgtgtttcatgcattaaccaacatggggatttcttcatgaatccccgcggttta

SEQ ID NO: 15638 - DNA, 1815 bp, Oryza sativa
  unsure (1)..(1815): unsure at all n locations
acggcattgtagactgactaaccgcatagcacnnnnnnnnnnnnnnnnnnnnnnnnnnnnnnnnnnnnnnnnnnnnnnnnnnnnttaaggattttgaaacaagcaaaaaatttaacataattataattagatcattaattgattaatttattgattaactaattgctgaaatattctttgtagtattaacattaggaattgagctctgaaaaatctgagaaaatttaagagagcataattaatcatggagaatttaataaaaattaaatccagccatgcgttatatttaggaaattttatttcccatatttatcttcacttgtaaattaatgaacatttaatataatttctattattaatttattaaataatttataaatcttgaaacgaaaattcaggctgtgacaggtgccctctgaattgctccaaatttttgacaatcctgacaccccttgctcatctcccatcggctgctcggccagctgtatgcaccatattgataggaaaatgattgccatcaactttcatcggcctcttagaatcatcaaacttgatttttcctccctcaatagccgcttggatctgctgcctgaagaccttgcaatcattggtagtatgagacccggaattatgccacttgcaatactttttcttgcccaattcttcagccgatggaattgtatgaccagtagaaggttgaatctgcttctctcggagtagcaagtcaaaaatcttgtcggccttggtaatatcaaagtcatacctctcctcttttccagaattctttacccattggcatggtataaccattttgcttctcacccattcagctgctgctatttcagaatcatcatcatcatcattatccgatccatatatgtaaggacagatatggttaacctttctagagttcttcctggcctctgtaaacctctgttcatgcaaggttaccttctgtgtaagatgcgacaagctatcaaagtcttcagacgagaatttctccctgattggagtaatcataccttgaaaagccaaatcggctaactgggcatcagtcaaactcaagctgtagcacttattcctcatctctcaatctctgaatatactcatgcacaggctcatcatgtctttgcttgattgctgttaaatcagacaatttcatctcatgtaccccactgtagaaatagctgtgaaaatgcttctcctaatcagcccaactgttagatccacaagctcgctactcaagtgaagaaactccacaaggagaacatagagcttagggatcgtaatgcggagctaggggtagaacttgctgagcttaggaataattttgatacacttagtcgcggtttgtgcactaagatcaagcgtgcattcatagagatgggaaaggaaaatatgtattatgctaattagatgtttcctttcccatgaataatatagtagtaggtgcttgcttttattttttccaatcatgtaagcacttgctataaataatgtggctcattggtattaaccccaatgtttgccaaagtttgttttttttgttctatgtttaataaagttcaggttttgaataagtgtgggggagatatcccagcttctgacgtgcatatgctctgaaaattgttgaaatatctgatcacctggaagcactaaactctgcagaaaattgcagaggtattgggcaccagagtggttcggccgaaccaagtctggcccaacacctcccagttttcacaggtaagcaggtgagcacgtcttgtannnnnnnnnnnnnnnnnnnnnnnnnnnnnnnnnnnnnnncgcgcacca

SEQ ID NO: 15639 - DNA, 6658 bp, Oryza sativa
  unsure (1)..(6658): unsure at all n locations
ctttcctttttctctgttaaatatctgtgacagggattgaagtgagagaggaaacaagccaggaaagaatagcccagaactagagacaggaccttaaaggaactaactcttcttgttgatgtgctgtttgttttacttattctgcaagttgattaagcaaacaacctagcatggttacatcacaacccaccgatgcaaaccacacactacacacacaagcaaggaaacacacgactaacaacactatcctagaggacggcttaggttctgcgactggttcccaagatcttcactccttcacagctggcttcactgcttcctccacttcgctagcggatcctgcagtcttccggagcttcggcaaacaactgacgatgtcttcttcttcactgacctgaccatctagtactagttgaaatccgaagaaggaagggagtaaaccttttgcaaacagcattaagggaaggagaaaaaaggaactttcgcaaatagttttatttataaaatatgtccttaggttttatccacttggcttatcctacagtcgagatggctctgataccatcttgtcacgaccgagaaaaatacattttcccgaacgctagtgtattaatccccgtcccaggaaaagccggggtacaccacacaaacatgatataaaagacacatctttattatatcgataatatttacattattacaaaggtacttaaggcctgacaatcaaaaataaacagcagcggactagcgggcctacggctccatcttcacaggcgctcaactggggtataagccaggactccacctaggacttcatctccaaagcttctcttactgaagggggggggaaagattgagcaagaatgagtacaaccacagtactcagcaagccacaccggcagatgcatgattaatgcaagggggtacaaggggtaataatataagggttaggttttgcagtaaacagcatttaaaagtcacttagttgcccaaagccaattttaaaaagacgatcctagagctacacagtattattaatcaaggccgtgcacccacacgaacctgccttaacccaaggcctacgatgtaaccacgtgcacatctttacccacaagacacatcttcctcatgtgtaaccacgtgccacataccaccacggtatacggacggaagacgtgacatagttcccaacccatcctagccataaacaagagtaccgacccaatcccacctactgccggaacccccgggacaggtaggcaggactgagcctccagcagcaggacaccggccctgtgccatgacatctcgactaccgggccgcagctcgtgtagccttcatttgtcctagagatgtccatcgacccccgatttcgtccatctccatccgtgtacttttgtttataaccagactgagccacaaagtaagccttacccactacacatgtggaagtacggtagtgctttgcaacagaggcccgagcttaatccttatagtacccgaggtacgactaacaaaacccaaccacgcacctcgagcccagcctaaagccattttgggggttttgaatagagggggaggtgtgtgtccaattccaacataagccaaccattccatagtgtccaaatgatatgagaattcccaaagtctaaagttataaaaccacctaatgttgcctaattaatcagcgaagcatctacctaaattcatactagtggaaccatgaatagagtacccactagttggggtttgatttatcctagggtgaacaaggtaataataacaataacaataataatgtcttaacaaaggtaaataggcatggctaaataaaacagtgataacgcgggaatttaaataaagcggtaatgcattaatttaaattaaaataattttataaactgggattcaatatgctcaaggatgatgtgacttgccttgctcagagataacggccttccgaaccttcggcgacgaccacgaaccacgcttcgggaacctccggaacgacgaaagctacgcgaagcacacaagcaaagctacaagcctataaagaagcaataacaatacataaaaagaaagcacagggttctttaggttataacaaacattaagagacttgaacgggtcgattcggagctcgtatgaccaagatatgatcatctgaagtttaatgctgttatatggagatttgcggattattataatttaagctttgcaattataaaacatgtgtaagcgctagcctggaaaagacaggaaggctgcgccgttgacatgcggaccccacatgtcaacctaaaggactgcggtagaccgagtacacagatacggtccacgggtcgacggaagcagatcccgtgtgtcaaccgaggcgagtggccgacaaacggactccactagacaccacacgggctgcacacgtggaaaccatgcggctaccgagcgggcacactaacacggtcaccacacgcacaagcgaacgactaccgacaccagtacacgggtaccggggtcgacaaccgcacaacgggcacgggcgacaccgaaaggacgaggacggggcagcgagaggagagagatccttaccaccacgcgacgaggcgtgggaacgacaacgacgaacgggcgcggcggaggcggccgggaacgacggagacgaacggcgaggggacgacttcagcggcgatccttggacgaaggcgagacgcggctggcacaaggcttgacgacgtggagccgaggacgaggacgacgacggggctgctgcacacttgacgaaacgcgggcggcgaacgcgatcggcttgacggagggacgaacgccacaacgaggaggaaggaggaagacgacgcccgacagggaggcgacgagggcagccggcagcagctgcacggaggtgaggacggcgtgggacacgccgcagcgatgcccacgacggtggcagcgcagccagacgacgagccgggcgatcaacgggacgtcgacgacaagaacgaacggagacgacgacgatggatcgcggaggggtttggtcaaaggggaggcgaggccgagggcgaccttgccgctgcaatgccgggggtggagatggcgacgtcggccggcgcactggcatggcggaaggggctgccggagagggtgccggcgggaccgagggagaggtggcgcgggcgacggcgttccggcgaaaccgaggagcagccggaggagaggacgacgccgcgacgtcgacggaggagacggcgacgtcggtcggcgtaccggcgacgaacagcagccggccggagacggtgtagtggtggcgacgccactggacgccggcggggcacgtctccggcgatttccccacgaatcggaggcagcgccggcgaagaggaggcggctgcgacgccggggaaggcgacggcacggccgggcggcgctcgggcgaggagggaaaggcggctggaggcggccggcgcgggggaaagagaagggcgacggcgggaacgcgcctccggcggtcaccgcgcaaaacggagggcaggccgtgggagaggaggcggctgcggggccgagagaggtggtggcgcgaccagccgacgcacaggcaaggagacagaggcggctagaggcggccggcggcacgggagagagaggaggacggtggggagaggtggtgaggtcacgggagagcgcgagagggggctaaaacgatagaacgaaggatggggattccattttataggcgtggggagggagccggccacgggaggagcggggaacggcggcggaaaagccggccggcggccatggaaggtggccggagttggcgcgtccgttcccggcgtttgggggcgccattcaagggggaattaagggggaaagagagaggagggaaaggggattaattccccctaatcaagtttggaattcgctgtttgaatcgcgtggattttggggaggtttggcgctaggtttccggggagagagggagcaggccgtgcgggaggaggaagacgaccgcacgtgctgcgcgcgtgcggggagcggctcggcgtgggccaggtggctgggtggcgcggcttgggccgggcgggaaggagggaggggaggggcggcccagaaggaggaggagaggagggagtgggccgggaggggaaaaggaggcccaagagaaggagagggagagaaagagagggaggagagagggacttcggccacgggccgagagggagaggggagaaaccttgggccagacttggcccaaagggaaggagagggttaattttaggtttttctttttaataaactctgataattgtttttgttgcttaataattatttccggtgctctgaaaattcaagtaaaatttgagggctccttttagaacaaggagaatttagcaaaaattctccgggccacatttgaatttttcttgtacgcattttagtgtttgccaatttcttttcgaattttaattaattctattattccttttagaaaatgatttttatttcgggatgaattattaggacgtgacaaatccaccccccttacaggaatctcgtccccgagattcgaggaggctagcaagaagataggttgggcggtcttctcttcttgtctgacttcttccgctccgtcttctataacaaacttgcctagctaaacttctccactctggactgcttggctcgatctcctcttgcagatggaatcttctcttcacctgacttgtccttggttgcacctctagctgtcttcgactgggttgtggcacttgacaatgggacttcagttccagaacttctcataattcatatctttggcgtcaacctcatacaagttacccacttcacgttatgcgtcgatatcagcttgtcattactaggataccatgcttgtcatcatgagaataccatgcttgtcatttacttctaacttgcctccaactgcctcatattagctttcctgctctccgggtgctagctacttctgctattccatgcgagggtcgataactttgcctttgagttatgtttctcaacagaaccaacttatcctacatgacatgcttcgacgtcttccaaaatgactttactgctagacttgttatggtctgatcgtgatcctgccaaatctgaagcttcgttgttagatgtggttttaatctgacctctatagactatctttgaacatattacttggttcataactgggaatagctcccacgaacaagcagctcggattcactttctttacattcagtttacttcccactattatcttcaggttgtcctcagttagcattcaacgtattcctttacacctttaaccttgatgtgttctttccagatttctcttatcaatcacctttcgacctacttctttgcctgatcataaacacctttgttggtatcttctatcaataaccttttgaactttgtcaaccaagtactcttcactccgagagttgtggatgcttctggtgacgatgtggtcctttggtctgctgactttcagtgaaaccttgaagtgtttcgccaaaagctgtactgactgtctttgcctttgatccgaaaaagacacatctgaaactcttagtccaaacaaatgtctctttggttaatcgcttgattttcttttccattatcaggttggttattaactcgaggttagaacatagttcctctgaaatgagaccctaggtctcctttgacagtaaacaattatacacataatcccatatcagcatcttctgaaagagtcctcatagaacttgtttttattacacatttctcccatattacatgaatacaaggcactgccttaaacaaaaagggaaggtgcttaacatcggtacattgtatcctcaacaggaatcatccataaacatagcaagctcactgtttatagtcatgaatatattgatttattacatgattgctgcaaactttctattacacaatgataagtagcgaactgaaaaccacaaacgtggctgctcattttgattctggagagatatagctggcattgttctaatgactgcatcatccttgattggttctgtgatgatgtgataggactgcatattgctatcattcacaggagaagcttccttctgattgctggttgaagcggataacggtcttctgctttgtatcgccctcctgaggttgattgcccttcgctcggcctggagtaggtcggggagagacacaacttcttccatcgacgacaattctttgctgaggctgtcggcccagagaatggttggtgctgaaggtattattgctatgattgattgcagagtcaggtgcagcaggaggagcattggtgctatggatgatatcgtcgatgttgctgttggagctgactagctgatgagacaatcgtagggtggttcattggatttctgcggtcttggtcaacaacacactaagttggcaatccttgggcacatggtttgtaccttcgcacagaaaacatgtgaccttgcgggtgggacactcccctggtggatggtcttcttcacaatgagggcagagtgtgagacacatgctagcaacgtgtccaatttctccacaataggtgcatgcctttgattccatctcttcctcgccgagannnnnnnnnnnnnnnnnnnnnnnnnnnnaagctccagtcat

SEQ ID NO: 15640 - DNA, 697 bp, Oryza sativa
  unsure (1)..(697): unsure at all n locations
ccggggtgaagggcaacgcggcgccgtcgagggaggatgncgatgacaccagccgctgccccggcaagccggcacaggcggctggaggcggtacagtggcggcaacgccactgttttgccggcgaggacgcgtctccggtggtttccccacgaaacggagggctgaccgggggagaggaggcggctgcgacgtcaacggaggagatggcgacgtcggtcggcgtaccggcgatgaacagcagccggccgaagacggaacagtggcggtaacgccactgttgccggcggggatgcacttccagaggtctccacgggcaacagagggcaggccggcgcagaggaggcggctgcgacgctggaggaggtgccggcacggccgaccggcgctcgggcaaggcggtaggggcggctggagggtggccggcatggaggaaagagaaggaggaggcagggagaggtggtgcagccacggggaggacacgggagggggctaaaacgagagaacggagcgagggggttccgttttatagcggagggaagcgagccgagcacgggaggagcagggaacggcggcggaaaaggcgcccggcggccatggaaggcggccatgaatggcgcagccgttccggtcaaaatagtggnnnnnnnnnnnnnnnnnnnnnnnnnnnnnnngtcagacgggagcgcaatcacgcat

SEQ ID NO: 15641 - DNA, 6441 bp, Oryza sativa
cagctaagctagggcattggaaaaacactgctccgtgcatcataaaatagttcaaactttatcccaaataaagcaacccagtattataaaatgtgacttttaccactaaatcaaccatattaattatcccaagaagaggcaaccatgcattattcttttacctctctccctaatagccacttattatattttgggacagagggagtataaaataaccttacattattattatttttgaacatttgtttactaactaattaatcccaaagtccatacaaacaatatatgtttctaataggctttaataatccttaatttgtgagaacagtggtggactagatgacgataagataggtggctcgtaataaagagtaagaaaaaaagtaactatttcatcatagcacttaaccacctaaacttttttttttctcattttacacctcgaaccccctagcagtattttttattctctctatctaagtcaattttgctctggaaatttggtagaacatagatgcgttcacaatttaggtttcaacatttttttttaaaaaagaattatcactgtttacttaggttgaaagcacataaaacagattcaaacatcaaaattaagttcaagcaaaaatcggttgaaaaaaatttgaaaatacttttgaacttcgttaatggtgccatctatggcttctaacaaatttcagcttaaaatactgcttgtaaattttagcttaaaatacaacttgtatgacgggtaagaaaatgtatatgttattaagcactaaagtgaaacatttttaacggtttaggggtaaactaccaatctaacttcactttttcaagtttgcatttgatcctatttttcaaaattgacgttgttgtttggccgtgtttccattacacattaaggttttgtcttaaaaaaaagcatgcatttattagccaaaagtaccaaaatgcccatgagtacacaacaatcctatctctaactttcttctcatcccctttcatatcaggaggctggcgtagtggacgggcggggaacgagggagcgacgtcacctgcatgtggagggagaagagggcggcggcacacgtggagggagtaggggcgacgacgatgtgtgtgaagggagaagcagcaatgaactggtcaggagaaggagggagcgacgtcaccggcgcgcggagatagaaggggcggcgctcgtgcgaagggagcagcggtggtgacactgcgcacagagggagcaaattaaggtggtggcgtgcggaggaagcagatgcacatatcatacgtgtatatgtgtgtgtgagtgtattttatatatacgcatacttttgatgtataaaaaatgtaaacacgtatgcaaagtttgtatatttagagattcaaaaagtttatataagtatgtatataaaatttagacagatgggctgacctgatctcgcgggctgggctgaaaaaagaaaacccaagacggaaagtggacgcgcgcggtctggcgtcacttgggccgaaatggaaaacgcggggtggtggtcgcgcggctagctgcaaattagctatctcgcccaccacgaccagctctgcaatgtaaccccagctatcgtctgccctagagagagttgagaccacgctgcttagtaggttgactccgccgcctcgaccagcaacgctgccgccatttgcacacgctagctcgacctcttgctctgttgtcgtcgttctcgcttccgatggcggctgcaggcggcggatcgttgctggatcagtcgaggcacgccatgcgcagctgggtactcaagaatatgtgagtagtatttctctaataatccctcatccaattatgtgaattacttttgctgcttctgcagctttttttcccgctgttcttgtgatgaattttgttgttgcataattattggtttctttccagtttcttgattaattccttcgaattgttccatgctagctccacgccctatactagaagattctcctactacttagagcggagtatctgtttttgcgttgcctacaaatcgatcgatttgccttgattttgggttaattttcgttactttttcttgattgaggatttacatctactacttttgaaaggatttttatcactaaacggctaagattagatatattttgctcgccaggagggtagttaagagctatagccaacaagcttgtgctcgttgatttagagctgccagcaagagctaattgatcaaaagctcaagatcgagcgaggcttttgaaacttggaacgcaagatgtagatcacatacctcagctggtaacgtcacccaaaatgattaacgcgtcagcctcattgctgcaaacaaattaaaccagcagaaattaatcaagcttgtgctcgtggacggccggatcgcagtgaagcaggaacgcttcgatcggacggtgcatgttgcggcatagctagcaagctcgcgcgatcggtgggatgagaagaacgcgtagtaggttaccaaacactacggctttctagttttatacatataataatgattctctctcggctgcatcgtcttagtactagctattttcttctttcctctccttcctatgcataataaaaaaaaaactgttatgcctatgaatattactggcatgtgatcagtaggtgggggcttttcataaaagtttagcaaggacagagatttattataattaatgctatactactatgtgtgttaacataatcgtaaaatttgtgatgctatgtgtactgtagaacgcgcgctaaaagaatatgaaagctgaattagatatgtgggttgacttggaaaaagaaccagaatcggtgtttggcttggctcttggaaaaagccatgtcaaacattcatgcagctaaattgaactgctcttgactgaactgttaaagttgcatgatttatgttgcggtacaagggtgcgagagaggtttgattctcattgattgtaatgttcaatttatataaggggatacggtcggtaccgcaggggcgcaaacagtggctgagctaggaaattttcaaaccagggcaaactacttagctaaattgaactgctcttgattgattattaatgtttagctaggaaaaagctcggagtatctagtatttgctaaaatatttctaactttaatcctttcaaaataataaaaattcaatggtgtatttgatggcgagcctgggcggctgcccgtgcaagcctggtggtggccccgcttctgggtgcaaagtgcaatccatcgtgccagttgtcaagaagtgccgaaggagagaaggggcgtggccgcctcatttccttctctaccggttgtggtaatggggggcatggccaaccgcaatgcctattccatcggatggatgagatcatacatatatatttctcaacaatttcgttgtcaactactttaaattaaacaaaaataatgctttcctccgggtgtctaatgtggacacagaaatcaaattgctgtcacccatccatgcctttcccgttcagtatttcataagcaagtaaaattttcaacatggactcacgtgccttctttccgtttcatcttttggtgaatttctgtttttcagacttcggatttatcggcggatcagtacacatagccgcagtttaagatagatggtgatggtgaagttgtatgtgtatgactttacccattagagttcaaatctaatgtccatgaatactatgcaaatgcaggtcgacttttagcatggttatagtaagatcagaaatataccgctgatttccgtttatgtcttttaagcgtgtgttagaggcacattcgtctaagtgtgtagtgatgtagtttgcatgtgcattgttgtgtaataataaaataaaataaaattgaaatgagcagtttagaataagaggtagtttattgaaaaatcatatacttttaatcgcagaaaaacatatttttttagaagtgtcaaataaatactccatccgtcctaaaataactcaacctaggatagaaacctaggataggatgtccgtatccacgtacatccggacattcccatcccatccccttctcctctcatcttgtttctcaagctacaattaatggtggatcctagcgggcgcgctctctctctctgggtcatgaatcttctgatagaattcctaccattgcagcttttcttaggctatgatgcgttacaccggtgagttgtacatggctcacctccattccataatgtgcttttatgcaccagcgtaaaatattggttgctcattgggatatcgacatatcgtgcttcgtttaggctgtgttcgatgcaggagttcccaactctccctctcattttccgcgcatacgtttttcaaactactaaacggtgtgtgtttttttgaaaaagtttatatacgaaagttgcttaaaaaaatcatattgatccatttttgaaaaagagctaatacttaattaatcacgcgctaatagaacgctctgttttccgtgtgtgggttatgggttcccaacacccaccactgaacacaacctaaatgttccctactacataaaagcacgtacagaccggcactataggtgccgtggaagtgctaaaactggcacctatagatctttttcacctctgcaagctgaaaacacaaaaaaaaccgataccaatatatagttgctagataattaaagaaccgacacttataatatattataggtgcgtataaaaactgagcagagctaagctgttggtccttatcctcttgaggcagataaggggaggaggactcggtctctccccggtctcctctctctcccggtctctctctcgctctcctctctctggctctctctctatctatcgatctctctctttgtcgcttaaagtcaacaaatagttgcatcaaaagctttaattttgtctgctttgatgtatgatctcagtcctttacttccttctggattgcttcagtacttcctttgaaattggaaaattgcattgagcgtgtgtggtgatacattctgtgtgtaacaaaatcacgtgtttatgaggaatcatttaattacttgttcatcaggcaggtatagacatagtaggaacaggttctggaaacatataacatgacactaggtaggatctcattgtggcatcaattttttttgtcgacatttatctgaatttctgaaccctattctttttgttcaatcagagagaaattggcaggacattatggtgcagagttcaactctttgcgggcatttgaggacagggtattcaatgagaccagcagcattgatgattatatttctaaaatatcaacgaagatggctattttggagcgaccgcagtcttcttcaggtatgcagcatcaagggcagatgggaaatcaaacgaggctgcctactacagttatgcaagaacagccacagccacagcagcagccgcatttgatgtcaaataatcatcaccaaacacatggaggatggcagagcaatgttgcaagggtacagatgatcactggtgttggagaagtgaattggagggaggaaatgtttcagaagatcagcgttttaaagaactctttcttttccgagcttacggattttgaccgtttacttcacaattgccaaaaaacagaagaacagttgcagtcactacctaaaaagcaagctgaccaatacaagcggataacaaagctcaaggatgcggttaggagtgctctggatttattgcagctccagaagagcagcatcgatgaaggcatgaaggtgaaattctgcaagtacgaaagctccatacatagcctactcagattctacagggaaacaaaagctaaaattaatgagatgaatgcaaatcgtcataacaatcagcaagagcaacctgcaggcctgccgaggcaaagaattactgacagaactccatcgtcagctcgtcggcaaaaccgcaatgacaacgtgataggccaatcagaggataaattgcgatgcagggttgaatcagttgtagccaagaagaagcccatcgaccgcctaatcaacgctttgcggcacagtgtagaggatgaccgtacggacgtcaagaggcagaaaacacggcatgttaacagtgccctggcgaacgagatcgacgccatgaacgccaagctgatcgataccgtggttagaatcgccggtgagaaagatggtgggacagagattgaattcagctacactgcagtgtctcttgcactagacatgaagcagctatttgcagcatatgggacgtcttctgtcaagccggtgaaactattcgtccctgctgattacccctcgaaggtttctcgtgggcttcgaccaacaaccatgattgggaatgaacaccggcgaagaaatgttggccagaatctggggcttggcaacgcgggtttttactggcgccctggtgagccccc

SEQ ID NO: 15642 - DNA, 6292 bp, Oryza sativa
  unsure (1)..(6292): unsure at all n locations
gggagttgaactgaaccgcactganatcgtgtnnnnnnnnnnnnnnnnnnnnnnnnnnnnnnnnnnnnnnnnnncttgtaggacatgtatttctgaaaatggtaactatctatctttgaagagcccaacaaagcatttagagttttattggcaaacaataggttgagctcgcaggcttatgcaatggtggccaaacagttcaattcctaccatatatttccttctgaaacttttaccggaactgaactgttttagctgaaagcaacaacatgggacgtctgcaatgcagacaatcaactaatcaactaattaagcgaattttgcatgtgttcaaaataccggaaagattttgtgaggagtatgaacagatggtgagaaatttttggtagggacatgataaaggagaacggaaggtacactcgattggttgggaaaagttaatgagtcccaaactattccgaggacttggttttcgggacattagatgctttaaccaagccttactagcaacgcaggcatggagactgttcgataatccagataatttatgtgcttgggtgctaaaggtgaagtactatccaaatggatcactaattgacacggccttcccttcaagttcatcgccgacttggaagggcatcgagtatggactagagttgttgaagaaagacttgatatggatagttggagatgggcaccaaattaaaatctagaggagtcaatgggttgcacatagggaaaacccagtgattctgtagaagaaggcctggaatcgtctcacgtatgtacatgagctcatgttgccggaaaccaaaacgtggaatcagcctttaatcagacatgtgtcacgcccagaaattcactagtaatttccgaactaatttgtgcattaaatcctcgtccaggaatcagccaaggtacacaaactgacaatttaatatacagattcatcaaattaactaaaacgataaatacttacttaagaggcacttagttctcaccatgaagaaaactgcagcggaaaataaaatctagcgaagctccggctccactcccacaggcagctcaactggggtatgagccaaacgtcttctccttctgaatcctttttcttcaactgaggtttgatggttattgcaaggtgagcatatgacatactcagcaagccacacaacaaatatgcaagtgcacaaggataccaaagaatggtataatatagggcttatttgcaaaagcagcatttagcaaacttttgagaattgtaaaacagtagagcaattaatcatcaatattaatcaacactgtacaacacacccatgctgcacaggcccaaccatcctgaacaaccatacccggctgtacagatctatctccaaaccaggaatgtaccattccaaaccaggagctaatcaaattattatcagttatagcatcttttattatggtgagaagtgtgagactaatcacgaaagacattgttagacccgcccataactgcgggcacggctattcgaatagttttactctggccagaggtgtaccactgtacccacaagacacagccccacgacatgtcaccatgcgcctcaataccaccacggtacctcggaaaggagctgtgacagtacccctcgcacaacacaatccaccacagtgcaccgttcctggatcataatcacccccttataaacaaggtatggactccccagcgacccccgtgggcttatctccgccacttctcagtctagtgctccgcaatgaaccatgctatataaaaggtaaagccgttgcccatactggcttgtggttggcacggttaatgtttcacaaccgaaactcatgaaccggtccttaattgtcatgagcacgaccatcaaaaccatgtgctcacaacccaccattatcaagttttagttgacaatttaattaattaaccaatcacgattgaccatcgtgagcttccattaaatatccataagtgatagtgaagcatgatttatcccattaatgagctaatgtttctaagcacggctaagcaactataaataacatctagctgaaccaatccaatatataaggtccatgctagtcaaattataacccataggaaaataaagtcatctttggccataattaaatgggaaaggctcaccacccaatgacattcgaaaacaatgcataagttgaaataaatcaatagctttaaacaggttcaacatgctcaaagggttgtttgggggatctgtgtgacttgccttacaaacaagcgtcttcaattcgtcttcaggaacttctccaacgaacgaacgatcctccgaaacaacgggaagtctaaacctaaaacgcaaaacaaggaaaaacactaataaaaaccaaatgaacagtacaattaaagttcataagggtagagtttgaatttagatgaattatgagacttgaacgagctcattccgagttcgtatgaattagatatgaattttacaagatttaattccaattaaacctattaaagaaaagactattccaaattgattaaacaatttacaaatgatttatagctgagacagaagattaaaacatcctccggaaaaagattagatcatatttagtagatgacatatattaaaaaggaataatatgtcattgaaaagagatgacaaatttatattaattttggatggtcaagatggcgctgatgccagcgatgacatggctgccatgcaggatcgacgaccgcaagcacgggaacggcagttaccagcgaaccacggtacaaagatgcaaacgaagggcaccgggagagagaggagatcaaggcgacccttaccaccacttacgcgaccacagacggcgagggagatggcaggcgacgaggcggcgaccttgggttgacgatggcgacggctttccggcgacgagaggcagcaaccgaagggcggacggtcttcacctcggtcctgcgatcccgagggtggtgacggtgagtgaaggcggcgatggacggcgacgaacggcgcggctgaagatggaacagatcggcttcacggtgacgacgggcttcccggggtcttcgacgatggggaagtggaggccggtcttcttctcctcgcaaactcaacggcggcagcggcgaccgaaggcgacgaccacagcgacggcgcggggctgctggagcggcggccggaggtggagagagaaggcgagcgcggggagagcgattccggcgagattcggcgcaagggaacgggtggccggggtagctctcacccttgcgaagccgagggaggcgacggcgcaggtcggggtcgaccgaggaggcggcgcgacgcggctggagggtcaccggcgtcggcggcggctagggcaaggcggcggcggcgctacaagcgacggctcggcttgggacttgaggcaaacggaagaggaggccgaggggatgctatttatagccggaagagggagagatcggctcgggaacggatggaatcggcgacggattaggtagggttcgccggaaaaaggaaggatttgatccgcgaaattggaaagaatttccatataaacttttggggatttcttgggggaaatgaagaggagattgagaggattccattcccacaactaatttggaaataggagcaacggagaggacgaatttgatggggaggcggcgctgtacacgggcacggcagggaggatatcggccggctggaggttaggggcgacactgtagcagagggggacaaaacagacttatttccgggcttcatttcctcggcccgattgaaggaggaaggcaaatagaacttcgtcagagagaggaagagaagatgcaggctcgggttgggccggcggaagagagaggaaggaagggaatgggccggattcggcccgagacaaagaagtggattttgattgactttttaatttaaataattgctgaaatgatgtttcatttattaaaaatacttataatgctcaaataattccgggaaaaatccagaaaatatttggacactaaaaatatttaataaagttttatctatatcaatttaatgttcaaaattttcatatattttattcaaacacttactttaattattaaataaattctaaaaattcctttttttacaacaatttataatatagcgattttcagggtgtgacatagtccaggaaaatgatgcatccgaaattctgaagatcaaaatacctggaagggagatgtcggactttccagcatggcatcttgagaagacaggaattttcactgtcaggagcgcctataggttagcatggaatcaatcagggaaggctcgtgtggaatcttcatctagcacggcgacaaatggtgaaaggaagctttggaagaatatatggcaaacaaatgctcaaccaaaagtgagaatttttgcatggaagctagccaggacagattgcccacttggggaaataagggcctgtttaattcgcgaaaagaaaatttttgggtgtcacatcagacgtttgaccggatatcggaaggggttttcggacacgaataaaaaaactaatttcataactcgcgtggaaatcacaagacgaatcttttgagcctaattaattcgtcattagcacatgtgggttgctatagcacttatggcaaatcatgggctaattagactcaaaagattcgtctcgcgatttcccccctaactgtgcaattagttttttaaaaaatctatatttaatgcttcatgcatgtatccaaagattcgatgtgatgtttttgggaaaaactttttgggaaccaggattcttgtggttccggggaatccagctacaggagaaccaggaacggggagctctcccctgccctaagagaaagagaaagatagaacagagtggcatatgcccgatctgcgggatggctgaagagaacgggtttcatgtacggtggagtgcactctagctagaggtttacgggaggcaatgagaacacattggctattgccggttgaaacgagttttgcatatacagggccggactggctgttagtgctgctggatagttcgcagtgttcagaaaaggcacatgttatgtatttactctggagagtttggcacctgcgaaacaacatgatccatggcaaaggaagtgcatcaattgctgatttggtcagtttcttggttagctatgaaggccaactgttgccaatccgacaacaagaagatgaccacaaaggaaagggccctatatacatggaaccgaaccagatatctctctctacaagtatcagcaaactgactgacaaatggtgtcaccgccggagcgcttcgctaaactgaatggtgacgcaggttatagggaagaaaccggggatgctagtgtcgggtttatatttagagattgcaggggtttggtgctattggcggcccaaagaaccctgcatcaatgtggctcagctgtctaggcattggcgctagcatatatcttgagggactcagagcggcgactgacttgattcacatgcccattgtgttggagatggacaatgcataaattgttagggatttaataagaaaggaacagctgaaatcggcctgggcgacgacaattgaagatattaaaggagtgatgcaaagtgcaagtgcacaagataaagagagaagcaaatagggtagcacatgttttagcacaaatggctgtcttgagggactcagagcggcgactgacttgattcacatgcccattgtgttggagatggacaatgcagaaattgttagagatttaataagagaggaacagctgaaatcggcctgggcgacgacgattgaagagattaaaggagtgatgcaaagtgcaagacttgattcatatgcccattgtgttggagatggacaatgcagaaattgttagagatttagtaagacaggaacagctgaaatcggcctgggcgacgatgattgaagagattaaatgagtgatgcaaagtgcaagtacacaagataaagagagaagcaaatagggtagcacatgttttagcacaaatgacaatgagttgtaggtcctacgcggagtggaggttgtgtgctcccgcaagaattctagacttattaaatcaggagtgtaatcccttatttaagcattaataaagctctctttaccctcatttttttttgcatgtgctagaatcgatcgcagaatgaatacgaaaatgcgtgtgccatattccgttctactccagttgggttgaggccatggcttgcgtacatggtggatttgtgggcttctcgttctgtgccacaggaa

SEQ ID NO: 15643 - DNA, 3862 bp, Oryza sativa
  unsure (1)..(3862): unsure at all n locations
ccgcccctttgatatgctccgcgtcgatgctcctctgactcgaggagattggtaccccattcacattcatattccatcacagcacagtcaattcacaaaatcaagcccatattcattcacattcccaacccattcacatatatgtcattcacatccatttttgtctccaaaccgccgacatgcatcaaaacctgcaaaaataagttataaattggaacaattttatatgttactagaaatgcaagtatatacagagacgagctacctaggactttactctaaagaatataattgtattacaaagaatatttacaaaaatcaaatgtgtgtcgcatatgcattgcaaatgttctgccattctgagacgagctacctaggacttcactcttaaacatccctttcggtgacaagatatcatctagtatgaattgtgctatctcctctctaatgatttcgaagttgatttctggaatccttgaaataaattcctgcatgttcggcgccaagttagtctacatacttgtaaatttgtcgtcctatgtgtatataaacaattgaattacacaccttagggtcgagcaatgtcaccttgtctgcgaagctcctcatgttatggcagacatggaacccacactggttgctaacttgttgacatattgggaagtctttcttgtgaccgagtttgggatgcccatccttatgcctcccgcctcttgccacgtattggtcccatgcctcgttcaaggaagattcgatggccgaccaatcgtatatttctggcttgatattggagttaaggtagtgtaccaaactccacttcggcgttattaccagaagaatccaatgtcgcctgcgaaattattaaattgccagttacatactacagttgtacgcgttgagtatttgagtataagtacggtacacgcttactgttgattgtaggcgcacataatgaagtccttgtcttgacgggcaaataagcagtccttgatataggtcaccatgtttgctcgatcatttttcagcgttgtcacgttgacgacagctggatcgagtaaggcaatatggggtgctttacgatggacatgcttccaggttaacctacaagcaagacatgagtcagggtaagcgtaatttatggacagtcgctaccatatcgcgtaccaagaaatacttacaaggagtagcacttaaggaggttggtgtcgatcgctcgcaccctatagaggtcccatagatctttgaagtctacggcgatgaaggcagtaggcccgaggaacggctgaccatcgtgctggcccaacatggaggtctctctattcttcctccttgcattggacttctccctgtagtacctgtgcaactccttgcatgcagggcccatcttgaataaggcatcgtctccgaccaatggcatgcccaatgtgaattctgctggaggctttggaggagctactggtgccttgccaagatcaagcttctttggggctaatggcacctttatttttcctctccccgttccagcagcttttctgcgtgtgtcaagcttgggtggagaagatttcgccctcttgctccttttcgcagaaggggggaggtgcggcctgctgtcaacctccataccgtcgtcccaaaaatcagtatcatactgtaattggagatcttcatctctttgttcaacggcaggagggagagatacaacagtttgatggggatgcgtcggcggcggacgagaacttggcgctggccttggagttatattgatctcaatgttgtgcttgggccattgaataaaggtcccacgtgcagccccaagggtcagaatctcgtcattaggtgggtgtgggatagtgtagccaacccaatcgggcttcactaagtccacctgaactttggcattgccggcttgctgctgcgccccatgcactcgggtctccggggtaggcttgaaagcttgaccctttgcggcaggaattgcaaatcctggtgtcaccctaacgactagggtacacgatgtgggttcctgcgatagattcattagtgtccttagtatatgttgcaatgtattgtggtgctaatataatatatgcgttcctgcgatagattcattagtgtccttagtatatgttgcaatgtattgtggtgctaatataatatatgcgttattaagttgtttttaccgttatgtggtccaccgcggcggggccttcaggctgttctgtcggagcctcagttgatgcgcagctgctacgcctctgcgtggggctcacttgtactatgggaccgggagtggcatcggtcgacctatccctgatgcgtgccttcatccgagcctccatatctaacagctcggcagtgagctcttctctaagctcttctttaagctcctcccgaagttgggccttaatgcgtgcagctttctgtgccttggaaagcttgtgcttcttgtactgccacgcgtattggaaaaacccaaactttcatggaacattggagccaatgcccttagtttgtccacggtgttcttcatttcccaacgctttcgtgcggatgtcatcctcgcgtttttgtgagcatacctcttgggaggcctgtctctcagcattcagttcgacctggggtacagttaggacgcgttagacgaagaacaagatacaacataatgaaacttattctatgtgttcaatttacgattttctggtacaccgcttgatcttcgggatttggaaacgaaagagttccgtcactattcttcttcacccttgcccttgcccagttccttgcccgctggaccgggatatcagcaagcacttgcggggtgttagattccgctgcagcttcatcctcgttgtcccattctgcctgtttccccgtgtagcctccggtgccaagccggtgcgggtgaaggttccttgcctgcagatcacggtaggtctggcttttttctcgagactctttcgtttatttggcggcatggaactcatcccacacgggttgggtgatgaatgggtatttcccaaatggttctggctgggcggggttgaggacgtactccgtgtccagcgttgtcttgaaatttttccaacaattccccatcttgcggatagcctgccgcttcagtcctgcctcggcctctgtagggtatcagaagctttccttgaactacctccaggcctcttctttttcttcttgagggaccagatcgatgtggtccttcagaatagtgaagttccgcctccctaggactccgcatatcgtagggaactttttgacagctttcgtcggagccgtcggatatccaacatcgtccacctctgttatggtgtagacttccttagtaatcttattatgggtcctaggattctggctcgatgtagtcccagtagtggtcatcgacatccgtttagtatacaattgaaaaaaattctggactttctttatagttagtacccattaaaactaaaactcaatatgcaagcatgtcacatcatcacccactagcaatttatattcgagtccatttacaatcccatccatttactatgctagcccatttagaatcccatgcaaccatgccatatcttcactcactagcaattactattctagcctattttaaatcccatacaagcattacatatcatctccaatattatattataaagatccacaagtatgtgtcaaatcatctttctcgcatttttcttcacaacattacagctttcatcattctcgacaatatttatcatatactcatcagtgaatcccgcagctaagcgaggggtatccccgggttcaaaatcgataacctgaatcccacagctcctgggcgttggatatgggttttcatnntcatggacgc

SEQ ID NO: 15644 - DNA, 869 bp, Oryza sativa
  unsure (1)..(869): unsure at all n locations
ttgtgtannaaggactgacgtgctnnnnnnnnnnnnnnnnnnnnnnnnnnnnnnnnnnnnnnnnnnnnnaaatttaaagactttggaaaggacgcacgaaacatatggtttggtttaagtacagatggcatgaatccttttggagagatgagcagcggccatagcacttggcccgttacgatatgtatctacaacctcccccgttggctatgcatgaagaggaagtacataatgatgccgattataattcaaggccccaagcaacctggtaacgacattgatgtgtaccaaagaccactggtcgaagatcttaacctgttgtggaagaaggaaggtgtccccgtgtgggatgaggacaaacagaaggagtttaacctacgaactctgctgttcgtaaccatcaacgattggcctgcacttagcaacgtatccgggcagtccaacaaggggtacaaggcttgcactcactgtatggatgaaacagaaagtatgtatcttaagcactctaggaaggttgtgtacatgggtcatcgtcgattccttgcagcaaaccacccggtacggatgaaaggcaagcactttgaatataaggcggaccaccgtacgaagcctaaacatcgcagcgggaaaacagtgtttgctatggttaaagatcttaaagtagtgtttggaaaggggcctggtagccagcctatagagagcgaagatggtcacgcggcgatgtggaaaaagaactctatattttgggagttaccctattgggaattcttggacatccggcacgcaatnnnnnnnnnnnnnnnnnnnnnnnnnnnnnnnnnnnnnnnnnnnnnngatatcaaaangtttatcaggttcaaattggactc

SEQ ID NO: 15645 - DNA, 1306 bp, Oryza sativa
  unsure (1)..(1306): unsure at all n locations
caatatggtcaaagacataagcaatgagtttgggaagaaaagaaaacgtagcaagacaaaagagaagggtaggtggaagaaaaaatccatattttggcggctaccttactggaaagatcttgatgtccgtcattgcattgatctcatgcatgtagaaaagaatgtgtgtgagagtttggttggcctgatgttgaatattcccgggaagacaaaggacgggttgaacgtgtgccttgatctacaggacatgaatattcgcagcgaactccagcccatacgagatgcagagacaggtaaagtgtacctccctccagcctgccacacactgtcgaaggatgagaagatcgcaatgttatcatgcttgaaggatattaaagttccatcaggctattcagcgaggataagtaagtatgttaaattggacgatctaaaacttgttggaatgaagtctcacgattgccacgtgctaatcacacaaatcttgccatttgctatcagaggcattctaccaccgaaagtgcgtcacacgatccaacgtctgtgcgccttcttcaatgcaattggatagaaggttatagatccagaagatctagatgggctgcagatcgatattgtaaataccctctgtcacctggagatgtttttcccactgtctttctttgatataatggttcatctccttgttcatctggtgaagcaaacaaaactatgtggcccggcttttctaaggaaaatgtggccgtttgaaaggtacatgggagttctaaagtcgtacgttcgtaacagagctaaacccgaggggagcatcattgaaggttacacgaccgaggaagctattgagttctgtgtcaattacatgtccgatgccgatcctatcggagttccagcgtctcgtcacgagggaaggttgtcaggtgttggcacaatcggaaggaaaagaattaggcccgatcaagcgtcgtacgcgtaggctcattacgctgtgctccaacatatggcagaagttggcccatactttgaggagcacttagcgaaaatccgagatgagaacttggggcgatctgatgcatggattaacagagaacataattctcggttcaacgaatggttcaagaatcgtgtgacaatgtccacggatgtcccaaatgagacagtacagttgttggggatgggaccatcttggaccatagacacatggcaaggatacgatataaatggatacacattttannnnnnnnnnnnnnnnnnnnnnnnnnnnnnnnnnnnnnnnnnnnnnnnnnnnnnnnnaangtgtcttcatcacgcg

SEQ ID NO: 15646 - DNA, 629 bp, Oryza sativa
  unsure (1)..(629): unsure at all n locations
aatggataaacgtcgacatctnnnnnnnnnnnnnnnnnnnnnnnnnnnnnnnnnnnnnnnnnnnnnccatctaggtcttctggatctataatcttctgaccgattgcattgaagaaggcacaaagccgttggatcgtgtgacggacttgtggtggtagaatgcctcttatagcaactggcaagatctgtgtgattagcacgtggtaatcgtgagacttcattccaaccagcttaagatcctccaatttaatgtacttacttattctcgtgcaatagcccgaaggaactttaatatctgccagacatgatagcattgcgatcttctcatccttcgacaatgtgtggcaagctggtgggaggtacactcttcccgtcttctcatctggaacaggctgaagttcactgcgaatgttcatctcctgtagatcgagacgcacattcaacccatcctttgtcttgccaggcatattcaacaatagccccagcaagctatcgcacacattcttctctacgtgcatcagatcaatgcaatgacggacctcaagatcttcccaataagggtagccccggcccaaaaaaaaaataattgtgggaatttttttttttttttccccctttttttttacccc

SEQ ID NO: 15647 - DNA, 873 bp, Oryza sativa
tatctttgaggatcccatgcatatctggatcattcttctgagcctcggggatttgatcgagcaaggtaggcttggcttccagcgtagccaagaatccacgaccaactatgcttaggttcagggcttccatctgttgattaagttcgggtggaatgccacggacgtcaagagtgttgcaatggctttttcgacttagagcgtcggcgaccacgttggccttaccaggatgatagtgaattcccacatcataatccttgatgagttctaaccatctcctctgccgaagattcagatccgacagagtgaagatgtatttcaaactcttatgatcggtatatatttcgcagcgattcccaatgagataatgccgccagatttttagagcatgaaccacagcggccaactccaaatcatgggtagggtagttgccttcatgaggccgaagctgccgggaggcataggctaccacatgaccttcctgcatgagcacgcaccccaatccttggcgcgaagcgtcacaatacaccatgaagtccttgcgagtatccggtaagattaacactggcgaggaaaccagcttttctttgagagtttggaacgctttctcgcattgcgggctccacacaaatttctcttctttcttcaacaactgtgtcatgggtcgagcgattttggagaagttcacgatgaacctccggtagtatcctgccaaacccaagaagctgcgaatttgagtgactgtctttggttgcttccaatcagtgacggcggtcactgtttcggggtccacagcgactcctttagcagatatcacgtgtcataagaatttgactcggacaaccagaactcacactgctaagcttggcatacaat

SEQ ID NO: 15648 - DNA, 1459 bp, Oryza sativa
actgatagtagcttcggatccaagctgatcgatggggaacccccaagatcatgttgattatgctgtgcaccatgctttgatcaatcagtctggaatattagtcaacacggggtcaaacatagtgaaaacaatggttgatggttcaatggctgagtatcaggctaaaggaccggtttatctaccaggagaggtgttcccaaattatcggccattaatcactgataatcagccagctgtccattcaattcctcttaatgcaccatcggctcagccgacggcgccagtatcggctcctgcacctgctgcaccaccatcggcaccgggccagttagttaatccccggttgttggtgagagaacaaccacagcatagtggatagaatgtgaatcggctaacacaagatcaggttgcggctatgttcttacctcctcaacctactgttgatccgacccagcagcagccgattcagcaaacaccaccaaggcagcagattgtgcaaccgattcaacaaacacccccaatacaacaggttgtacagccagttcagcagacgccaccaagacggcaggttttgcaaccaattcagcagacgccattaaggcaacaggtcattcagcagattcaacatcaaggcttgatgaatgcatcggctgggtttacaacacctggtagtcagcttgggcagcatgctgcaaatcaagttgtcccagagcacttggttcatcaggtacaaccagatcaaacggtgatacctcaagttgttcccgagcatttggtgcgcaatattcagccagattttcaaaattaccaggggggcaatttgaattatcagtatcagcctccatcaccgcaagttcaatatcagcaggaagcatcgtctcaaccccagtttgttcctcaatacaatcaattcgagcccatgtcacaacaacctcaaggagcacctcaacaacaaccatgggccgatatgattgcggatgtgatgaaggagaagtttgggcttaggccgaaagacgctggaaatttgtaccggtagccttaccctgaatggtttgagagagtccctctacctaatcagttcaaagttccagatttttcaaaattctcagggcaggatagtacgtcaacttatgaacatgttagccgatttttagctcagtgtggtgaagcatcggctgtggatgccttgagggttcggttgttccggttgtctttgtctggatcggctttcacttggttttttttctttgccatatggatcgattaacagttgggctgattaggagaagcattttcacagctatttctacagtggggtacatgagatgaaattgtctgatttaacagcaatcaagcaaagacatgatgagcctgtgcatgagtatattcagagattgagagatgaggaataagtgctacagcttgaagttgactgatgcccaattagccgatttggctt

SEQ ID NO: 15649 - DNA, 1904 bp, Oryza sativa
  unsure (1)..(1904): unsure at all n locations
aactggaccgtacctagaaagatgaagttgagtagtagtgttaaaacacgcggnagctattaggcgtgtaactcggcccacggcccacgcccagcccccaccacgtcgtatcccctccttttttttcgtttttttcttttttcccgggtgtatttcccttttttgcgatttttttctccttttctgattcttttttttttcgcgccaactagcaagtttttaatcatgacttgaaatttttcaaatctggatttgaaagttttcgatctcgagttgaaaatttttaaatctcaagttgaaagttttcaaaattttcaaatttgaacttgaaagttttcgaatctttagatggaagtttttcaatcccaagttgaaagattttaattccgagttgaaagttttcaatcccgagttgaaagtttttaaaatctcgagttgaaagttttcaagtctcgagttgaaagttttcaaaccctagttgaaagtttttaaaatttgagatgagaagttgaaagttttcaaattttgacataaaaaattcaaatttcaagttaaaaagtttttaaatctagattgaaagtttttaaaatttgactttccgtgtagatctgtatttaatcttttacttgaaaaaaattaggacacgaaaaattaccaagaaatcaaaactagttatgacgctaatcacagcgttaatcgtgtttttattccgcgctaatgacacgtggcctccccggggtgaaaatggcgaaaaaagcaaaagcaagcgatggcctgggaggttgggccgcgtgcgtgttgccggtgcacacgcgccaactaggaatctccgttaaaacatgggttgtttttttggaaaggccaaccaaaaacctgaaagcccataaccttaaatactcatgataattgataggaataagttcatttcaagtccctcaaaaccggtgcaatataggtcccatggcggtttggacagcggttttaactcacgtggcgtctattgactcgatctttttctgacgtggcattgatgtgacatatgaagcaaaatttaataatttaaaaattaaaaagaagggcccatatgtcaatgcctttccctcgtagcagagccagcggcctcaacaggggaatccagcagctgcggcaggaggatgaggccgacctatccaggcggagtcgtggcacccggaggagtcaggcggtgggggtggtccccctggtcgatggcggctgcggtcaggtccaacaacgacaagggatagcgagaaggcagccaacgtcccaggtagagcccggaggtgcggcgaaggggacgaggccggcgggagcaaataccggtaaccgagatccgaacaggacagcacggtggaggaaaagcagcaaagttgggggcgccgaagccatggaggctgatgccaacagtgacctgggtagagaaggtgtggaaggcgggacgcagcgatcctgctgatggacgacgcatgttggtgacagagatgagctgccgagagctaacgggggcctccaaatctcggcgatggtgcagacgagacagaatggagcagatcagcacaaatcctagcaatgctgcgaggcagcagacagagcgggatgtcctggagctgttcgtcggccgcacaccagtcaggtccaccgaaggcccctcctcgccggttgcccacaccagccgcgcactggtgagttgagttcactggattcagatcggtgccactccttacaaatggggctgtgccaccgcaacagggcctcaccaacctcaaggctctctccgtgctcggcagcgtcaccagnnnnnnnnnnnnnnnnnnnnnnnnnnnnnnnnnnnnnnnnnnnnnnnnnnnnnngnnatgagggtctacaattcacaaannnngacatca

SEQ ID NO: 15650 - DNA, 851 bp, Oryza sativa
  unsure (1)..(851): unsure at all n locations
tgaattngagcttnnnnnnnnnnnnnnnnnnnnnnnnnnnnnaagcaaatcgtctacttgcctcttgacttctgccaactcattggctgccattctataaggtctcttatggatcggaattgttcctagtactaaatctattctgaactctatatcccttttaggtggcataccaggtaaatcgtctgggaacacatcgggatactcccggactataggaatctcttccaaagtcatttggttcagacttgaccttaaagactcagaagacaatgcatgaacaattacaacttgaccatcattgctggtgagagttacttttctgttggcacagtctatcacacctttatatctggctaaccagtccatccctaggatgacatcaaggtctttggattctaacaggataagattggccagaaatgttacttcttgaatttctattctgacagaggggctacgttgcaaagagagtgcttgattacttggggtactaaccatcaaaggacgtctaagatcttctacttccatcccatgatttcccacaaaactcatagataaaaatgaatgtgtagcaccagaatcgaaaagcactgttgcaggaactgagttgacaaggaacgtacccaaaatcacatctggagcaccttgagcttctgcagcggcaacatgattgacacgggcctttaatgctggtgcggtagagttgctctgggcagggacaaccttcacgcgtcggggcttcggacacttgtcagagtaatgtcctgggtctccacagttgaagcacaccccgggcttgctgccttgctccctcttggcaggctggtgctgtgttggagctgcaacag

SEQ ID NO: 15651 - DNA, 6464 bp, Oryza sativa
  unsure (1)..(6464): unsure at all n locations
tggaatannnnnnnnnnnnnnnnnnnnnnnnnnnnnnnnnnnaacttcctaacactcaaaagcaaacaaacgcatgcacttacatcccaccactgatgtaaatcacatgcgagacacacacaaccaaacttaaacaaacaaaccaacacaacgatctaagacaacagcttgacaaggcactctaggtcttccgggcatcggagttgattgaaggctcgttcggctcgtctccatcatcttgagtagctccccactcgacctttgaatgggtgcgcttcgattcttctccttcatcatcacttacattgacgaccggaggatccgctagggctagggtaacttctttctccgccacacggacctttggcgccatttggtagcgagggacaaatagagctctcttccttgccgtaagacgaatcctggccttctgcggtggtgcttctcccttcaacgcggctagttccttctccaaacgatccaccttgtcctctagcttgcaaatcttaccacgattccggtcttcacgatcttgagctgctaacacagtctccgcgcgggtctcatccatagcccacagcatctcaaccaaatgccttgtggtagcatcattctcaatcctctcagtctcaaggtagctgccacggtcacttccctggggttggcgaggatggtagcgatactcagtgtcggccaactgatcactgtagcgatcgcggagctctcctatggcaatccttgccacctcctgacatgcatggatgtagtttcctcctccagcttcgaacatcactgatgggatatcttcactattactgttcaaggtgactttgactcggcacttttcttcgtgacgatcatgagaaatctaggcatacaaaggggcagtcccaaatcctatggcaaaggacatcgtacgcaactcctggacaaatccctcaacaccaaacaggtactcaggcttgtagcgcggcatctaaagacaagtgaaaggagggagttatgacatttatccaattaatagcacaagtttttggattaagtaaaaggtaagtaaataaagtaaaccaagcttgcaagataagttgaaacaaggtcacaaattttgtacttttgaacaacagattccaaaagaaaataaaagaaagttataaaatcaacatgctaaatttatttcattgcagcaagataaaacaatgttgtaaaacatttgctggtaaatgagccattagtaccgtaatagatgtacagtactaacaacactggaataacttttgaatgagaaccactaaaagagattatgaagtgcatgtgctattagtttggtttaattaaaaaaaaagaaagggaggagaacagttctacttttccaatagttttagagggcttctatgggtaaccatttggcataacctagggtcaaggggctctgataccaacttgccacgcccggaatttctatccaaaattccaaactcttatatgtgtgtgaaccctcgtccaagaatcagccgaggcacacaataacaaattgataatagagtacaattattactctaattaataagtgaataaaatttcattacagaggtagatagttcctctcaatcaataaagatctaagcagcggaaaaataagataaacggcgcagacgactccactccacaggcagcttgaccagggctacacctaatcctccacaccatcagcatcaccgtagaactcttcctttgatgaatgattgcaaggtgagtatatgacatactcagcaagccatgcagcaaatatgcaagtgcacaaggataccaaagaatggcataatataggactcattngcaaaagcagcatttagcaaacatttgagaattataaaacagtagagtaattaatcatcaattttaatcaacactaaacagcacacccatgctgctcaggcccaaccatcctgaacaaccataccgggctgtacagatctatctccaaaccaggaatataccattccaaaccaggagctaaacaaattattaccagttatagcatcttttattacggtgagaagtgtgaaactaatcacgaaagacattgttagacccgcccataaccgcgggcacggctattcgaatagttttactctggccagacgtgtaccactgtacccacagcgacccccgtgggcttatctccgccacttctcagtctggtgctccgcaatgaaccatactatacaaaaggtaaagccgttgcccacgctggcttgtggttggcacggttaatgtttcacaaccgaaactcgtgaaccggtccttaattgtcatgagcacgactctcaaaaccatgtgctcacaacccaccattatcaaattttagttggcaagtaattaattaaccaatcacgattggccatcgtgagctatcattaagccatcattaaataatagtgagtcataagttatcccaatagtgtgctaatgtttctatgcatggctaagcaatcatatctaatatctagcttaaccaatatatatagcacaactagtcaagttataataacctaaggtatcaaggaataaagtaatcaagaacaaaagggctataacaaacaataggttaattccacccaatgacattcgaaaataaatacaatagttgaatggaaacaatagctttaaacgggatcaatatgctcaaagggttgtttggaatgtgtgtgacttgccttgctggccttggaactcttcaaattcttcttctgcgaaaacgaactctccggaaacgtcggaatctaaacagaaaggagcaaaacaccaaaacagcacataaacaagcatgaacagtacatgtggatatttttaacatgtagatttcaattttagaaaaatttagagacttgaaccaactaaatccgagctaagatgaattagttatgtatttttaaaaattaaatcggattaaaacacttatatgggtattaattcaattatgacgcaataatgaattatttttgaaaaggaaaagggcattattgcgtcagcggctagggttcgcggtaaaccgggtgcacggcgacggctcacgaaaacaaacggcggagatcgatcctatccaaaacggacgcccaagatcgatggacgacgacgataacgtcaccggtgacgtcaccaccggcggcggctcacggatggacgacgacgatgacgtcagcggtgacgtcaccaccggcggcggctcaagcgtgcaagctcgccggcgaacgacggcgcgacggcacgaacggagggcaccagcacgtagagggcgacgcggcgaactcaccggtgaccaaaacaacggcggaagatccaagaaaggagacggcgtcgagaaagagcggcggcgacgattggcttgacgacgacggcggtgttccggcggtcgacagcgacggcagaggggcggacgaggacggcgacgcgacggcgaccacgatggcgacctccccgagcgacggcgacgactggagcgacggcggcgcacggctggagcggcggcgacgacagcggcgcgaggtctcacggggctagggcgctacggacgacgagagacgaaggcaagggtggcgacgggtagcggcgggcttgggggtccttatataggggttggaaggcggcggcgaaggtaagtctagggttcggaggagagagatcgatccgaatcgaactcgaatccacggatttccaaacgaaattagccgacgattccataagagaatagatagaggggatcccggggatcatttcccctctattaatttcatcggaaacggaaaggggcggcgcggctcggctagggttcggccgggcgacggcgcgaggaagacgacggccctgacaggtgggccccacctgtcagcggcgaacgcacgcgcgggcggactgggccgactgggccgaggaagagagagagagggttttgggccgactttcggcccaaagccaaaagagaacttttaaaaccttttctaatttaaattattcatgaaatgcaattccatttattaaaaatacttccttagctcaaataaatcccagaaaaatctaggaattatagaattaagcaaagtttttaatgaaattttatctggccccattttatattggaattttttaattaaaattagatcttctcttctaggcttttaaaataaattctaataattccaattaaacaacaatttatatatttaggatttttagggtgtgacaaatagtttatattattgaccgaatacaatagatcatatataaagtggtataaaattaaaactaatttaaaagatgatgtttagagacctttgatttgatattttaatatattataggtctagcttaattgcatacccttccgtacacagtatattgtgcagtattatattttctttattttttatattatacgaaatctattttagacggtcgtgttttccaccagtaataagtacgcatttttttggctttattaatttttatagtacgtagatgtttttttttcttccggctaactgtaggaagcttcatttgtcttactaggtgataccccgcgctttgctgcgggattcactgatgagtatatgttaaatattgtcgaaatgatgaaagttgaaatgttgagaagaaaaatgtgagaaagatgatttgacacatacttgtggatctttataatataatattgtagatgatatgtaatgcttgtatgggatttaaaataggctagaatagtaattgctagtgagtgaagatatggcatggttgcatgggattttaaatgggctagaatagtaattgtatgggattttaaatggactagaatagtaattgctagtgggtgatgatgtgacatgcttgcatattgagttttagttttaatgggtactaactataaagaaagtacagatttttttcaattgtatacttgcgtacattcttttatgttttctttccttttcccagccaccggttccatattttatttgtaaaaaaatgtatcacatttttaataatagatctaatatggtttaaattagcggcctagaaatatttgtgggagtgccacgtggtgacaatagattttttaaaagtttaatggactttttttaatatataacagatagatagatagattacacgtgctactttgtggcttgtggctactaattgtggtgcatataaagcatgcagttatttttttttctttgggattatatgtgccgatcctaacataaaaccggaacatataggtctaccgtagatgcgctgccatgctataaatactgcgacggatcatgcaagatttgccatccaacaaaacgtgggtagtgagtagcagtagtagtattcagttgccgtcaatggaggattcccctgtggcagtggccatcccctggtttgccctcgctgccgctacggctgtgctagcaggagctgcttggctgataatccgcgcatgcaaagctgatgaaagctgctgcaggctgccgccagggtcgaggggcctccccctcctcggcgagtcggtcgagttcttcgcccggagcccatcccttgagttgcttccaggaattccgcaccccctcgagaggtgactgaacaatattatgcgtaatagtttgtgcgttccttcacatttcacttttttaagcttttcggtggcctccaacgtgcagttatattaattgttctggccttgcatatatatgggcctctttctattaatcataggctcccaatatactccatcggatggcctaatcagctaaagaaaaagctaaattttgaatttttaaacttaattttgagattgattttaagatattttcaatgtagtttcttttttagcattggcttttgagtcaccaagaacacatatataaaagttttacttacaaatgttgaatttgcatgtgtgaattattggcatgtccatgtggtgtttttagattacccaagtactatattaagtcacataaccaaattttgggacttatttagtcaataagaaatgtgagggactaaattgactctgaaagaagaaattaaagttcaaggatcatatatatagattgttcactctataatctaatggaccctaagagcaaggctaatatctaagccagctacgtgctagctctaattttatacatgtcatatataaatagctcaagagataacttttacaatagaagctctatctacttaagcatattttacttagaaattttattttattatactttataggaaaaagtacgaattaccgtactgaactatcgcggtcgatcgaattaccccataaactaaaataccagatattttatatcatcaactatttaaactagacaaannnnnnnnnnnnnnnnnnnnnnnnnnnnnnnnnnnnnnnnnnnnnnnnnnnnnagctataggttcacaaaanggnnntcaaangcccg

SEQ ID NO: 15652 - DNA, 2054 bp, Oryza sativa
  unsure (1)..(2054): unsure at all n locations
caccgcagacgcacgttcaagaagatgaggggggagagaaagaaggggtagggattttgacaagtgggccttagcgattttgttagaaaaaaaaattgctgactagactgctatgtgggctatttgaaccctaaaccactcgcaatagtgaggggggttctgtctgtttttttgagtttacgggggcaattcgatcgaggggtaattatactttcacctttattatatggtgggtcccactatcctatctccccttcctttttttttgtcctttttgctcttgaagagcaatgagtggtggatagggtctttggcccaccatgagttagagattgtggtagaaccggcgcttatttagtcgtctttttctttctctttcttcctctctctattcatactcacctaaataatctcattcgatatttcaatataagccagctgagtaggattgttaattatacctacctaagcatacgatattcatggatggatgtatatacatgctaattaattggcataaatggatcaattttctgcaggtacggcccaattttcaggacaaacataattgctcaagacatgatcgtgtcccttgatccggagctgaacaacttggtgttccaacaagaggagaggctcttccagtgtggtacccgaactcattcatgagagtcttcggtgcagatagcatcatcacgacgttcgggtcctcacacaggcacgtcaggaacctggtcctccggctcttcggccctgaaaacctcaggcgagcaatgctccaggagatgcagaaacgggctcaggccagcttgctctcctggcttgatcgtccgagcatcgaagtgaaagaagaagtctcaagtgtaagcatgcacatatatgcatgacctcaattatgatatatagtgtacgacatgatatatcattggatctaattgcttgtttagcacagtagttaaaagtctaattaatatatgttgtacattttttaatattatttataatcctggcagatgataatattcagcataatagcgaagaagttaatcagctacgactcttcagcatcaaacgggaagttgtggaaacagttcgatgcattccttcaaggattacttgcaggtaaacatataaaatatatagagtggctttacctttcaaataatgtttagatagaatatgtatatacacgatcgatcatgacaatcaattcgatcactgtatatatatgcagggacgaaaaaatgtcatgaggatgttgagagaattgctcgacgagaggaagaagaagacagcacatcaattggaaagcatcgacttcttcgatgctttgattgatgagctgaagcaggagaagcctgcagtgagtgagaacgtcgcgttggatctgctcttcttgctgttgttcgctagcttcgagaccacctcatccgggatcaccgcgatactcaggtttctaacggacaatccaatggctttggaagaactaacagtaagtgcaaggaaattaactactactctgatactacgtactagtagaactagctactgatgctttccttctgtatgtacattgctctgttgttggatatggacatatgctttctttcctgaaaatttaattagtatttgtggcgatgtgttagaaataattaagacttaattattaaagtattgtgctatatgcatttgctgataaaatgatactaattgatgccttcaggaggagcatgatcgcatcctgaaacgaaaggccgatccaaactcccaaatcacatgggaggaatacaagtctatgaaattcacatctcatgtatatgcatattacctttcagtctttttattactgcttgcttaatgcatatttgtaagcatgacttcatatnnnnnnnnnnnnnnnnnnnnnnnnnnnnnnnnnnnnnnnnnnnnnnnnnnnnnnnnnnnnnnnnnnnnnnnnnnnnnnnnnnnnnnnnnnnnnnnnnnnnnnnnnnnnnnnnnnnnnnnnnnnnnnnnnnnnnnnnnnnnngcgatgaggcaatatcatcaatcccatg

SEQ ID NO: 15653 - DNA, 2370 bp, Oryza sativa
  unsure (1)..(2370): unsure at all n locations
atgatatgtnnnnnnnnnnnnnnnnnnnnnnnnnnnnnnnnnnnnnaaatttttggcatacatccaacttcgatcaattgctacaaaaaaaaaacaaattagaggcacatattataagatcagtattgcaaaagtaagacgtgatgaaattgctcaattaatgatttatattactcatttgattgatccattttgatcacttttgggaatttaatttctgttttccttggaaaaaggacaaaaaaatcgccccctacagcctcccaccaaaatagtgaacagtgggatacagttacactaggtggtggggggtatttatactgtgcaacaaatatctgtaacggccctaaaacaatcaaccgtgacgggcatacaagtaatctctatcgggccttaataaaacgccgtcaaaaaagagtgtcatctgtgacgggcaataaacttatctccatcgggcctctagttggagcccgtcacagatgaccctcatctgtgacgggcttcttttagggcccgattgagatatggaaccctcatctcaatcgggcctcaactatagccccgcacagataagtgtcatccgtgatgagctttagttttatgccgatataccatggttgtgcgaccatatctcaatcgggcgaaacttcgggccggatgagaatacttccttgtgacgggctgcaaattccagtcttgttatgggccgtcacagatggaaagatctgtactagtgtataattaacatatgtaaataccacgtgcatgatttaaaacctttaaaaattctaataatcatatataactagcatatggatgatttcaatttgattaaaattctaataatcatacataattaacaaaaaaatctaataatcatatataactagcatatggatgatttcaatttgataaaaattctaataatcatacatatttaacatatgccatacaacaattgatttgtatggatattcagtacatccaatatagtttacatcgtgtacagaacaattacggcaatacatcagcggtgacggttgaccgcacgtactttctcctcactattgttccttccttgtgatcgctacgtgagtaaggggtgtcttcatttgataggaggatgctagggtcaattgtcactatgaaagggggttgcccatcaaactgatcgtaatcctcgtcagtcttgtcctctactccaacgatttttctttttcctgggagaaccacgtggcgcttcggctcgtcaggccctttgccctttttttctttgctagacatgtccttgacgtaaaaaacttgggttacatcattggcaaggacaaaaggttcgtccgagtatccaaccttgttaaggtcaaccgttgtcatcccactgtcatcaatcgttacgcctccaccagtcaacctaacccattggcaccggaacagagagaccttgagaggtccatagtcaagttcccatatgtcctcgatggcaccgtaaaatgtgccagttgtactatcgtgttccatggcatcgatacgaacagcactgttctggttcgtgctcttcatgtcttggaccctcgtgtagaatgtgtacccattgatttcatatccttggaatgtcgcgatcgagccagatggtcccctcgccaggaaggccagttgttggttaatcgtctcattacccatgagatattgtttcagccacgtggagaaagtatcaatgtgatgccttgtaatccatgcatcggacttaccgatgtttctggcgcgaactagagccaagtgctcctcgatgtagggagccaccaatgaagattgttgcagaaccgtgaaatgggctttatggaataaattgttgtctactgtcattattgctttccttccgagagtcctctttccccgtagtctcccttcatggcgtgattcaggtaccccgattgggcgaaggtcttcgataaattctacgcagaattcaatgatctcctctgttccataccccttggtgatgcttgcctctggacgagcacggttacgaacatacctcttcagaacgcccatgtacctctcgaaaggaaacatgttgtgtaggtacaaaggaccgaaaataccgatctctttgacaaggtgacaaagcagatgcgtcattatattgaaaaatgaaggtggaaatatcaactcaaagctgacaagacattgcaccacatcattgtgcagggcttctaatctatcaggatcgatgaccttctgcgaaattgagatcatgaaagcacatagctttgttattgttgcccggacattgtttgggaggggaaccgaattcctcnantctannggggcntgtggcccagcggagttgcattcaatnngggccgcatg

SEQ ID NO: 15654 - DNA, 1107 bp, Oryza sativa
  unsure (1)..(1107): unsure at all n locations
tgccccttataaatcactacgnctnnnnnnnnnnnnnnnnnnnnnnnnnnnnnnnnnctctttatgagaaagcgttcccgctttcagagcaatgttcaaagaaagctcatgaccaatttctagccgaccttgcgagcattctaccgagtaacaccacaccgctcattgtcagtgatgctggctttaaagtgccatggtataaatccgttgagaagctgggttggtactggttaagtcgagtaagaggaaaagtacaatatgcagacctaggagcggaaaactggaaacctatcagcaacttacatgatatgtcatctagtcactcaaagactttaggctataagaggctgactaaaagcaatccaatctcatgccaaattctattgtataaatctcgctctaaaggccgaaaaaatcagcgctcgacacggactcattgtcaccacccgtcacctaaaatctactcagcgtcggcaaaggagccatggattctagcaactaacttacctgttgaaattcgaacacccaaacaacttgttaatatctattcgaagcgaatgcagattgaagaaaccttccgagacttgaaaagtcctgcctacggactaggcctacgccatagccgaacgagcagctcagagcgttttgatatcatgctgctaatcgccctgatgcttcaactaacatgttggcttgcgggcgttcatgctcagaaacaaggttgggacaagcacttccaggctaacacagtcagaaatcgaaacgtactctcaacagttcgcttaggcatggaagttttgcggcattctggctacacaataacaagggaagacttactcgtggctgcaaccctactagctcaaaatttattcacacatggttacgctttggggaaattatgaggggatctctcagccctgagcattcaggtgttgtttaacttaggtcctgtctctgtgacaaaccatgtatttattatgtccctacacatgcataggtgagtgaggatatgttaaacctgactcaaattnnnnnnnnnnnnnnnnnnnnnnnnnnnnnnnnnnnnnnnnnnnnnnnnnnnnnnnnngttagataaacaatgcgcgg

SEQ ID NO: 15655 - DNA, 636 bp, Oryza sativa
  unsure (1)..(636): unsure at all n locations
tgggtacnnnnntttgaatttcntttcgannnccnttgnnnnnnnnnnnnnnnnnnnnnnnnnnnnnnnnnnnnnnnnnnnnnttacggccaagttcggtaagagtgagagttttacagtcaagtaaggcgtggcaagccaacgttaagctgttgagtcgttttaagtgtaattcggggcagaattggtaaagagagtcgtgtaaaatatcgagttcgcacattttgttgtctgattattgatttttggcgaaaccatttgatcatatgacaagatgtgtatctaccttaacttaatgattttgataaaaatcattaggggattcatcagagctaaacattaataatcaatcaagagcagttcaatttagctaagtagtttgccctggtttgaaaatttcctagctcagccactgtttgcgcccctgcggtaccgaccgtatccccttatataaattgaacattacaatcaatgagaatcaaacctctctcgcacccttgtaccgcaacataaatcatgcaactttaacagttcagtcaagagcagttcaatttagctgcatgaatgtttgacatggctttttccaagagccaagccaaacaccgattctggttcttttncaagtcaaaccacata

SEQ ID NO: 15656 - DNA, 9721 bp, Oryza sativa
  unsure (1)..(9721): unsure at all n locations
gtgatgaagactcttnnnnnnnnnnnnnnnnnnnnnnnnnnnnnnnnnnnnnnnnnnnnnnnnnnnnnnnnnnagtatgctgaggtaagttctcatcggctagatctccttttctcgcatcagattgatttcccctcccctcatcttgttttcttcttctctattcttgttcgcatctgtagcatctgtccaatctgattgcgattccaagtctatcgcatgaggaacattatttcctcggtccgattggcaatctagaccctactgacttcatcatcggcaaaaccaatagaatcccctttagattagccaaccctaatctaggtcactggaggaacaccttcaagttttggccgtctctcgagaaaaccacccctgagaagagttggactacatggtacaagcgtgtatcggctagcaagcaaacacattgggatgaaattggaatcggtcaagcacttgccctcactatagcaaattcagctaaagatgaacccttaatggccgccgccacctacttctggtccaatactatcaacacctttctattcaaccaagggccgatgacaccaactctgatagatattactatgatcactggtctagatgtatcctcattggctaatcccatgaacctgaacaccaaaaaccaatacgatttcaggaccaaaagcatatgtggttggtctggatatgtggcagcatatatgggctaaggatctattactcctcgagagcatgtggcctttttacttatgtggctagaaaagtttcttttctgcgaatccagctgtggccctacaaccaactgacagtttgcagccgaagctcttgtgtcaaaaagagaatttcctctaggtaaaatcctcctcggctacttataccaaatgctgaacaatgcatctgccaaaatagccgtcggctcggtggttggagcaggtggaccatggtggttgctacaatcttggctcaacttaatggtcatgaaagttgtcaatcggccatcagtgacagaagccgaattcccaaggctggagccgattgtagaagatggtgaagaacgcactcatcgtggatgcatgtcatatggagaatatgcatccacaccaaccgatgccggggcaaaactatcagctgaactgctcaaggttggttttgcagtttttatgagggctttcagaaagatgcccgggtctggtttccctatgaagacttagcagacattcagctcccgttggactttagatttgaagatatcaatcatgaaagataccaaaagtccagggaagttttctcaactgcaatcagcccatgcatcctacctgtcggtattcatcaaggaagaaacatccaagtctcttataaattctatcacccaatgagatcagccagacaacttggaatggaccaactcccaatcggcttatttttcgccgataagatccagtgccgaggagaaatttcattaaccttgatgatggattggctgcttaatctccaaggacctcctctgggcagcattgaaaatatcgagctggcgggattcaagagcaaaaactttgacagatgattgggtgaatggaagttgcatctattccaccaaccggcctcgatgtacatgacagatctcttccctgatgttatacctcaggtaaaccttgtcattattaatctgaacaattgtcagccgattcataacttgactaatcttttatttatattttgcatacaaccgaatcttcccctccacatcaaagcaacagtggcagagacactgaatatgccccaggtctgattcccaatggaggtgggccatctcctcccgtcatcggctatcatacccctaagacttgaactcttctccaaggcctaatcagagaaccagccgatgcaggaaagaagagaagaaccaggtcatcggctgtggacacattggctccagccccaaagaagaaggccaaactcaagaagcctaaaccaaccgatgacctgcctgccctagatccatccattgaacaagctctggatgaagaagaaatcggcgaggatattgaccaagccgcagatgaagtaagcgatactgaaagaacccatcggcttcacctaagcaaacttctccaactccttctgctccagtccatttttcaaaggtaagcagctttctttttgcaatcccctcacttatagccgattactcatagattttaaggttgcagaagaagaaaattgctatgaagaagaagtcggcagcaccaattcccaaaccggctccaccagtaagatattcttaattcttttaatagtcgatctcaaccgattttccttaatacttatctttttgcagcctcctcctccttcttctcctattcagcaaccatcaagcgatcacactccatcggctgcagggagttatcatgttgaagaagaagtacaaccagctgctcctaccatcccagtaagtcttgtctataaaaaacttgaatcgaccaaataactcatgttgagactcaatctttaaaattccttcttgcaggccttagcccatctgttctctttcgatattaaagattatcttgatgaagaaacagaagaagacactactagcaagtctttagctcccttgtccgataatgtgaagaaaacccttgaagacatctctcatcggctagaggcatcatcattagacagcttagtggtaaattgtgggccaattaggactcggttacatgaggttcaagccctaatcccagatgaactagccgatgtcctcactccggctgtctaccttgagcagcatcaggagaaagccaaactaagactagccgaacgtcgggagcgcaaggatattgaagccacaatccaagccaatcggcagcttgtgcacgaagagaagtccaagcttgatcagctatctgagggcccgatcaaatccaacattgatcggctcgaggctcacaagattgagctcttggcacaacttgaagaatgcaacaccgagctggatatggaacacaaaaagctggccgatcttccaaaatctgtcgaagaacagaaggcaagactaaaatcggctatcaagaatgttgctgatctcaccaagtctttgaaagtcattcctagaaccgacactcaagatgcccaagccattgaagaagtagaacaaatgaggcaaagggctatttcagctatccaacaatatttgtctcggtgactttctatgtaatagaccttagaaatttttgtaatcggctaagatactctggtactttattgtcttgacaatcctttgtgccgattaatataacttctaaatttgctcaaaaattttcatttttcgtatatatgtgcccccctaattttacaatgtcaaaagcattgctaaaattataaaaacaactaagggcgatataaccatatcgaccatctgtacatcggcaaaccacaaccgattacaatatgaaaaacaactaagggcgatataacaatatcggccatctcaaggcgatgcaaatacattggctatcatgtatcggcaagcatcagccgatcatgcgttaacccaaacacttgggtaatatttcttcaagtacttgccatttagtgctcttccataaacttctccatcgagtccttgcaacatgtaagctcccttagacacaactttatagatttggaacggtccttcccatttcggcgaccacttgccaaatttgctatcccgagtcccaatcggcaaaatcaacttccatacaagttcaccttccgaaaaatctttgggcaccactttcttattgtaatgccgagcaactcgctctttatccttggtaacctttgcaagggctcgcaaccgtgattgaaccagatcttctctctcatcggccataaggttataatactcatcggctgttaaattattttgcaactccgttctccttgagccgattctaacttcccatggcaaaacagcctcatgtccataaacaagcttataaggaggaacttggatcaatccatgacaagccatccgataagatcataatgcttcggccaaccaagtatgccattgccgaggataatcagaaatcttcctcttaatcaatttgatcaagctcttgttagatgcctcggcctgcccattagcttgtgcataatacagtgaagaattcaacaatttgatacccatgctatcggcaaactgaacaaactcatcggacacgaaaattgaacactgatcagttgtaatggtttgaggaataccaaatcgatagattatatgctcttgaacaaactgtatagcatccccagaatcaactttcttcaaaggaatcgcctccacccacttggtaaaataatcggttgccaccaatataaacttatgtcctttactcgatggtggattaatcatgctgatcatatcaattccccaacctctaaatggccatggcttaatgataggattcatagccgacgccggtgctgtcacgcccagaaattcactagtaatttccgaactaatttgtgcataaaatcctcgtccaggaatcaaccgaggtacacaaactgataatttaatatacagattcatcatcataataacgttacatacttacaaaagaaaagagaaaatagtagtggaattacggtctagcgaagctccggctccactcccacaggcagctcaactggggtataagccaaacgtcttctccttcgcaacttgtcttcaactgaggtttgattgattattgcaaggtgagcatatgacatactcagcaagccacacagcaaatatgcaagtgcacaaggataccaaagaatggcataatatagggctcatttgcaaaagcagcatttagcaaacatttgagaattgtaaaacagtagagtaattaatcatcaatattaatcaacactgaacagcacacccatgctgcacaggcccaaccatcctgaacaaccatacctggctatacagatctatctccaaaccagaaatgtaccattccaaaccaggagctaaattaattaccatcaattaccaaattattattaatgagtagtgtgagactaatcacgaaagacattgttagacctgcccataactgcggtcacggctattcgaatagttttactctggccagaggtgtaccactgtacccacaagacacaactccacaatatgtcaccatatcatcatgtgcccatgctgaacatgtcaccatttgtgtagttgtgacaagacccctcgcatagctcaactcaaagcagcgcacctttcatggatcgtagtcaccccctcaaaaaccagaggcatggactccccagcgacccccgtgggcttatctccgccacttctcagtctggcacaccacaatgagccttgctatacaaagtgtccagccgttgcctaggctggcttgtggttggcacggtcaatgtttcacaaccgaaactcgtgaaccggtccttaattgtcatgagcacgaccatcaaaaccatgtgctcacaaccaaccattatcaagttttagttggcaaattaattaattaaccaatcacgattaaccatcgtgagctaccattatcatgtccatcattaagtaatagtgaaacattagttattccaatcgtgtgctaatgtttctaagcatagctaagcaattatactaatacatctagctgaaccaatatataaagctcaactagtcaaattataagcccaaggtatcaatggatagagtaatcaatgcaaagtggccataacaaaggaatagtttcacaccacccggtgacattcaaaaataaatgcacagttgaaataaataaagaatttaaatataggatcaacatgctcaaaggaattgtgtttgggatctgtgtgacttgccttgcaataaaaggtcttccattaatcttcttggatacttccaacgcactcacgatccttcgaaacgacggaaacgacaagctaacacgcaaaacgagaaaaaagactaataaaaaccaaataaacaatacatataaagtaaacaaacatgtagatcataattttagatgtattataagacttgaacggcttcattctgacttcatatgaattaattaccaattttacaagaataaattttaatatatagatctttattttatacaacttttgcaacttggaccacattaaacccggttacaatgaattaggtatgaatttttaaacattaaccggattaaagcatttatatgggttttaattgaattatggcgcaataaagaattattttgaaaagaaaaagagatttattgcatcatcaaggacggtccacggtaaaccgggtccacagaagcggtccatggaaccaacggccaagatctaattgacctaaaattgaccgaatcggacggccgagatcgatccggtctaccacggcaaaggcttataaggcgctgacatcagcgacgatgtcatcgccggcggcgactcggcacaccacgctcaccggcgaacgatagtgcggcggcgcaaacggagggcaccaacgcgtagagctcggctcggcgaactcaccagtggcttggacaacggcaaacgacgacggatgatgaaggcagcgaggtcgaggcggcggcggtcttcgggtcgtcaatggcggcggtgctccggtgggaaacggcggcaatggagggctggccgaggttcttctcctcctcgcgaacccgatggtggcaacggcgatcgaaggcggcaactgcaatggcggcgctgcgcggctggaccgacggcgacggtggagagcttcgggtcgacggtgtcggcggcgctccggtgatctgtggtggaaaaggagaacgggacgaggacggcgacgacctcgcgatgatgatgaaggagactgtcacgaccgagaaaaatacattttcccgaacgctagtgtattaatccccatcccaggaaaagccagggtacaccacacaaacatgatataaaagacacatctttattatatcgataatatttacattattacaaaggcacttaaggcctgacaatcaaaaataaacagcagcggactagcgggcctacggctccatcttcacaggcgctcaactggggtataagccaggactccacctaggacttcatctccaaagcttctcttactgaagggggggggggaaagattgagcaagaatgagtacaaccacagtactcagcaagccacaccggcagatgcatgattaatgcaagggggtacaaggggtaataatataagggttaggttttgcagtaaacagcatttaaaagtcacttagttgcccaaagccaattttaaaaagacgatcctagagctacacagtattattaatcaaggccgtgcacccacacgaacctgccttaacccaaggcctacgatgattcagaccgaactggcaacccgaccctgggtcccagctcgtcccaagccaacccaggccaaccattccacattttagttgttgagcaaattttaagaattaaaacactaacttgggtacattgctcggcttgcccataaccgagggcgcgtctattcgaatagattatactctgatcagaggtgtacatctttacccacaagacacatcttcctcacgtgtaaccacgtgccacataccaccacggtatacggacggaagacgtgacatagttcccaacccatcctagccataaacaagagtaccgacccaaccccacctacggccggaacccccgggacaggtaggcaggactgagcccccagcagcaggacaccggccctgtgccatgacatctcgactaccgggccgcagctcgtgtagccttcatttgtcctagagatgtccatcgacccccgacttcgtccatctccatccgtgtacttttgtttataaccagactgagccacaaactaagccttacccactagacatgtggaagtacggtagtgcttcgcaacagaggcccgagcttaatccttatagtacccgaggtacgactaacaaaacccaaccacgcacctcgagcccagcctaaagccattttgggggttttgaatagagggggaggtgtgtgtccaattctaacataagccaaccattccatagtgtccaaatgatatgagaattcccaaagtctaaagttataaaaccacctaatgttgcctaattaatcagcgaagcatctacctaaattcatactagtggaaccatgaatagagtacccactagttggggtttgatttatcctagggtgaacaaggtaataataacaatagcaataataataatgtcataacaaaggtaaataggcatggctaaataaaacagtgataacgcgggaatttaaataaagcgataatgcattaatttaaatcaaaataattttataaactgggattcaatatgctcaaggatgatgtgacttgccttgctcagagataacggccttccgaaccttcggcgacgaccgcaaaccacgcttcaggaacctccggaacgacgaagactacgcgaagcacacaagtaaagctacaagcctataaagaagcaataacaatacataaaaagaaagcacagggttctttaggttataacaaacattaggagacttgaacggatcgattcggagctcatatgaccaagatatgatcatccgaagtttaatgctgttacatggagatttgcggattattataattaggttttgcaactataaaacatgtgtaagcgctagcctggaaaagacaggaaggctgcgccgttgacatgcggaccccacatgtcaacctaaaggaccgcggtagaccgagtacacagatacggtccacgggtcgacggaagcagatcccgtgtgtcaaccgaggcgagtggtcgacaaacggactccactagacaccacacgggctgcacacgtggaaaccacgcggctaccgagcgggcacactaacacggtcaccacacgcacaagcgaacgactaccgacaccggtacacgggtaccggggtcgacaaccgcacaacgggcacgggcgacaccgaaatgacgaggacggggcagcgaaggagagatccttaccaccacgcgacgaggcgagggaacgacaacgacgaacgggcgcggcagagacggccgggaatgacggagacgaaaggcgaggggacgacttcggcggcgatccttggacgaaggcgagacgcggctggcgcaacgcttggcgacgcggaggcgaggacgaagacgacgacggggctgcagcggcacacttgacggacgcggacgacggacgagaacggcttgacggagggacgaacggcacgacgaccgggaacgacgagaggatgacgacaggaaccggcgaggaggcgatgagggcagccggcagcagctgcacagagacgaggacggcgcggaacacgccgctacgatgacgacgagggtggcggcgcagcgagacgacgagccggcaaggacgaacgaccgaccggaggagtcgtcaacgacgacgagcggagacgacgataacgaacacaggcggggttcggatggaggggaggcgtggcccagggcaaccttgacgctgcgatgccggaggaggagatggcgacatcggctggcgcacgggcacggctgaaggggttgacaaaagaaccttcgtgaggcgggaggcgagaccgacgcaagcgacggcgttcctgcgaaaccgatggaaa

SEQ ID NO: 15657 - DNA, 2792 bp, Oryza sativa
  unsure (1)..(2792): unsure at all n locations
ggaagcganccgagcacggaagaacaagggaacgncgcgaaaaaggcgnnccgncgnccatggaagncgcccatgaatggcgcagccgtccggtcaaaaatagtggacgattaagggaagattagggggaaaagggagagaaaggaaagggaattaattccccccaattaattttggaatccaacgcttaaatcgcgcggattcgagggaggaacgaactagggttttcacgggagaaaaaggaggccgtgcggaaggaggaaaacgaccggcgcgtgggccccacgcggtcagcgcgcgcagtcagcgcacgcgcggcgcgcgtgcacgcggctggctcggctcggcctggcttgggccgggctgctgggcctaggcaggccgggaggaaggagaagggagtggcctgcccgggaggaaagagagaaaaacaaagggaggggagagggacttggactgcgggccgagggggagagagggagactttggtccagacttggcccaaagggaggagggggattatttttagctttttctttttaataaactttgttaattgttgttgttgtttaataaatattttcggtgctctgaaaattcaagtaaaatttgagggctccttttagaccaaggagaatttaacaaaaattctccggaccacattcgaatttttctggcacgtattttagtgtttgtcaatttcttttcgaattttaattaattctattattccttttagggaatgatttttatttcggaatgaatttatcaggacgtgacacgcaccatctagagcttgtttcacttctccatccttagaagaaccggtcccaggaacatcagcaactaccttcactttgtatttctgaaccaatgtccccttgcaggtctccgtgaatgagctcaagaacttattccatgcttgctgcatcattgtatcaaggtctttttgctgctcaggtgtcaatttatccagagtgatgggcacaatgttggcttcatcaatctcagataaacctagctccgggatcttttctttaacagagccaggaccagccgaggacggcgatgctggcagtttctcggccatggggaactgctgttgtgattctgacttctaatgggtcccaccaggcatgccaaaagcgtgttgatgaaaaacatgatgcctaggagatctgcttaactgtagtgcaggtccaaaactcgccttcgggtatgttagtgtgccagttgatttgatcctgcaatcaacaagaaataaagacaaagaaaccatggttaaatccataaacgatagccgatcggctaggtgccgatgacatatcatttatctttgcgccgatgtcatatatgtatcgatcgacagttataaataaaaaagaaggaactaaatctactcgatcggctatagatattaacaatatatactccttatatcgatatatacttaaatcaagtgattgggatagatcggtcgccatgccgagacagtataaatcacttagatcgaaatatatattaataatgagactatatatgttcatagcatagccgatcagatagatctagcatgtatcggctaatactccgataccactctatattaagatattaaagcaagtagaatatatcaaacaaaagtctaatatacttaaatgcgatttaacatgtcaataaagcatataaaacaaatgtagttaaatcaggtaagatcggctgaaaccacgattctaccctaatcggcgaccaagaatcaggctagagattgagattctaatcacgactcataagatcaaactcaactgatgcaactataagtatgaaaagaaggacaatatctagacaatcaagccgttggaagtttcatagagtggtggataccttatataatctaagtcaacgtcgatatctaatctaatcgctgccctctaccgacagatgttagccgattgtagattagatagcgatattgccagagattatgtaagatatatgataactcaacgaattacataaacaagattagagtatcataaaaatggaagcactaatcccaagaacgcaagccgtcataacaagttttacctcttgttgaagatcgaaaccgatgcagctcaacccgaaagcaagaactagtcgaaataaaactaaagcaaaaagggtggcgatgcgccgagattgtattgaacgtgtgttaaattgattacatggggcttgaggtctatttatacccgagaattacacaacatgtccataacggacacgactcttatctctaacaaactctaagataccataagtctttgcggcagacttttgcctaaacatatctctatggaaattacgtaaaatatcctaactaatagatacaattgtcttctcaggactctatccatgcgtggcaatcatcttgaagcatatcaactcgacctgatgtcgtacaccaagtcgtactgtcggaatcgttcgtatcacctgacccagtctgactcggactttgccgatctcaatcatagccgatccgaactccatccgattcttaatctgtttccgcaacgatcctcatctttgattccgcttcgatctaaccttcctctccgatactgatattactaaatttagtcgttaacacatgccccccaagtctggaatatttggtaatgtttcggatttgccatatatcgactccgagcaagattcgcactctgccgtttcccgaccgttattccagcgctttaaatactaaccgtcgctctcgaaaaatcttcactccgtcacttccgttttca

SEQ ID NO: 15658 - DNA, 2767 bp, Oryza sativa
tgtcttaggccctatttgtttcagcttaagattattataatctagattatagaacagattactataagctggattataataagtcgacatagaataagctgctagctgtttgtttctctgaattattatatgtttgttagttgttagtcacccaataatctaaaataagcacatttagagtagcttaccagattatagtaatttggcttatagattataataatctatcataataagctatatgtttgtttcagcttactcctaataatccagattataataatcttaagctgaatcaaacagggccttagacatacgatggggccatattggcattggctggctgggtgcggagcagcgggttctgactcgcggccaaatcgaggtatgccacgtgccatagctcatggtaatgagagcttcgtcacttccttgtgttaaccttaaaatatttcttccacatatatgatatacaataagaatcaaggatcataaatggaacataaaaagtctcataaataaataagttacaaactcattgatcgattctcacaaaacattttattcataaatcaataaacatagtatgtgatacaatcaactctataattagctctagagcatatcgctaacagcggggacttcagggacgacacatctcgttaagatgtttgatcctgttggcgttgtacctgctcctctcttcgctggtgaggagatcgacgatgcaatccatgtcgaggttctgcacgctccgcgcagcatcgcaacatgcagaatgtagatctgggaggatgatgtgggagcccgcagtcacataccccctgcactcgtgcaggatgtcctgcttctgggcctcagtgcatttccttatttttggttgttgatgagggggtttcttcttggtatttggctgcaccacagcactcacactaattaccttctctgcagcttgtgcgctagcttgttgcgcaacaaggaggatgaggaggagtcctccggctggtgccactctccaggagaccattgttgtaagaggactaggatgtagattactctgaaactttttttgtgtttgggactccaagatttttgacgcttttataaggagagtagagcatccatcctgtgatatatagctagtttcatttaatgttggagatggatgctcaaaatgtatccgtgcatttaagtctagtgatagatagatactctttcaaaattaattaattaatcgaagttcagggaaccagcaagtcagatatagtatatctctgcttcatttatgcatgggaatccatttctagagtattagtaattgtccatggtgcttctatatattgtgtattgcaggaagaaaagcatttccattctctaaattaataagatttttcataaccttcatgggtatttatgtgtgttggacagaaacaagatggtgcacatgcatttattatttttgtagagatgaagattactattcctttcttcccacagtttatttggtgcttgtggaaagaatgttgatgttacctagagtcctagagtgggtgtgaacatttgtttcctataattcttcataatgtattagtcttaagctagaacatccggtcttatggatagtcagattaccaatgttttcggcccacacgaaaatagcccatgaagggaaaatcacaataaccacactttccacaaagtagatacaacaaactagcaggaaaatagagcacaagctatcacaaccagccccccataaagagaatagcaacacatcagcaaaatggtttggatccaatgatcttgttgaaaggatactgttatcaccttgggggggtgtaggcattcttcgcagcggattagtctcatgccagaactttcggtcttatggatggaacatctacctcgatcctgaagctctggtcaataggtaaatggctcaccaaagggaaaccatggcaagcatgatttgcctagagtagatacaatagcgtgtcctctaacgctgtagagatgagagatgagtagatgacaagtaacagatagttggaaaggtagagggcaaagagataaaaaaaaagatagaggttcacgctcaaaacagaaagtgggagatatgtaccaaaaaagaactagagtatccaggagatgaacagaagagaagccacatctgtctatcccaaagttgggggattacaagagagagacgtttcgagtctccgatctgtttatcccaaagttgggggattacaagagagagacgtttcgagtctccgttagttacagtttccctcataaaaatgaaacgtcggaaaggagagcaatcgttgcctcgcccgcttgccttggcctcagccacggcccgcacttgtctcagcatgtgcatgtggcattctcaccaccacctcaaccgctcaacatgtgctcttattagcagtctatttaagttgaggtcttttctcattggttttcaatgtggtattgatctcttaacaataattgtgggcccataaaatttactatgattaatttgggtctacccactttaattctaacaaccacatcattcgagttgcaaattgatctctgaatattatgaaactaattgtgtactcaattgctgcacctaggactaacatgtcttggtcgaagcaactatatatacatatgtgtcttacgtgcatatagttttaactgatcgtgtgtactctcttaattgttgttggtaaagtttattggagcaagatcgcttaccatacatttggca

SEQ ID NO: 15659 - DNA, 2112 bp, Oryza sativa
  unsure (1)..(2112): unsure at all n locations
gccacaattggnacctctcttgcatttacgcctgggtagcttccnnnnnnnnnnnnnnnnnnnnnnnnncaaggcaaatccaagagcaaaatatgatctatttttcaaatcatgtgaaacattgatatctctaatttttgaaatttcatgcatcaaaacctcacaatttttacaatcatcatcattaggaataagagatttcaatctagcaatttcagcatttagagattcaatcataaacccttgttttttatacatcttctcacacttcttattttttgcacttaaaacaaaaatagcttctttaagagaactcacctcattgtcttcacactctgaatccgattcaccatgtgccatgaagcaaataccggagatgttctttcccacgtcttcatcttctgcactctctccatatacatcgcttagtggctcaaaagcggcgtagacttgattcaacatctacttgagattctccttggttttccttcccttgaatgtgctcttggacttgggcttgtcgtccttgttcttgtctccaccattatctttcttcttgcctctcccaagcttaggacaatgcgaacgaatgtgatcaagtgctccacaatcaaagcaacaagttagatctcctcttttcttgtacatgacattgttcatagctcgagaaatcttgtagcagccaaagccaaatccctctcctcgaattgttctagttgctcatcggacatggcattaatcaaatcaagagcgatagaatttgacgaagaagcaccaacatccaaagaagtcgagagagaaaccaaagcactagaattagaatcaactttgcgataaagaatattcatctcatgagttttgagttttatataaagtgaatccaaagtcaaagtggacatatcaacagacttttgaatatatgcaatcttcatctcccaaatagacatgttaagaccattcaaaaagtggcgagaaatctcatattgtgagtaattagtgtcataagccgaatcaacagatctaagatcactcaaaattttattaaatctaccaagatagtcatccaaaccctctcctggtttcatctcaaattttacgtactcctttttgaaaagaccttgacgaagttctttaatttttgtagttccttgatgaaagtttttgaaagcattccaaatctcattggcggtttgaagatgtgaaacacgatcaaaatccgaacgagaaattctactcaataaaatattgcgagctttgcaattgttgttaaatttagttttcaaagcaaaagtatcaatttgttcaagaatcacataaggctaagaaaccttttgacaaacatcataatcttcagccataatgtaagattgcatcttatcacaccaataagaaaaatccaatccatcgaaaacatgggacttagttataaacttgttagccatggctaaaactttagatcggtcaaaatctaaagaagaaaacaagactttgataccacttgtaggatcgaatagcaagaagtaagccaaccagagggggtgaatagttgtagtacccaaaaaccaaaacttttagtggaattaaaagttaccctctgatccgatgtagattggtctgaccggagtagatccgccgatctgaccgcacctgtgctgtcggtataaccggtgtagatcgcctggtctaaccgcccagaagtcgcctctgcctcctgtcgccgtcgccagtctgaccgccatgtatccgccggtctgactggtgtgttgccgccggtttgactgccagtgttccgccggttggactgccgaaccagagcagatgacaactttattacttctgtatgtgtttacaaagtgcaacaacaacactcctcacgaaaatatcgattaaactcgaaaccctactattctgtcaactcaatgctctttaaagcgataccgggaggccacactcttcctctctatttatacatgaggtaggcaggctaaaatcttaaaacaaaacttgtccagaaggtcttattccacttagaaaacttcttgtacagaaaacaaattttcaaaactcaaatggtccaaatttgggattcnttcaaattcgaatttgattcca

SEQ ID NO: 15660 - DNA, 1472 bp, Oryza sativa
  unsure (1)..(1472): unsure at all n locations
tacaagaaaccaactttacaaactccaattgtaccaaatttggactccttccaaattcgactctgcatcccatacacacacaatatctccatcgtatgccatatggaatcttcaccaaccacgtgcattcatcgttagcctaagtgtcccgcatgatatctgaccgtccggacgtcaccatatctcaaagttgactcccgatccatcaccggcaacactcccccgagacatcaagattacctacacatgaatcaaacaagaaaccatattcatagaccaagctatctccaacttgactcattattagcaaacaacagtattacatacgcatagtatccatcttgaagttataaacacaaattatccacggatatccaacgaaataacctgaaaccgaaaccgacacagaatcggccggtcagaccgtgggctagccggtctgactgcttgaagcacaacggtctgaccggcaaccactacccggtttgatcggaccaaatctctagcagtacctattcatcacatgtaaagccaataatctccaaatatcaaaaccaataatctcatatgctaattgttcatcacagaataagagtcaaacacactgtgattttgcattatttacaaattatttttcttttgcaaatatgtcgtttcgcttattccctgaatgaggcttggcttcccccctttttcgttcagacgttcagtgatcctgaaacagagcacgaaagtaactacttcaggacctatagatagccataaggcccgaggccctattggcccggcctaggcacgacacagtccaactcgagttgtgcccttgccagcctggcccaatagtgatgtcgtgtctgggctgctatctcggcacgctgggccgacacggcctgacacaaagtttagggatgcgaaacagacttattttcgaccatatgtaagggcacaacatggcatataattggtggaacacatagctatgctctatgtttgtatgtacttgtttatttccttcattgaaactacatttgtaatcgtggacatcatattgtggactctattgttattatgtactctattcattcacttgcatgtggatgtccttaagctttcaaatgtcagattgttgattgttgttgttgaattattatgttatgaactgttgaattgatttgaagtctgtaatacataaaaggtcatgccgattttttctattgtataaccacaagttgtgttttcaagtatcctatatatttttgttattatccccaaattctacagacatttaagtgttcctccatttagttttgcattttattcactttgttcttctgtcagtacagcatcttgtggtaaccgtccatataccgcagtaaccgcaccttactgcgaggttaccgcagccaaaccgcaaaannnnnnnnnnnnnnnnnnnnnnnnnnnnnnnnnacactcaggcgcttcaaaatttg

SEQ ID NO: 15661 - DNA, 1368 bp, Oryza sativa
  unsure (1)..(1368): unsure at all n locations
aaagattgacatgcagttcacaaaagagttttctcacgacatcagaaatgtgaggattgcactaagcactgatggcatgaacccgtttgataacatgagcagtcgtcatagcacatgggcggtggctgttattatctacaatatcccctcctgactctgtttgaagtgtaagtacatcatgatgccacttcagattcaagggcctaaacaacctgcaacgatattgatgtgtactttcaagccgatggtagaggatcttcatacactatgaacgaaaggcgtccgtatgagggatgcgtacaagcgagaacacttcacatgtcgggctattttgttagggacaataacagactacccagcacttggaaacacgtcgggccaaccggtgaaggacatgaaagcatgtaataggtgcatggcccaaacaggagccaagtggttgaatcactgtcggaagaccatgtacatgcgccatcggaggttcctcaggcgggatcacccgtaccgccgaaataaaaatgcttttgatgggacggtggaaacggatggacgtccaattttcagaaacggatgaactatggaagtgtactttatgtgtaatgcatttgaatatttgctattattatggattctattctatgttttctattatatgctcgatgacttgaggacaagaaactcttaaaatcatatgctcacctcatgttggaggtaaaatacaatcgcatttatatttttgcacttatgaattcttagatattgcagacttaggaatttttcaaattaatgttcacaatttagacataggaatttttggacttaaaaattttagacttacaatcttttgacttaggaattttaaactaggtatattttgagttaggatatatatgccaatgtttaggatttaaagacaggaatttttggatttacgaaatttgacttaggcctgtaggtttttatatattgtgatcaatggcttgtaggtttttatttgttgtgatgaatgtgaatgtgaatgtgaatgtgaaatgtggaatgtgaatgtgaaatgtggaatgtggaacgtggaatgtgaaagtgaaagtgaaagtgaaagtgaaatgtgattgtgaaatgtcaaatgtgaaatgtgaaatctgaaatgtgaaatgtgaaatgtgaattgtgaattgtgaatgtggaatgtggaaatgtggaatgtgcattgtgattgtgattgcgattgtgattgtgaaatgtggaatgtaaaatgtggaatgaggaatgtgaatgtcctgtatggatggggctgtagggatggggtcccgaattcccgagtcanaggagcntgtcaagnnggattgcatgcaattcaaggccgcccct

SEQ ID NO: 15662 - DNA, 5681 bp, Oryza sativa
atggggagagttaataatgattttaatcctttagtcctcttggggacggttgctactaccagttggtctttatggctaagcaggaacaatgtgatttttttaaagaagaaagtctcgtctcctttgcaggttatttatttagttgtgattagctggctccatttacggtctattctccaaaagctgagttaataggatttggttgttgtggctaattattaacatttggaccaagtgatcagggagttttgattataaaaagtaatctagtctaaaaagtgatagtcattagcgtatatgttttgtttataaaatattacgcaggctgtgtgcaaccttgctacgccaggactgatttcaggatggttgtattatcttgaaataagacgatttcattaaaagcttcctttaacaaaaaaaaaggctaaccatgatacaaataggagtggtcaacttggattttgtgtttggaaacaagaataactaacccattattatctagaccaataaattaataatttccatgccttcgattgatttttacttgatctgaaaaaggcacaaaattatatggcatgcagatcattttatagtagactgggaaacctacaagagatctgatcaatgataaaatttgccacttgtaatgtcaactcatctttataattgcactctaaagattggtacaattggcaaggtggtggtggacttcgatagtctgattcctagaactcgaggcccttagagttcacatactcaagatggaggaagagtcaaggattgaggtgttgaaccatctattggagaccatggcgctacgacggtggtgtaactggaggtggggctatgaaaatcatcgggcggtggggaatcagtgaccatgcactgcaggaggattggagtaatggaggaagaagaatgatggttattttattcttaattttttttactagaaaaatatacatgcatgcatgctacgtcagtgcaaaaccacctcaaaccattcttgggctgtttaatttctatctgggttggatacttgataagtgtttctaacccatttttggagttgaataatgaaatctatactttagcaacactagagggtgaaaagtagaccttttcctgtataaaatctacatatatgtgaagtttttagtactaggggttaatctttcttaaacgcggggacaatgttttatatattgtagctccatcatattaaattgctatttttgctacccactaccaccctcacctagggtgtcactttactacctctatccacactcgacttgagaataaagcaatctagaccttacatttgcatctaatggctgaaattatttgaatgacattggaacaattatgcgtcaattgacataatgaaaatgaagttgtatccaatttccgtcatctaagtgaggcctcacactacatcaatctgctgagactatatatgtaccaaatggttacaattgttaactgatctcatattatgaaactgataccctctcatcaagccacttaatgatgtccaaaaatacaatgtcaatgttgcttgcgggctcaccagatgtcagggcgtgacacatccctgggtacagtttcagtgttttgtccttgctctgagctgatgtatacagttcttcacttactgatggatctgtgacggcatcatcaccaccatggacaatgatgaatggtagtgtaacctgcatacattgttgtatattgtagatattttattgaaaagtacttttgacacttgaaagtacggacttatatgttaggcatactcatgtcaaataaacacactcaaaacaatatttttacggacctgacaaagctattttcacaaactcatgtcctactaaaagaattttgctcatggtgattggtgactttcaagcagtatcaacaatctactatacgcaaaccagaccaaattgtaactcatccaggacgtgtacatgtaggaatataattgaatttagttaatgggatggttcctaggtattctgataaatcaacatgaaccaatatattgtagaaccacaccgtaccttgtcaagagtgctttcaatatccaagcttgccataaaaagttcataaccagtctttaacctaggccttcctttatagcaatatggattgtttcttacctgaaagacataacaaaattactgaaaacacaaaaaataaatatgcatacagttcaggtgattccttatcatagagaaaaggtgtctccattatgttccatctttcattagttgaatacacctttcatgtatttttcctatacctcttgacgccactcctcgcttttaattgccttatcaatgacatcttcagtaggaataattttccatgtaggtatcacgttgctaagcttgcttaggattgttatcacaatgggacgaggcttcatatcttctacaatctgaatcgaagttaacatcaacaattatattacataatgatcaacttaatatcgtgtactaatacatatttccaacagtcaattcttgggaacatatcaagctgtgaaatatatcttcaaaatatgaataattaaaagaaatctttagcatttaaccttgcacatgggggcaaccaaaatagccccatcccaatttgtaggttccttcctatgtagcatcagcacaatagcgcctcccattgactcaccaagaaggaacttcttttttcctttgcactctcctctttctagaataaggtgtacacatagaaatatttacaatagaaatctttgtaaacatccaccaatcacatatactaatatagacaacaatttctataaaggtcatatgcaagtgtttacgcttcacaaatgcacaattaagggaccatcttcattattgcaatatgccaatggcctcaagaagtaaaaatatggaaacatggagtacattttacaagtactaaaagtaggaacaaagaaatgttagggttttttttctgctaaagggcaattgtaattgttagataattctaaagatatatcataaaaaacaatcttacatgggagcatcgttctggaaaaggaggcaaaaaatcatagaggataataatggaattgcttatagttttcagtgactcatatatatttgaaccaaatatattatgtgtacgtggttaaagcatgtggttacaaaaaagaaacaaaatatggtgataccaagtaaaattttattcaatatatatactatttggcagtgacaactgacaagtaatttgagataacattttgttgctaatttatatatatatgtttacattttttttgaaacaacatatgtctaaatttaattaaatccacttttataaatacattaattaaaatatacatgagcattgtagcatggttgattttctttctcaaaatacatattttgagtgaccaagcatttgagaaatcaaatactctctccattttttattataagtcgttttgacttttttcttaatcaaactttgttaagtttgaccaagtttataaagaaatatatcaaccattccaacataaacatattcaaaatatattaaatgttagttctgatgaaactaatttggtattgtagatattactacaatttcccacaaatttggacaaagttaaataaatttgactaagaaaaaaaatcaaaacaacacaatatgatatggatggagtacttagtgttctcttgtaattctacaatttacatgaacaaagaaccatatcatttttttgcgcacacaaattgtaatagatcttttttatgccttacaggatgaccgcagagtgatagagactaaacaatgatgcactcaaggactaattaatttttttacaacgatacactcaaggactaattaattttttttacaatgacacaatgtgcaattgtgaagtcatttcaaaattttaaaattcaaaaacaatttcaaccttggacaccatcaccatataagtgagagaaccaccggaaatgattccgcatctaagccgaggttgacaaaaagtgcaaggttttgatagcttatggttaaatagtgcattgtttttaagtttagtatgtctagttttacaactttatgaaacttcatcaggatagcaaaattatttgtttcctaaatcaaataatgagctagctagctagttgattaaattatgctgaacataccacaaacacttgcaaagtagttcgagcaatcaacaacaacatcatcaaaactattgatatagccttgagtccttcggacttcccatggccctgatagtccaatccgtgcactgtaaatccagcctttggcaaccgaacacctgttcctgagagtagcaaatcatcaacatattgtcattaaaatggtgttttcaagtagctaaaagaaactgaatgctaaacaagtacgacatggtattattatttttcaacatgacatataggcatactcttgtggattgtttatttaaagttgtttaacaacattgtgtgatttacctctcattgaaatgctgcattccatggcatatcctaaacattgaaagatatgaaattgtaattaaattagatggtgtaaggaaacaaattgcttatatgttggaataattgtatttgaagttcaaatgtataagagtatcaatagataatgttaccatggcataggaagattagagctttcggttcatggtctaaaggactccattggcatgcaaagagcttcatccctcgtttatttgtaacatattcctacaaccaacataaaatttgaatctcacatcccttgataaaaacaaaataaaatggtgatggtgtttttcaaaattctcttattcagcataatacaagatcgatatcaattgtaacacacaagatgtatcacaagaaaaaaatggcaactggaaacgaactaacctcatgatatttgaaaccatcatctgccattttctctcaatggaagaccatgggaacatatgtagttttatgcaactcagattaggaaatggccaaggaccaatatttttttaatagaacaatcgaagatcattagttactgaataaaaaggatagtttttcaatataatgagaagtcatctttgcgtggtgttccttttgtgcatgtgcaagatcttgaatgtgtggttgaggatgaaattaacctaagtttagtttacattaccttccatagtaaggtcatactaaatttggagcattggccatatacatttttttacaagaaagcattggccatattgaaggcatgtcatacaatcactagcattttcgcaagaatttatagttggaattctaagtaacaacagaggaagttgatggttgcatcccaaatggaacatcaaagaaacaatgcaagttgtatgcataattaccgttaactaattttgtatcaaattctaaattaatagaaaatatagtggcagatccagtattctataattgtcctaataaagtgtttcggattgacctagttacaataagttcttatagtcatcattcttcaagcatgatccaatacaccttttcacaggatagctaattacacctgtggcatcgatgggcccaagacttcccattgagtaacaatgttacaatgtggatgtaaaagtaggttggggcacaccttgaaccaaatacttccgagcaataacctga

SEQ ID NO: 15663 - DNA, 689 bp, Oryza sativa
acatatctttgttatcgttgcccggacattgtctggaaggataccccttattacaactggtagcagttgtgtcatcaacacgtgacagtcatgagactttaggtttgtgaacttcttttccttcgtgcttattattcgcttgatattcgtggggtatccagacggtacctttatgctctccaagcattcaaacatactttccttctctgccatactaagagtgtagctggctggactcaagtaatggcttcctttctcctttggttccggctgaaggtcgccgcgttcttccatatgcttcagatcattacgtgcttccagtgtatctttcgactttccgtgtacacctaggaagccaagaaggtttacgcaaaggttcttagtgaggtgcatcacgtcgattgcgtggcgtacgtccaagaattcccaattgggtaactcccaaaatatagagttctttttccacatcgccgcgtgaccatcttcgctctctataggctggcttccaggcccctttccgaacactactttaagatctttaaccatagcaaacactgttttcccgctgcgatgtttaggcttcgtacggtggttagccttatgttcgaagtgcttgcctttcttccgtaccggatggtttgctacaaggaatcgacgatgacccatgtaaacaaccttcctacagtgct

SEQ ID NO: 15664 - DNA, 1528 bp, Oryza sativa
ttcttagcctcgtacgttgtctggggcaatttgtttccctccggaagaatgttcttgacgagtttcaataaatcgccaaatgccttgtcactaaccccattttttgccttccattgcaagaactccagagtggtatccaactttttgtgcccctgctcgcaacctgggtataacgaagttctgtggtcctctaacatcttgtccaatttatgggcccccttttcactttcgcagtcctccttggcatcctgcaacatctgaccaagatcatccgcaacgtcgttaccatcagcatccctttcctcctcgcccgtttgatttccttcaaatccaacgtactgagcaaagtccggaatattgtcgtcttccacttcatcttcttccatttcaataccttgctctccgtgggatgtccaacaattatagcttggcataaaccccgactcaaacaagtggaaatgaatagtcctggatgcagaatactccttctgattcttacacttattgcatggacaacaaataaaacccctttgcctattagcttcggccactctcaaaaaatagtgcacgccgtcaataaactctttggaccgccggtcagcgtacatccattgccgatccatctacatgagtcgaaaaaaatcgtacacaaataattattcttacaataatgacagtcatacaataattataagataattacaaactgtttcaacagtcatacaataatgacacatctttattcatacaaaaatcataaaatattacaccaaataattcttatttactatttctaaagttttaaactaattttaatgtgttttacttcttttaattttcattttagtttgttttctagtattcaagattaactttcactatagttttccttctcaactattttataaaaccttctttatcaaatcaactaaatttgtatatattctttctaacccacacaaattttctctctcatcaacttacaactaaattttagagacaaaaaagtgtgcaaaacataactgcaaatgtaatatgacaaaaaaaacattggaggatgaagttgcaacttttttaggcacctccgatttgtatgtaattaccaaaataaattcactagaaattttggcatgacctaccctcttttttgaagaaattttgaagcttgctcggcaagctgaagaagaaagaagacatatatatataggggtgggactttaattccggttggtgttaccaaccggggctaaagatccccgagatctaccaaccgggactaaagttacgatcactaaagatcccggggggcctgacaggccctgacagcatttgaaccgggactaaagatggtgaccaacccgggactaaagatcaaatatgcccattacccttttgaaccgggactaaaaatcatctttagcctcggtttttattgcatccgggactattgtggaatttgtccgaccgacgaaagatggtttctccaccagtggatcaaagactccaagtagcctagtataatatttag

SEQ ID NO: 15665 - DNA, 3961 bp, Oryza sativa
  unsure (1)..(3961): unsure at all n locations
gtaggcctcctctctcttttctggtcgaagccaaattcagggagatgggcctcacagcccacgttcacgtttattttcttctcaaattgtttttttttatctatatgtactaactttattttcttctcaaatccggcctctacaccaacaaggctgtacacaaacacaggaggtccttcagtacaagtttgaactttacccaagatcacaactgaaagggaacactaaggctctaacccgaaacaaaacaacaacgaagtgcatcgaccaaaggacatacacggctgcaaacaagaaaagccagcaaactatacccctcaattattttcctcatgttccaacccttagcaaagaagtgcacaacggtagtctccaacagtttgcaaccttctttcatcaagatgctttctccctcttttaataaaacagactactgtctcattcaatatattttcctgaaaatgacatttaattaacgaagttgatttttatgccattgagacaatgccatttctagagatccacatcgcccaacatatagctgcaatccaaataaagagatttagtattttagcctagattaatccaaacctttgaactaaactccaaacaagttagcaaccttatgaggcggtttgaaccagaaaggtaatgaaaatgacacatttgaaacacatctaaccacatatatggcaatcaatgaaaagatgttgtatcgtttcatcttgattacaaaagagcacccaacatcgtcgccattccatctccgttttgctaggttatcctttgttaaataccactagaggattttaatttttaacggaattctcagcttccaaaagtggattgatgataaaaatgggatcttcagttgactgcttcttgtttctcttgttgcatctggcgctccatcacatttggcttcttttatagtaacagagaagggaaggaccagaacagaaaaatgaaaaaaaaaagcattgcaatgttatactttgccataccttttatctaaaaactctggctacaaaacatcgcgtggttcgctgatgggccggtctgtgttgcttcagcgatcagcaccgcaagtaaataaagagagccgccggaatggctcaacgactgatacaacacgagctgcatgaatgcacggcgtaactaatttggagccaaattagtcatgggattagctttccggccggatagaacatagtacagaaacgagggtaagcctcactacaccggattaggtcacctgtgatgggtcctaaccatcacctttgaagggccggtttgggcctagtcagagactaatggtcactgttgagtctcagtcacctttgatggtgcccgttagaggtatcaatcacctctgatgggcatgtatttcatgcccgttagaggtatcagtcacctctgatgggcatgtatttccgagcccgtcacaggtgatgatgaccacaccgcagtccgtggttgcaaccccacaggtgacttatctttgaggctgtgacgggtgcattatattcggcctgtcataggtatatcatctttgacggggtatagtatcaaagctgtcacagatgaggtcacctgtgatggattttgttatgacccatcagtgatgaggtgaaattcgaaaaaaaaaacaaattcagaatattagctagcctcaggatttactagccacgccctctgaaaaacagaaacatcacaaatatatgccaggcaccccaaatatcacatattccccattttagcacatatgcatcttaaaatttacatcattcacatatgcagttcaaatgccacatatttgcacaacacattcataccacattaaagccacaaacttgcacaatttcttgccttgcacatgaaaccgcaaacttaccaaagtttcttgtatcctattccttttgaacctccacaatgacctgtcattaaaaaaaaggagaaaacaattgaacggtacaaagtaattcgtagtagatcaatggaacactggagaaatcgtcggagcttcttgaagaagattgcgtggcttgagcggtgaaaatggaagtaacggtgtgaaattttttagggtggtggttgttatttgtaaacatgtgcttaatagtcgaaaggataacactagcaagttgcggactgaaagagataattccactgtgttatataacacatcggaattgggggagcatgtgttaacagtgaaatttggcaagatagactcggatttggagttggatatcgaaacggaatcaaaggagattgatttttgccaaaacagactacgcatcgacttgaaacagagtcggaatctggttgagccgatctggtgggaagccgatacagcctaacttgggctcggtttgggcctcaattgagataactatcattgccgtttagagatagatctcatctaaggcaattgtatctattaattaggatatttatcttggtttgggcctcaattgagataactcttttcttttactttccaacgagttcttgcttcaagtcggggtatcggctgcgatctctcgacaagtggtaacttgtcttgaaggcttgcgctatcggggctattatatcattttaatgtatcaatcattttattgtggtcatttttatcacatatcttagttaatatagtcttagtatctcaatttagtcatatcagttgattctcgttttagggtttttgtcggtattggcttaaatcgtcttactagattagattagctaaggttctaccatcccgaaaagttgttaactccttgattgttttgactttatgtttctctgcgtattttgtgatgcatcatccctagccgtgcttagaatcatagaaactaatccggagttaatcataattaaggatagtatcggagtttcagccgatcttacctaatatacatgacaatgcatgtttcatgatctgtttatgaatatttgccacttatatagatagattgatttatataaatgcatcaagttagattgatctctcttaaactttatatctggtgatcgattgttatttggtacgtttatatagattgatttctttatataagtctgtattagagtattagtcaatacattatttgtttttgctctaagtactggtctattggactattttttataatactggcttaaaatggatggcaaaaaccacaagagatggtattacaaccgttagggcatatttagggtttgcactttatctattcatctaaaagccacaaccgatttggtttaactgcatcggctgggtcctgacgatacgtcatcggctctatcggccgatcggctatcgntcatctaattatgttttctgttttatcttgctgcttgccgatctcctgcaaaagggcgtgatcgatagtcactcggttcatcctttttgcgcccaggagcttgaaacgacgaaccatatcctcctacactgtgtgttcatacgtcaagtctggcgcctcgtcctgtcttctggctggcgttggctcgccccttcccatggctgctctctttaggtctggtggccgtcttctagggcctgtctaccaaagtgtcttcgcaagggctttgacactctggtcctcctggtatcctggcagctgtggaaggagcggaaagccagtgtttttgattcgtccctttcgccggtctcggtggttctggagtccatcctttagaagaatcgtctttggtctcttgctagtgccgcttcatttggggacctgttgggaacatagggcagcagttactccaccacctctctccctctttataggagcagcattttcagcttgtttttcctcccttcgcggtcctttaccttgcatgcggcaagggtctatctgatttattgcgttgtgaaactaaaactctattttcttctaatatactgacgcatagtatttttgtgcattcatgaaaagaaatctgtttt

SEQ ID NO: 15666 - DNA, 590 bp, Oryza sativa
ataagaggctgactaaaagcaatccaatctcatgccaaattctattgtataaatctcgctctaaaggccgaaaaaatcagcgctcgacacggactcattgtcaccacccgtcacctaaaatctactcagcgtcggcaaaggagccatgggttctagcaactaacttacctgttgaaattcgaacacccaaacaacttgttaatatctattcgaagcgaatgcagattgaagaaaccttccgagacttgaaaagtcctgcctacggactaggcctacgccatagccgaacgagcagctcagagcgttttgatatcatgctgctaatcgccctgatgcttcaactaacatgttggcttgcgggcgttcatgctcagaaacaaggttgggacaagcacttccaggctaacacagtcagaaatcgaaacgtactctcaacagttcgcttaggcatggaagttttgcggcattctggctacacaataacaagggaagacttactcgtggctgcaaccctactagctcaaaatttattcacacatggttacgctttggggaaattatgaggggatctctcagtgcatagcttgagt

SEQ ID NO: 15667 - DNA, 528 bp, Oryza sativa
aattaaactaactctgtgttgtacggcaacagtatgaacgtcttgtaatgctgcgcctttaggagatggacgagattgtcctctgtggcttgcggatattggtcgagcattgcgacgtttactttccgagggtcgatgaatccagtatcgaaaaccccccgccgtcgggccctttgaatctccattctacaatgataaaagggagtatattattttctatagtctacttatatacaaggacctaattaattaaaggagacgtagtaagaaatctaactgaacgatatacttacaaaatccagcaactcataatagagacgtcgagggcatccagctggtatagatcgtagattccctttgaaattgatccagagaatgtcatcctttaattaattaggtctttgttcttggcggcgtcaactttcgcctttttcggtggccttgtgtgggcaagccgtggaactttgggggcccttgactttaaagtgcccgaagaagagcttgcggaagagtccgtgcacgaaccta

SEQ ID NO: 15668 - DNA, 2015 bp, Oryza sativa
ctctgacatgcctcctcaagcacaacggattagtggaaattatggctacacaaaccgttgaagatagttctagaccttgaccaagacgaactcgcgtaggtaatttattgaaactcttgaattcagaatatgggaatgtagctctgggttgggggagtactcattttaggggggggtcgcaatggctttatacgtggtattcctatctattatttttgaaatttatagttcttccatttcagaaatgctcattttggtggaaagacggctttgttctacaaggacctatggtatacctccactctaggcatagaatttccaaccttttctcatatgcacaaaaagaggacatctcattcgaatccttcatgcaacatcaagagataacctcaaactttcacttccctatctccacacaagctctacgagaactgcaagaactcaatgaactaatggccacaatacaagtgagtactctagaagatacatggacttatatttggggcacaaatctgtatcaatccaagaaggtgaattctcttttctttgcaccgatacatccatctccttctctaacagtgatttggaagagcaaatgtacaataaagatcaaagtctctttttggctgcttttagtggaccatttaaacattagaggcatgatgcaaaggaagccttaaacctgcaaactggagttaaatttcctgtatgtgattcccatgttttggaagatgtaacatgttttaggagttctctcccgctcaattcatgatgggtgtgctattaggatcattcttttatttccatattcactaaattgttcaccttaacttatgttctactactcatttttcctcttctttcgttgaggaaaatgcaacaggataactgctcacgttgatttcattatcaactgtactaggtggtttggaaagataatgctcttctagtgaatactatcctgaacaaaactgcatcttccgtgcgatcaaaagaatgtcaatgaactcatttatctggcgtactcattcattagagtaacatctagatactaaggagagattgaaatacttgatcaatctcatcaagtcaataaacagagcgtatttgacttaacggtagctcagagctttcttgttccagcataattttgacttttgttgcatatgtcagagatattctagattcggcaaacttctagttcacggtgccagtcatcttccgttattaaaagtatgcgcaaattatattaaggtaaaatgcacaaatgctacaatataatggtacacataattcccacaaataattctaatgtattctatgcaattctatattttatcacttaaaatattaattaaaggtaataaatgcattacaaataattaaggcaaaatttgctataagacaccttaaaaacatgatctttgccagagtatactgtaggaatatgaatttacagtaacatgctcttagttttccagaaatacaaaggcctttatgcaaaatcagaagattttcctttctttttttcttacctttcttcctcttcccttttctttccccaccccacgatggcaccgcctgccatgtgcggcagttcggttgggcagcggcagcgaggtgtgaccgggcagtggcagtgcgacatgctgggctgcaaggccaggatcacgcgttggcaccaaggcgagcacgctacgctagcccgacagccaccgcatcgcagcgtgttgccttggtgcgtccacagtgcttgggaagtggcaatagtgagggcacactgccattcgatggcccaagggcggaggccctgtgcatgtgtggcggccgttcgtgggcgctgtggcctgacgtgcatgtggcaacagcggcggcgtaggcatggctcggcaagacggcaacctcagcacgggtgcgggatgcgcgattcggccccggcctcggtgcggaccccgggcacgatcgggcgtcgcggcgcaacagtggaggcacggacgcacggtggccagcgaggg
